United States Patent Application Publication US 2018/0305689 A1 - sequence listing, part 132

SEQ ID NO: 1883408 - DNA, 4001 bp, Homo sapiens
cagagtatctaagactagatccctgccttcatcacccagtattcccatagattacagacaaacagataatccatgaaagtaaattcagttctcagactgtatattaagtaaagaaaacaaacagtatggtgagaagagagtcaagaggccacctacaatatatcccacctaacttggcatcttagggacacacaagcatgagcaaaaagaaaagaaaacgctatggcaactataaaatcctcctagattagggagggagggagggagggaaggaaggaaggaaggaaggaaggaaggaaggaaggaaggaaggaaggaaggagggaaggaaggaaatttataaaaaacatacagatttagcaaattaaaatataaaaatagagacacccagctcaatttgaaattcatataagcaacaaataaattttagcatatacatgtcctaaatattccatgagacatctttatactaaaaagaaatattcattgtttggcaaaattatcacaagaaacataaaaatactactcaaccctacttgaaactaccctactcacaaactcatgaaccaacctactcaaaactactaattctaatataatgtaatataatagaggaatgtaagttcactaaaacaaaattcaaagacaaaataatagaataacagaattagatgataaaggagagtaccgatataagggggaaagaactcaaaacaatagccttatgaaactaatacataaattagaaaaacaatggatgcaattgaaaattaagttactgatacagagaaatggggattaagataattatagtgaaggaagatgaacagataaggagataaaagcaattagagaaaagtgaatactttaaacaaaaaaatccaacacaatgttaacagatattcctgaagtagagaatttaacaaatgaaaataaatatttattctaagatctaatccaagaaatttcctgaaaaaaagctaagtaaatctttaggttgaaggagcactctttctagaaaatgtggtacaaaacaaaccctcaatttctagacctaactaagttaagctattatgtgttaagggtaacttatttttaggcatcttgggactaaaaagccaatcgcctatacggtagaataacattaattttatttcagatttgttttcagtaaagttgactgcaagaataaaatggaaaattctccacaaattcaaggaaagaaaatgtgaagggagagtattatatgcgcccaaggcatgatgaaagtaaaaaagtaacaagtaaatattgtcaagtaggaaaataattcatagaaaaagacccatgtaagcccttcttgggggaaaaaataagcaaaaaactactttaccacaaaatccagccaaagagatgaattcagctaaaaattcaagaatggaaagtagcccaaagactgaagagttgtgagcactgaatccatttgattttattaccggtagtagtcaactgggaaatgtggttaccatagagattgcacaggcgcctgtagtcccggctactccggggtctgaggcaggagaatggcgtgaatctggtaggcggagcttgcagtgagtcgagatcctgccgctgcactccagcctgggcgacagagcgagactccgtctcaaaaaaaaaaaaagaaaaaaagattgtatatgctctaaacttagtaaatgtaaacctaactgataaaactaatagaaagtgaagcagggaaagaggacctgagacctgtggcaatatcttcactttttttttttttttttttagacggagtctcgctctctcggccaggccgtaatgcagcggcgggatctcggctcactgcaagctccgcctcccgggttcacgccattctcctgcctcagccccgagtagctgggactacaggcgcccgccaccaggcccggctaattttttgtattttttactagagacgggatttcaccttgttagccaggatggtctcgatctcctgacctcgtgatccgcccgcctcggcctcccagagtgcggggattacaggcgtgagccactgtgcctccacttttatgagagggagtcaattgagcttgataggttaaaataaaaaaaaaaaaaaaaatcgacttccatgtttttcaagttaactttggatcttttagaaaaagatacgtcttaaggtgaaaataaaacatttatttgaggtcaatagttcctctaaaagcaaaatttcagttttaaccttctgttaaattaaaatatcaattatactatgatcttactgtctgcctacatcgatgcatgtctatatatccatctatccatcagttcatccatcttgccattatttgatccagaaatgtacaaagaaatatatcatagaattttatgtatctaatggtaattgtgagtctttctctgtggtttgagactttttttttcttactagtttgatgcattgttttaattgtttttagcaaaacaacataatgagttttgcaaaagaaaaaatgtaagcaagcaaaaatgaccagatggtaagtcagattaattctgaaaaataggaatgtagattaattacattttaacctacatatttcagcatttttaatatttacaaagtaagatgctcccttgatctcaccagagaaatataaaatgaaaagtgacagatctgtctcctccaacatcccattcccattcttcagaagtaaccactgttaattgtgtactcttccttctagaaattttatttgtatgtattaatatatacgtagacatagatacagatatatcttttttatataatcaggatcaaacaattctcaaattctttctaaacaggttaaaagacagtatataaactgaattaatttgcttactgttctttattttctctatacttttgggatcattttcactcacaggttcaatgaaatggtggaaagttccttttgatctgtaggagataatacataattaaagaatattttacttcttattcttttgtgactggctttccattcagattttcagttctttcttgatttcatgtttctgaatttttgattccagctttctggctcccgcaggagtctcagagatgccaatttactatggtgcttggtaaagatgaaaaatcaagcttgaggtaatttttatttaataaatctccattggctccaaaggctatttcccagccatcttccaaaatatacatagtgttatgtaatattagttccactcacgataactccatgccagagcacattagaacacagccaaacactgtagccttgcttccttcctctgcccttccgctcccctttgcatgctacgtggtttcccactctgtccaccactcaaaacttagaactgtagttccaaggcttgggctcattttcatctgttttcttgaactcaaaggctcactttgcaactttccactcacttccctttaatacagcagtgatgctcttacagttttgcagaggaacaaagtataaggctctaactctcccgattcaagacatgtatgtaatggaagttttcaactggaatcaaattactgtattaggcaggatcacagaatgtaacaggaactgcctgagaaactgcttggaaactacagtttaggcagggcaatgaagcccaggattgctcccaaaaaggacctgaaagacccattgataagaggcagcagccagtgtaacctcttggccgcataatgttaagtgctctcttctgcctcctgctaggagttacttttctatgtttgggatccaaactaacccagcggtattccaatgcaagcagggaaacaggtgaatgtcaaatcagtgctggctgcaaggtcactctctcacagctcatgttcttttagggagagttactgcaaatctgcagctacgctcttctgccagtccctatttgatcgtaattaaatgaagcttgagaatcctgcctcaagccttttctttcttccagagaaggct

SEQ ID NO: 1883409 - DNA, 4001 bp, Homo sapiens
acggtatggacacaagtcctttgcgcaattttctttccctaaccatgagagccatgttcttaaagatttgggtgaaaattaatgaattagtaatataaaaatagtagtaaagaaactgattatatttttaaaatgttagacaaactataaactctagttgattaagaaccacaatttagaagtcactgctccctaaaagtcatggcaatgaaatagagggaaaaataaatgaaactttacccaagcaagaaaaatgtcctttgttttttaagccactgtaatttgtagcttttctgttagtttagtttagctgctcctacccggaatgaaatagtggcttaagtctctttgaagagagtgaagattcaagaatacacagcaaatttgagaaattattcatttatagtatttcccaggggattggacaaaaacccctctcccattgcacagaaaaaatatcttaggagacagagaaaaggctgcagagtatctaagactagatccctgccttcatcacccagtattcccatagattacagacaaacagataatccatgaaagtaaattcagttctcagactgtatattaagtaaagaaaacaaacagtatggtgagaagagagtcaagaggccacctacaatatatcccacctaacttggcatcttagggacacacaagcatgagcaaaaagaaaagaaaacgctatggcaactataaaatcctcctagattagggagggagggagggagggaaggaaggaaggaaggaaggaaggaaggaaggaaggaaggaaggaaggaaggagggaaggaaggaaatttataaaaaacatacagatttagcaaattaaaatataaaaatagagacacccagctcaatttgaaattcatataagcaacaaataaattttagcatatacatgtcctaaatattccatgagacatctttatactaaaaagaaatattcattgtttggcaaaattatcacaagaaacataaaaatactactcaaccctacttgaaactaccctactcacaaactcatgaaccaacctactcaaaactactaattctaatataatgtaatataatagaggaatgtaagttcactaaaacaaaattcaaagacaaaataatagaataacagaattagatgataaaggagagtaccgatataagggggaaagaactcaaaacaatagccttatgaaactaatacataaattagaaaaacaatggatgcaattgaaaattaagttactgatacagagaaatggggattaagataattatagtgaaggaagatgaacagataaggagataaaagcaattagagaaaagtgaatactttaaacaaaaaaatccaacacaatgttaacagatattcctgaagtagagaatttaacaaatgaaaataaatatttattctaagatctaatccaagaaatttcctgaaaaaaagctaagtaaatctttaggttgaaggagcactctttctagaaaatgtggtacaaaacaaaccctcaatttctagacctaactaagttaagctattatgtgttaagggtaacttatttttaggcatcttgggactaaaaagccaatcgcctatacggtagaataacattaattttatttcagatttgttttcagtaaagttgactgcaagaataaaatggaaaattctccacaaattcaaggaaagaaaatgtgaagggagagtattatatgcgcccaaggcatgatgaaagtaaaaaagtaacaagtaaatattgtcaagtaggaaaataattcatagaaaaagacccatgtaagcccttcttgggggaaaaaataagcaaaaaactactttaccacaaaatccagccaaagagatgaattcagctaaaaattcaagaatggaaagtagcccaaagactgaagagttgtgagcactgaatccatttgattttattaccggtagtagtcaactgggaaatgtggttaccatagagattgcacaggcgcctgtagtcccggctactccggggtctgaggcaggagaatggcgtgaatctggtaggcggagcttgcagtgagtcgagatcctgccgctgcactccagcctgggcgacagagcgagactccgtctcaaaaaaaaaaaaagaaaaaaagattgtatatgctctaaacttagtaaatgtaaacctaactgataaaactaatagaaagtgaagcagggaaagaggacctgagacctgtggcaatatcttcactttttttttttttttttttagacggagtctcgctctctcggccaggccgtaatgcagcggcgggatctcggctcactgcaagctccgcctcccgggttcacgccattctcctgcctcagccccgagtagctgggactacaggcgcccgccaccaggcccggctaattttttgtattttttactagagacgggatttcaccttgttagccaggatggtctcgatctcctgacctcgtgatccgcccgcctcggcctcccagagtgcggggattacaggcgtgagccactgtgcctccacttttatgagagggagtcaattgagcttgataggttaaaataaaaaaaaaaaaaaaaatcgacttccatgtttttcaagttaactttggatcttttagaaaaagatacgtcttaaggtgaaaataaaacatttatttgaggtcaatagttcctctaaaagcaaaatttcagttttaaccttctgttaaattaaaatatcaattatactatgatcttactgtctgcctacatcgatgcatgtctatatatccatctatccatcagttcatccatcttgccattatttgatccagaaatgtacaaagaaatatatcatagaattttatgtatctaatggtaattgtgagtctttctctgtggtttgagactttttttttcttactagtttgatgcattgttttaattgtttttagcaaaacaacataatgagttttgcaaaagaaaaaatgtaagcaagcaaaaatgaccagatggtaagtcagattaattctgaaaaataggaatgtagattaattacattttaacctacatatttcagcatttttaatatttacaaagtaagatgctcccttgatctcaccagagaaatataaaatgaaaagtgacagatctgtctcctccaacatcccattcccattcttcagaagtaaccactgttaattgtgtactcttccttctagaaattttatttgtatgtattaatatatacgtagacatagatacagatatatcttttttatataatcaggatcaaacaattctcaaattctttctaaacaggttaaaagacagtatataaactgaattaatttgcttactgttctttattttctctatacttttgggatcattttcactcacaggttcaatgaaatggtggaaagttccttttgatctgtaggagataatacataattaaagaatattttacttcttattcttttgtgactggctttccattcagattttcagttctttcttgatttcatgtttctgaatttttgattccagctttctggctcccgcaggagtctcagagatgccaatttactatggtgcttggtaaagatgaaaaatcaagcttgaggtaatttttatttaataaatctccattggctccaaaggctatttcccagccatcttccaaaatatacatagtgttatgtaatattagttccactcacgataactccatgccagagcacattagaacacagccaaacactgtagccttgcttccttcctctgcccttccgctcccctttgcatgctacgtggtttcccactctgtccaccactcaaaacttagaactgtagttccaaggcttgggctcattttcatctgttttcttgaactcaaaggctcactttgcaactttccactcacttccctttaatacagcagtgatgctcttacagttttgcagaggaacaaagtataaggctcta

SEQ ID NO: 1883410 - DNA, 4001 bp, Homo sapiens
taatggcatgtcctcaatacatctatttctaaatctttattttttcttagttaagcatatgctatatagagtacactatttgtggtacatggtgaactaagacttttggcccaatcacaggctttatgaaatggcatcaaagagcatctgaaaatttttaaaaagggaaaacaactggactttcgaatatctcagaagccacttggttttctcttgcaagcctttccttccagggacttccattgttctgcgccctgagtgaagtgtttcactttttccctgtagtggaaataagcaacaacagagctgctttgtgaaccagaaagtcatgaagcctttccaaatgaggaggatgtgggaagtgccaaagagccagaggggccaggcagaagaagaatgggcctgacttcctttagctcataatgaaggtaattctttgagtccaggctcaggtaaacctgcagaaggaagacagtctttgaatctaagcagaagagggtcagtgtttaggtggagaaaagcaaacactcttctccctctggacagctacatctgcctgtgttgcaccagatgtggagcagctgtgtgttctcccagatgatagtcagatggaaatgatggagaaagaaatcacattctgtatgcttcaggaatagaaaacaggattaatccttatttgcatgacacattagtgagataaagtcttttttatctctattttgaatggaaaaaaataactatcatttatgaagcactgaccttcataaatgaagcactaacctaggagctttaaatatgctttattttgaattctcacatcaattctgtgatacggttaagatattttctcacatttatgagaaaatcgagtaccagagttgaaggtcagaaactggtaaaatctagtctagaactcaaggtcactaatgtcttttccctgatgttcggccttggcacctactgttagcattacatttctaatttattgttgaaaaaccaggttgagtttttgaatggcctctgttgagactccagagtaaagcttctctttgagatctttgaagagtcttgaaagcagagaaattgtctagatattttttaatttttaaaattattattattattttaaagacagcatctcactatgtctcccagactggagtgcagtggtgcgatcatagctcactgcagcctcaaactcctggggttgagggttccttttgcctcaaccttcagagtagctaggactacaggcatgcaccaccacacctggtggctaatttttggaagttttggagacagggtcttaccatgttgcctaggctgcaaactgtctacatagtgacatcaaagagtgacaggaaggctagcacgttcccaggtatataaaataattgactcatagagctcagtctgtgcttccagcagcttggatggttgctaccacggagatggtacaaacagcaagcaggcaggatgaatgccaggacgtttgcatctggttgttcatagaaacataacctaaaacatgtaccaacaaaaactatcagggaaagtgcctaatttcaaacctataactattctcttaatctctgagcatgagaacactaaggtcttttctctttatatatttaataccaatatctaaaactgaaaagcaaagctattaactaacaaaagaataagtatactgacgaaaatttgccaaatttgcctgaatttaactgtaattaatgagtgtgcttttcagaatatgagaagaaaagatcttttctaataaatacacaattctatgtcaaattctgtttctcaattttttgctttgtgaaaaccttcaatttaaaaccagcatagccgtgttcaggcaagtctgaatatacgtaatatcttcatgtaatctcaatgaaagaaatactcagcccttcgttttaattaataataccatataatacaaagatggcatacatgttggtgaactactgcatttcatcctctgtctagatggttcactgagtcacagtcttgatgagtttgtgacatcataattcatcaccatggaaacaactatgatgatgtgttaccctgcggacccttagtcatcaatcagtttgattgatgactctgctatgttcagctaaatcaagttgacttacacgttcacaaattaaaaactgctctctgtagtatatagcatgatgaccaaaaataatgactgttttaaaaatatgatcaaattaaagacacagaaataatcattcataatcctgccattatacaaatcacttcttggctgggtgtactggctcacacctgtaatcccagcattttgggaggccgaggtgggcagatcacttgagcccaggagttcaagaccagctagggaaacaaaacatagtgacactccatatctaccaaaaagaaaagaaaagaaaattagccgggtgctatggtttgactctgtgtccacaaccaaacctcatctagaattgtagtccccacatgtcaggggaggtgcctggtgggagatgattgaatgatgggggcagacttcccccttgctattatcatgacagtgagttatctcgagatctgatggtttaaaagtgtgtgacagttcccctctcactctctctctctcctgccaccttgtaagaggtgttttgcatcctgtttgtcttccgccatgattgtaagtttcctgaggcctccccagccaggaggaactctgaatcaatttaacctgctttcctaataaattacacatgctcaggtagttctttacagcaatgtgaaaataaactaatataccaggtgtggtggggtgcacctgtggtctcagctactggaggggttgaggtgggaggatgaggattgcttgagcccagaagatcaaggctgcagtaagccatgatcacaccactgtactccagcctgggccatagagtgagaccctgcctcaaaaaaaaaaaaaaaaatcacttattcgattttttagtagttaattataatttttgctctagggtagattcaatttttatataattataaactcaagacataattttaatattataagcagtttcttatagtgctatttagctaatatgatgttttgttaagttctgatgtattttgaaaatagcctgtaatgtccaaagaaatagcatctggtttgcaaaatagggtttggggagcaaaggtcgagattgtgacagtgttctgactgtggcttgtgaagggacatacaagttattttattttacttcttcaggtttcactagagaaattaaagccttatctttctttttcatcaaaaggcagttaagatttagaaaacaagactgtcatgatcttcctggaataaaactgccaaataaaaatttagatgtaatccagtaaaatgtaagtccctgaagcaaagaaatgacaaattatgagttttgtatcctcattcctcagtacagagtacgtttttaacaaatgtttatttgaagtaaatgtacaactaaagattagagcaaaaaataactgttaactaatttataatttaggaatctgttcaaattactttgtgatttttaaacttatatgacattagtggagatggatctgtgaatatgtaaaatgattttacattatctaggacaagtttttctatcaaaagacatttaggtatttggttgccaattaagtataaaaagttatttttatcaaaattaaaagctcttgccttgtggaaaaaaacagtaaagagaataaaaaagacaagctatggactgggagaaaatatttgtaaatcacatatccgacaaaggactgctatcaagaatatatacagaactcttaaaactcaacagtcaaaaaacaatctaattagaaaataggcaacaggaacagagaagcatttcactaaagaagatatacagatgcaaataagcctatgaaaagatgttcaacatcattagccactaaagaaatgcaaagtaaaaccaaaatgagct

SEQ ID NO: 1883411 - DNA, 4001 bp, Homo sapiens
tttatagtttccattatctttaaactctttgatcatttgttttatacaaatgtatctcaggttagagattgatttttgacccaatttcaattgtaatagggctatttaaccagtttataggtcatctgtactgtcaatctactttttgctaattttagtgtctttttgctatttttctttttaccacttcttttccaaacattggaatgtatatattctatttttgtagttaacacttatttccatgtcaaatttacttggaactatatgatttacttggaactatatgatgcagtaactactgtttttccccatgcatcatgtacagaaaatgaggatgtatccaccccctcccaaaccagtgatttggaagtttctttacagtatcagtagtaacatggacaaacttgttatttttttcctgctatacttaaaaataagggaaataaaactgtactgttttccaattgtcagatttgacatttagaatgttatttgtcaaatctacagtgacaaagcccttttacttaggtttagcttaagaacatgcgtatttgtatctacaatactacatgctaaaaataaaacagtatttgtccaatatattgaacatgtggtatgcccttccagtttaaacgtaaactgaaattttacacccagcttatgtttctatttttgtatttagttttaatgccctatacataacaatttaaacttaatgctccttaactagttttaatgcataccatcagttctttcatacaattgcctccctattcttattttaattcaggttctctgttagctgcagtaaatccttcagcaaaattttcagggaaagttcttggttgatatactttcctaacccctgtatatctaagaatgtcttccagtttcctttgtaaagaaatgataacttggcagagtatataattcttggctcaaaattattttcccttaacactctagatattgttccactgtcttctggcatttagaattgcaggagaaaaatctgaggtcagcctgacttttgcccctttgtaagtaacctgctttctctgactggatgcttgtaaaatgtttcgtctttgaaattcaaaaacgtcacccggatatgtctagatgctgctttcttttcattaaactttaaaggtatcctatgagccttttccatttgtagatctagttcgttcttcaattctggaaaattttttcaagtagatcctttattgtttcagctccacttgctctgtcctcagtttcaggtattcctattatgcatagattgtatctcctggaccggccctctagatctctctttttctcctcttaatttcttttccccttttctctgtattctgtgacaatttgtcgttttgcacttacttcagtaattcgattttgtggccaatccagcgtgcgcccttctgttaactctctcaacttcctggtattttccaagcgctctaatagtaccctctttatcatcgcgcataggtgtttaagctcctgtattatatgattctcaatccttcttatatcttgtttccatctctatatccgtttcaagaggaggcattttctcgattatttagcgctgctccttttttctcaggggcggtattacgaccttggagacaataaacataatttaattccacacagccccaaacagcccaaagattcccattgataattatcgacggctttattaaaatgcgttatttttctttcttaccttttcagttgcttttcttagaaacagggaccaaaatcaaagattaaagaggtcctctgaagcagggaatgaaatagacgttgaaaactattcccgttacgccatctctgcgcgcctcacgtcagggccaagagcctagcgcgtagctttatggctgactcggctctggcgctctagccaattccgaggctgcaaactccgcttctccgctcgcagtctggttcctcccctgccgccccgcccatcacggcagggtcacggtagcgcgcacgcgcagcaccccatttaagtttctcgtctttgcagtggctttgcttagatccggtgccgccttgaaggcggggctgggtcccagccgtagccaatggagccccgggtgagggttgaggggtggaaggtgcctactagccggtgcaggtttcttctagcgcgtgtgctggggtacctggtcgtcatggaggcggtattgaccgaagagcttgatgaggaagagcagctgctgagaaggcatcgcaaagagaagaaggagttgcaaggtgaggcggaaggaagtgggaatctggaagccgccgcgactgggggaagggcgcgtggcgggtcgattctggggaatctcaaggcgtgacttatctggatcaccctagacttcccctagtagcaagtggcctcttctctcttcacctaccccggcggccctttaattccccaaccttcagaggcttccccttctgaggcctgcggcgtgccccctaccccgcgccgccgccggggtgcaggtgtctgaaaatacctagaagccgccgtcttggtccgctcccaaacccacgatgcctcccttttctatacctgccccagttaccgatacttgtccctaatgggtgtattttgaatggacccgcctcagtttaggaggttcagaaaggataccggaaagatttaaaactggctacagtcaggtttttttccttctcttatctcgccaaacaaccgaaacatattcaagattttgttaatgaagttttttttttttttggtctcagctttatctgggatcttctctctctgtagctgcctgttacgtgatgactctttcttccataattactttttctgtacccttcgcccgttaccatccccttattggttcctgtttctcatctccttttactcctgcgtgtctgacttaatgattttaatggcttttcagccaaaattcagggcatgaagaatgctgttcccaagaatgacaagaagaggaggaagcaactcaccgaagatgtggccaagttggaaaaagaaatggaacagaaacatagagaggaactggagcaattgaagctgactactaaggagaataaggtatgtgaaataaatgtttgtcgttgcctacaccatttgaaaacagctgtccacttctgttaaatgttaaactgcttttttttttttttttgagacggtgtctcgctttgcaaaacacgctcaatcttggctcactgcaagctccgcctcccgggttcaggccattctcctgcctcagcctcccgagtagctggtactacgggcgcccgccactacgcccggctaattttttgtatttttagtagagacagggtttcaccatgttagccaagacggtgtcgatctcctgaccttgtgatccacccgcctcggcctcccaaagtgctgggattacaggcgtgagccaccgtgcccggccctgttaaactgtttattatctaaaatcataaaattggtagggaaatgaaatcacttagttatgctcatgcatcacttctcattaatgtttttgtgaccaagtttacagggcagtgtgtttctataagggagatcggcaaagaaagtgctatacttctttacctatttacttgcccaaaagatgaagcttcaccaaatcaaagttggaagaccaggcatctgatcccagaattgcgactgaatgggattgtaacctgagcaaggttacttaatctttctgagctcaaattttcccacatatataatacgatacaaatatttctacactctaagcacaggtttttgtaagaatcaagaaagtgaacgtgaagtcatttttgttataaaagtgctttattaacaagttgtaatgaatgaaattttactgatgtttcttgggtaagttggagcatcctaactttcataattttaactaatatttattttatcgttggatctaatatatatgtgtcaaatactttggtttatatgtattatctcattt

SEQ ID NO: 1883412 - DNA, 4001 bp, Homo sapiens
aataaaaaccttcaagtgttcaaaacctctactcaataattccttttcttaaagaccaacctatggaaataatttaaaacacaagggaaaatgtatgcctgtgcttccctgtagtattttttccaagacaaacattgggaaaaccttaaatagttaatagaggagggatgtttgcttatgtaacttctactttggaatatttactcagtgaaatgttatatagccattaaaaataatgccaacacagagtttaaaataacgtattaaaagcttacaatgtcatgctaaggataaaaacaagatataaaattgtttaaacagcagactcagagtatataaaacaactcattaaaaactgagagacaatatactgatttcataatgattatctaaagatgattgttaattttctttatgtttctctgtattgcaatttttaaaaataataatcatgcatttttaataatagtgataaaaatccaatgtctttaaacattccagttaccaaattctctagtataggactcagaaactatagcgcaggagtcaaatccaacctggtacctgcttttgtaaataaagttttactagaattacagctgttctcattcatttatgtattgtttatggctgctttttcactaatatggcatagtcatgtcattgtgatagaggatgtatggaccacaaaacccaaaatatttgctatctgactttctacgaatcttaaaagtggatgctatttaagctcagaagacatttcaacatcctagtagaaagtatctgtcaaatgataaaataactggtgattttgaaatggctgggcttttcttccctataattttataacttctacacagataactccatatttctccatttaaggcagggcaccagcaatatttgctaatactaattttagctgggctgtggaatcaaaagaaaagtataagatgggagctccaaggacagctttcactgcaggatgacgatgattcttagctgttaaattacccacacatggacagtcttgtgcaggcatcttcttactctttgggtgatattaaatctgatgctgaacaattagagggcatattatgcggaaacaggtagtgggactgggtaagtgctgagttctttccaccttgaagtctgggcagagtggctgaaaaactggacattgggatgagttatgactcaagcggagaatatgtcatgaccatctgggatacctaagttacttaacttgggccacatccccactactccatgctgcatcaactatttacaaactaccagggacagggaactcatcctttctaaggtacttcattccacaactgtttatttttttaaatttataagtaccgaagggcttaccttatgtatctgcgcaccctttgacccttggcattatcttgggaggttccaatagatttctcttctcacttctagtgattaaagtccagttaggttcctttgcgtcatctcctttctccctgtagcttggcctgtggggcctgcactggcacttagaggcacatgggaagaaagatgtgaatgttccttatccattggtgtttctgcctcttctccactggtgttcatggccttattaagatgggatccagattctggctctctggggtgcctatgtcagctctccttcaggccttgcggggcttccacaagtgccagttaagtgtgacttaactgtggatctctttaattgctcaggttcctcagttggctatgcatcttatatcctttgatgctgtggtcctccggctccagaccaccataggtagctctttgtactcaagagaggttcctttcttcattataatttgacctgtgggaattcatacattcttgtctcaccaaattgtaagggtacagatgctttctctgcctccttgccactttcctttccttcccatctgcacaggtaggcaccggcgtggagcaagctgcctatgcagatatccaatatccatgtgtggttcggagccactccctcctcttggcttcagaaaagtacagaacaacttcactggacattctattggtccaactcaagactatgacaaatttgctcttccttctacttccactcaaagtgtctttttacattgactgatatgggaagtgactaggtgcccgggctgattgtcagaaacagcagaactgctgaagtgcttttgaatgaacacccaaggaagatttctgtgattatttgtagctctatatagatgtttagggcactaatgatttcttatcttcagctttggggtctactcacaattttggagcaacaagcaaagcccaactcaagagtctgttacattgtcattgaccagcctgatcacagttagctagagtatgttctgtgaagtccagtcccaggaaatgtttctgcaagaatctccctcatggaaaacactatgaataaaaaagtctttgacgagtcctacagtttattttcttcatgtaagaactaccagtgtgtcctagtttacagtgtatacaactttttcctttatatattgctctcattcattcgtttattcattcaaccatccaaaatatattgagtacttgctctactcgaggtatgaattcagtacatctattggaaaagttatttgtaatcttattcattcctcacaacaaccctttgaaatggatatagcagataatttactattctcatattacacatgagggatctgaagttcagaaatatcgaataatctttccaaggttatgcaactattgagaaagtagagaggccaggcacagtggctcatgcctgtaattccagcactttgggagggtgaggcaggcagataatgaggtcaagagattgagaccatcctggccaacatgatgaaaccccattgctactaaaaatacaaaaattagctgggcatggtggtgcgcacctgcagtcccagctactcgggaggctgaggcaggagaatcgcttgaacctgggaggtggaggttgcagtgagctgagatcatgccactgcactccagcctggcaaccaagcgagactctgtctcaaaaaaaaaaaaaaaagaaaagaaaagaaaagaaagtagagacatcagaagaggaggggaaggagctggaaattaactagcatattgtgagatcctagacttcattactactcaagaatgtttaggaacaaagcaaatctgaaaggaaagaaagtatggagacaaattctgaattcttaaacaaatttgacagtatgattgaatgctgggacaacatcagatttttaatataattttgaggtaccattctgcatgttgtggtgagacaattgagtaaacactggctgagtctcgcatcagaattctttctttctctctctctctctttctctctctcctccacccccaccccccttctctatgtgattttaaatgccagaagactcaccttgggacattggttgaactgatggacaaacaaaggaatgacaacaaatagacttgtttaactagccaaacaacaaaaatagactgactatgaataatagggaaccagttggtgtcagcttattctgaacttggtgagaaactttgtcaagttatctaccagtcgtacgagaattccagaaactctctttatttggaagcatgagtattggaactgagcaacaagggttgagtatgtttgaaactggaaaataaagcttcacacagtacttactaaatataacttcctgccaggcaggtatgggctgcttgccacattttgatagttgtcaggatccaaaaaccatgaagaaggccaatgttttgataactaaaagtactttcaagacaagcaaatttgccttatttagggggagatgaggttagaaggaattagttaattatctctcactcctaaactttccaaattttaaatataaaagctcatcatttacttttgcataactagaaacaaagccaagataataaaattacctcttatattc

SEQ ID NO: 1883413 - DNA, 4001 bp, Homo sapiens
cctaactgaaatgagtatacactaagtgtttgaagaagagggatgaaatggtcaagttttcattacacaaaaataacctgttcctttcattttatgtttatttatttttttaattttctgactgctcctttctggaaatctcaaatttatatttgccaaatattgtcacattttcgatggagaatacaaactaagaatgggttagggaactgagtcagaaagtccctgttgtacaattcaatcatgtttttctaaggatgtgcttttggacattatggaaactatcttaggctctcacttggatcctagaaaagaaggcacctgttaaaaggaatgtccagccccacctaatttggcagctgcccctccaagctaatgacattagggatgtagtggattcaagaggctgatgatgccatctggtcaactcatgtgactatttctatcagctttatttctgcaacatcctgtgcccacagaggggacacaaaatcgctttataattccttcaccatgtgaagatacagatacacccagaaccttaaaggcaagaatatgattgaaatgtcaaatggggacttggtgatctaaattatgtcccccaaaagccaatgtcttgccaccaccagtgccctatgggtggagtttctaaacagattactcaaaacacaaactttcaaaaagggaaagtcataaccctctagtcatcagggcaattacggaataacattgctggagtaaggttttctcaatgcccaagagatgagctggcaatgccacaacaatgtccaattcttagtgggtccaagaccatgtgttacatttccctcccatgattactcacagcttcacagttctgctgtcctcttcgcctctctgccacctcttaactgcacctttgacctcctacccctaagattcaaccctgtgagattacttgtcttttcatctacactctggtcactctgacccccattctttagattcaggattttctcttttcctggcttactctccagcacaagtagaaaaatattgtgcttcattggaaaatgcatgttgtttgaatcacactctttcagattatacaattgtagtctttcattatctttgagccattttataatgctgtaaactaatattaatgcatataattcttgtctatagacatgtaaattgtgtccaggggtgatttaattgacttttcttccccattgtggaaaaggctagtagttttgcctccatttgcccatttatttctatattcctgatctgtaaatgcatttctgggttttcccttggactcattctaacatctcttctttttcctcattaattaattaaattaaatctttaacacctcttcatatttttgtcagtatgagagtataaaaaaaaatctttttttgaaaattatcttttaataggtgacaaaaagaataaacactgaacaagaagtcctgagctcctactacaatccaaagtgaactagttgcagtgccataggatgatgtttctcctgagacttctttactaggatcatttagactgttataaatgcagattcctgggcctctccttagacccactgaatcagacactctaagaggagggtcagaaatctccatcttagcaagttaatgtccaggagagttagagactcactatgacgtatgataaaaagtagaaggaaggactttccagcaccttaaactacttggaaagatagattaatgtctagatgaaacttgatgagactttagactaatatgttacatatacatcaggagatgcatgtataaaccaaatccaaataacccaaagcaaaatttcttttagaaatagtgataaataaatgagtgaggagtttgtcactcacatcccccaggtaaaacatacctttttagcctaaataaatgctatagtttgaatgtgttccctccaaaattcaggtactgatagttaacagcagccgatatgatggtattacacaaaatagtaggttctttaggaggttgttaggccatgagtgcctcccccaagaatgggatgaaggacctcataaaagaggcttctcacagcattgtgacctctagccctcccaccttccataagtgaggacacagtgttcctcccctctggaggatgcagcaacaaagtgtcatcttggaagcagaggagccatcaccagacaacagaaccagccaacagcttgatcctggacatctcattttctccagaactgggataaaataaattcctgttttttaataaatttcccaatttcaggtattttgtgatagcagcaaaaacagactaagacaactagtatgaaaatatacattaacaaataaaattaatcataatatatgtttgcttttaaaagaaaataaataagccaatatgctttctgttgattgattgatttactaaacattgattggccatctccactggggatatggcatttaagagatctctttgatcttagtacttttactgctttttaaataggatcaaatacacccaaggtaaaaaatagaacacactatacgttacattttggaactgttagaaattcctttgaagctaaaattactgctatcatttgacaacttttacccctaaaataatgtggtgctcaccagcttgcttaagttacagcacttgctgtcttctcagatacaatatcagaaacttataatccaagaaaaatctaaatggcaagtgtgagttaatggaagcctcataaagcaagaggtgttttggaagtgtatggaagacatcaataaatgatatgtataacatcaagtgcaaaagtgtgtgctaggaaagttcaaaaaagaaaaaaaatatggtaaggtaagaccagagattggggagtatatagcttttgggaattcaggaaatgctaacgtctatggagaatttgcataggtgaaagatcagattggaagcctttctctgtggaagcattgtggatctaagtccagaagtgatcctgagccacctactatggaaaggtgtcagtgagcaagagactgtctgacaaaggtggaagctgagcagacttctactgcgcatcgcctatgtacaggccagattccaagggctgatattacactgctagtttgatctttctcagatagctgggtagagagggaaaagtttcaccccaaataccagatgcctccaaacatctagatgcttggtgttatgtatttcaaacagcaggtttgataaagctgtttttactctccagttggatgttggttgtcaaggctgtcattaacttctgggagttcccaaatcctcagagagagagaaataagcagttctgcctgcaatcagaagctggctttgagccccacatggcaacatgcctgtatttaattagaagtggcttagttcttgggatttactgtggattgagtctacgaagctggaaggttttatcctgagtattccactgtctcctcatgtggattttatcaaatttctcctttaaccatataagcgctttcaaagttgacatatcacacttagttatgaggggaacctagaagtatgattgtgacgtgcattgttgagagaccatgctttgtaagtgttaataattaaaattattttgaacactaattatgctgaagactggattttctactccttcagatgttttccagtggacatattttgcccttttaataaattgattgcgaacttatcttcatttcacctttatgatgttataccttttcatttttgtcttctcatagctagggtctcctggtccccaaatgtagacacacatcttacaccaatcccagagccattttgtataagagccaccatggatttaaccagctttagctccagtatttgaacataatgttcagcatcatcacctggccaccaaatcaaaactgagcaccctttaatccatcaacaagttctctgcagccatgcaaggttatgaaatgggcacagacatcaatatacag

SEQ ID NO: 1883414 - DNA, 4001 bp, Homo sapiens
ctctcctggacattaacttgctaagatggagatttctgaccctcctcttagagtgtctgattcagtgggtctaaggagaggcccaggaatctgcatttataacagtctaaatgatcctagtaaagaagtctcaggagaaacatcatcctatggcactgcaactagttcactttggattgtagtaggagctcaggacttcttgttcagtgtttattctttttgtcacctattaaaagataattttcaaaaaaagatttttttttatactctcatactgacaaaaatatgaagaggtgttaaagatttaatttaattaattaatgaggaaaaagaagagatgttagaatgagtccaagggaaaacccagaaatgcatttacagatcaggaatatagaaataaatgggcaaatggaggcaaaactactagccttttccacaatggggaagaaaagtcaattaaatcacccctggacacaatttacatgtctatagacaagaattatatgcattaatattagtttacagcattataaaatggctcaaagataatgaaagactacaattgtataatctgaaagagtgtgattcaaacaacatgcattttccaatgaagcacaatatttttctacttgtgctggagagtaagccaggaaaagagaaaatcctgaatctaaagaatgggggtcagagtgaccagagtgtagatgaaaagacaagtaatctcacagggttgaatcttaggggtaggaggtcaaaggtgcagttaagaggtggcagagaggcgaagaggacagcagaactgtgaagctgtgagtaatcatgggagggaaatgtaacacatggtcttggacccactaagaattggacattgttgtggcattgccagctcatctcttgggcattgagaaaaccttactccagcaatgttattccgtaattgccctgatgactagagggttatgactttccctttttgaaagtttgtgttttgagtaatctgtttagaaactccacccatagggcactggtggtggcaagacattggcttttgggggacataatttagatcaccaagtccccatttgacatttcaatcatattcttgcctttaaggttctgggtgtatctgtatcttcacatggtgaaggaattataaagcgattttgtgtcccctctgtgggcacaggatgttgcagaaataaagctgatagaaatagtcacatgagttgaccagatggcatcatcagcctcttgaatccactacatccctaatgtcattagcttggaggggcagctgccaaattaggtggggctggacattccttttaacaggtgccttcttttctaggatccaagtgagagcctaagatagtttccataatgtccaaaagcacatccttagaaaaacatgattgaattgtacaacagggactttctgactcagttccctaacccattcttagtttgtattctccatcgaaaatgtgacaatatttggcaaatataaatttgagatttccagaaaggagcagtcagaaaattaaaaaaataaataaacataaaatgaaaggaacaggttatttttgtgtaatgaaaacttgaccatttcatccctcttcttcaaacacttagtgtatactcatttcagttaggatacaatccaagctcttggacaaggaacttgttactttacttttagtcattggaacacttcataattctctgccactgcccattctctccactacacaccctggccttggcaaataccttccctctgcttgaaatagtctttcaggccctttcctgacctgattgagcctacttatttagataatcatgtcattcccagtggaagaattccctttctctaccagtctgggttaggtgtcaccatgcattctatcaccttgaatttctctaagcaaagcaattatcactgcatatctaaatgtgcctccctaatcaaactgtaaatatgggagtgggaggctgagatttatagttattttgttcagtattatgcttccaattctgagaaaatgcataaaaagaaatctgaatatttacagaatgaacaaacaattgagattaaatgaataaacaaataagtgaatgaagaaattatcgggtgagtgaatggatatacaattgaggaaactggatatttttcctgagatgaaaagaatacagagaataaataatgaaagaaactctcccttccccattcttggcatctttgtcaaaaatcagttggtttttaatttgtggatttattcctgggctctctatcctattccattggtttttgtatctgtttgttcaccagtactatgccattttgattactatagttttgcaatatattttgaaatcaggtagtgtgatgcctccaactttgttcttatggctcaagattgctttgtttattcaggtcttctctggttccatataaattttagcatttttttttcaatttcgataaaagatgacgttggattttttatagaaatcacatggactctttagatcacatttagtatggacatttcaacaatatcggttttcaacttatggatatgagacatatttccatttatttgtgtaatcttcaatttctttgatcaatgttttatagtttttagaatatagatatttccatattcttgcttggttaaatttaccactaagtattttgctatggtattaaaatgggattattttcttaatttcttttccagatagttcattgtcagtgtatgaaaaacctactgattttttacgttgattttatatactgcaactttattgaattctcaacaaatggtgttgaaaaaactggatgtcctcatgaagaagaatgaaattgaacacatcacatcccatatacaagaatcaactcaaagtgggttgaagacttaaatataagatctgaaactataaaactattagaaataaaaaacgtaagaggaaagctccacacactgatctggacaaagatttttttgaccatgaccctaaaagcacaggcaacaaaaacaaaaagagaccattaatctattagttattgtattgcatcaaactaaaaagcttacgcacagcaaaggaaacaatttacaaaataaagagacaacccataggttaagagaaaaatatgtgcaaataatacatctgttaaggggctctaatatccaaaatacagagagaaattaaacaactcaataataagaaaacaagtgattacattaaaaatagtcaaatgacttgaacagatatttctcaaaagaagacacataaatggccagtgggttattaataacaaagcccaatatccctatcactaatcattggggaaatgcaaattgaaaccacaattaaatatcacctcagatctgtcagaatggctattatcaaaaagatgaaatttaaatgttggtgaagaagtggagaaaaaggaacctttttacactgttggtgagaatgtaaattagtacagccattatggaaaactgtatggaggctcctcaaaaaccaaaaaatagaactaccatgtgatttagtaatttcacttctgggtatttacccaaaggcatgaaattagtatgtcaaagagatacctgttcttctatgtccattgcaacattactcgcaatacccaagacatgaaagcaacctgaatgttcatctacagatgaatagacaaagaaaatgtggtatatatttgcaatggaatattatctagccttaataataaaaaaaggaatcttgtcatttgcaacaacattgataaacctggtgaacattatgctaagtgaaataagccagacatcgaaggacaaatactaaatgatcccactcatatgagaaatctaaaacagtcaaactcatagaagcagacagtagaatgatggttaccaggggatgaaggagggggaaacagggaggtattgggcaaagagaacaaagtttttgctacgcaagttaaataagtcctagaaatc

SEQ ID NO: 1883415 - DNA, 4001 bp, Homo sapiens
gaggaggcaagaccacagaggtgtggattggggagggcagttggagggagtgagaagaggccaaacactggctggattttgagggtagaggatctggatatgagggatggagactgttgaggctgagcctgagtgaatagcaaggtgagctgccgttcatgaaggtgggggcaatgcagatggagcaaggctgggctggaggatcaaagctaagcagagacattggctagcacataggagtctggatttctggggaggggccctggcaggagacatgaatttggtcgttgccagtgttggatggtatttaacggcatgacactggaggagatcacccagggagtggggactggttgaacaaaaagagccaaagaatggcctggtcagtaaggaaccagcaagggagggtgaggaagagaagaaccagagggtgggagggtgctgggagcccaggtaacaacggacctaaggatgagtgagctggcacatgggctcgtgcctggaatcccagcattttgggatcgcttgagtccacgagctcgagaccagcctaggcaacacagctagacctcgtttccacaaaaaattaaaaagataggtgagacagtgcatgcttgtagtcccagctactctgggggttgaggcaggaggatcccttgagcccaggaggttgaagctgcggtgaggagaatgtaccactgcactccagcctgggcaacagagtgagaccctacctcaaaaaaggaaaaaggaggagtgagctacccaaatctgtatttgtttattattgctgtcctaacaaattaccataaacgtggtgatccaaaacaatacaaatttatatcttacagctctgggttcagaagtctaatggcacaatgagtgtcatgggctaagatcaaggggtcagcaggctgcattccttctgctggctccaggagaggccctgtttccttgtctctcccagccactagaagccgctcatagtccttggcttgtggccccttcctccatcttcaaagcacatcactccaacccctgtgtctgttgtcacatttccttttctctcctctttcatcccattgtcctctcacttggcttcctaactcccacaagaacccctgatatggcacctgccctcctatctgaacccgtgggctctgcatccagatggaaccaaccgaggatacaaacaattcggaaaaaaacctgtgtctgtactgaacatgtacaaatttttctcttgtcactattccctaaacaatactgtataacaactatctacatagcgcttacattgtattaggtattataagtaatctagaagtgacttaacgtatacgggaagatgtgtgtaggttatatgcaaatacgaagccattttatgtaagggatttgagcatcaaggattttagcatccttgagaagtgctggaaccaatcctctatggatacccagggacgactgcacattgggctcaccctgataaacataagaatctctccacctaaagaatcttaacttcattgcatttgcagtcccttttgccatgtaagtaatgtattcacaagacctggaagttaggatgtggacatccttggagggccattattctgcccaccacagtccaccctccagtttccaaaatttgcataggtcccatgggcaaaatccacgcacccatctcaaggtcctccacagcctcaactcattacagcaccaactcaggtccatactcacttaagtcgcacccagttcaaaagtttcaaatcccatcgtctgaatcatctaaattgggtatggattggaccccagctaagtaagggggtcaagcaggcgggctgagcactggtcctggtgaccggaaggcagcactgccctccccgcatcagaaactgcaccgggaagaccgtcctgggctgatcggcacgaaaccctgggcgcctgtggctgccccagaactgcaggagccccaacgccttcagcgcagggttcactgtcatgaaaggaatgtgacgccctgcgcccattctacagatggagagagcagggcggagcccggggcccaggccgcgcgccccgccttcgccccgtttcccctctcccctccctgcccgcgccttctcccctcccacgcctccccccaccctgggacccccccactcctctcctccaggcctcctctcctcccacgccctccgcggccacccagctctttgaaagcctgcgtctggctcccagacaccaccgagtgctgagtcctccagcctgtctagagcgtcccggaagtagctgggggaaggcgacgaggcgcggactggaggagaaccgagtggccggcacttccggccggcggcggctgctccgggtgagcagggtgagtagggtcctggcctgaggcgctgggcggccgggccgggccggatgggtgcgggcgctctccggtccctggtgggcgcgggcggcgcgggcgggagccgcagtctgggcaggcgggcgcgcggggcggggcggggttggtcgcgaggctgcggggccggacccagccgcgggcggcagcgccccctcccgggagccgcgctcggaacccgaagccctgtgcttcccgcgcgacccccgcggcctgagcgcgcggcccccgagccgcacccaccccttgccgccaggcctggccttgacgccccagcccggacccttcctgcgcttccactctcagagaggcttggtcacgaggtccgcttgcccttaaaaaaccagaccgagacttttttttctccatttctgtttttgttcttgttcttgtcccagactgaatttctacccacaaacggggaccctggggtacggacgctttttaagcgagcctcgccagtagcccagcgctgtctctgcgccaggatcccccagcgtggagggctcctagcggaactcggcgccggctctcgggcgctctctgcggggcgcacggccccaggctttctgtcccctccttctctgtcccatactctccttctgacccccagctcacctcttcccccagctccagaatgcgacttgttttttgagtatttctccttcatatcctccataccccccaacacacacacgcacacacacacacacacacacacacacacacacacactatgcccctgcgaaggttgtttcccgctttccccccgcgtttctcagggcctcttagcctcacacaggacggagtcagccccagcgctggcccctcaggcctcccgtttcttgtctgtgccttgggcacaggagaattgcacgtttcatcccgtgttcacgtggccttggggatcagtgcttcctctccagtcgcaaggcaagaaaccaccctaatttcggggagacagggaatcccacagtagcttgtgaggggctgactggggactgggatgccgggaaaagcgtcctggaggagactcagcaccagacacgggctccttgtggacacgtctccatgcctgacgtgcaggtgtggcaggatgacacaaactggcagaacacactgttgtcccacttgcaagaccaaaaacttcctttaaaaataaaattcagatattccttatgaaacaagttcagccactttgtgtcatcctgctacacctgcatgtcaggcatggagacgtgtccgcgaggagctgtgtctggtgttgagtctcctccaggaagcttttctctgcatcccagtccccagttagtccctcataagctactgtgggattccgtgtctcccccagtttttctacagcgggttcatattaaaaatctggagggtggtttgtggccttgccttccctcctgttccccatggtgagatgcacatagctcactgtgctgtgccagaccgcacacacgtcacaccgtcaccctcagcgaacaatgcaggatccttaagggaccagcccacattttgcagaccaggaaactgactccggaagaggacagtactcacccagaggtggcagccaacaagccta

SEQ ID NO: 1883416 - DNA, 4001 bp, Homo sapiens
cacagcaatactccgtcaaaaaaaaaaaaaaaattggatttttccaaatgtcttgctgttattgattcctaatttaattttattatagttagagaacatactttgtgtgatttgaattgttttaaatttattgattttatggctcagaatatggtctgccttggtgaatatcttgtgtacacatggaaagtatatatattctattttggggtgttctacaaatatcaattaagttggccgggtgtggtggctcacacctgtaatcccagcgctttggaaggctgatgtgggtggatcacttgaggccaggagtttgagaccagcctggctaacatggcaaaaccctgtctctactaaagatacaaaaattagctgggtctggtggcgtgtgcctgtagtctcagctactcgagaggctgaagctggagaattgcttgaacctaggaggcagagaggttgcagtgagccgagattgcaactgcatttcagcctgggcgacagagcaagactgtctcaaaatataaataaataaataaataaataaaatctcaagatggttaatagtgttgtttaggtcttctatatacttgctgattttctctctacttgtgttattatgaaaggggttttgaaacttctaactataattgtgggtgtgtctatttcttcttgaaatattttcagtttttgttcatatattttgaagctctgttattaggtacgtaaacatttagaattgttgtgtcctcttgataaattggcccctttaccattattaaatgaccttctctttccacggtaatattatttgctttgaaacgttcttgatatattcatatagctgctctagctttcttttttttgagatggagttttgctcttgttgcctaggctggagtgcagtggcgcgatctccgcccaccgcaatctctgcctcccgggttcaagcaattctgcctcaccctcctgagctgctgggattacaagcatgcaccaccacacctggctattgtatttttagtagagacaggatttctccatgttggtcaggctggtctcaaactcccgacctcaggtgatccgcctgcctcagcctcccacagtgctgggattacaggcatcagccaccacacccggtcaagtttgtctttcatattgctatttgttttctatttatctgttcttcatttcatttttcttcattttctgctttattttggattaagcattattatcccattttatgtcctttgttcccttattagttataactcctgtttttccttttaatggttattttattttaggatttaagtatatatctttttttctgttaaacaaataatgctttattaatagaaatatacacaaactctaaagcactaagaaatttaaatatctatgtcagagcaaacaggtggcaattcaacatccagggtcaacagaatgcttaaaggagactgcaacagattggatttccatggtggagagggcatcttcaaaggtgaaggggggcccagctgaaacagcttttcaagctctctctcctcatcaagtatcatgagaggcacttcactcaaggggagatgtgcaatctggtgctcttcaggcaggtcaaaactctcgaagcctagaggattgaagggaaataatttttctatttctggatagccatcatctgaggcaggaacagagttttttgctttaacagtcttctcagtcatctttttggcagaaaagcttggctgtttttgtttgaggggtccattggtctttactgacttttctgtagctctgttgacagttcccaaagcctttctggtagctttaggtaaggatgtgggagcatcgaatgttttgccaaaacatgatattgaaacttgagatctcccatctaaggctttgattgaaggtccagaccccagcttcagcccatcctttgtagccacaaggatgcctggttcttcgttttccttatcaacatagatcagagtagccattctggattattgccgctctcaaccagatttaagtatatatctttaatttattacagtctatcttcatttgaattataccacatcacttatagaatacttacacttataggatatatcttacaatggtatacttccatgtctctaatgctagcttttataatactgttgtcatatattttactgatacattagatataaacccaccataagttattactattcttgtttgttaacttttagagatttaaattattaaaaaatcaaaatatgtttagttctgttgttactatttcaagtgctcttcatttcttagtagatctttatttccagaaatctggaataacttttctatgtctgaagggcttccttgaatgtttcttgttgtatgagtctactggttatgaatttttcagcttttttttttttcagtctgaaaaaatctttatatagctttacatatctttgattttgaaggatatttttggtaggtaaataattttaggttgacagatttttttattcagtacattatagatgttgctccacttcttgtactatttatttatttatttattttgagatggaatcttgctctgtcacccagtctggagtgcagtggtgccatctcagctcactgcaacctctgccccccaggttcaagtgattctcctgcctcagcctcctgagtagctggaattactggcgtgtgccaccacacccggctaatttttgtatttttagtagagtcagggtttcaccatatttaccaggctcgtctcgaactcctgacctcaagtgatctgcccgttgccctcctcagcctcctacaagtgttgagattacagacatgagccactgtgcccagccacttgtactatttctgatgagaaatatgctgacatttttacctttgttcctccatatataacatgtcttttcttctggctgctgttaagactttatcactggtttttagtacttttattgtgatgtgccttggtgtaattttcttcatgtttctagtgtttcaattcattgcacttgtcagatctgtgagtttatagttttcatctaatttgggaatatgtcagccatgatttctacaaatgtattttcctatcccatcctccaacaccatctttatcttctccttcagggaatctaattgcaagtatattaggctgcttaaagttgtccacagctcatcgattctctttacctttctcttttttttttgaaacagagtctcactctgttgcccaagctagagtgcagtggcacaatctcagctcactgaaacctctacctcctgggttcaggtgattctcatgcctcagactcccaagtagctgggactacagatgtgcgccaccatgcccagctaatttttgtatttttggtagagacgggattttgccatgttggccaggctggtcttgaactccagacctcaaatgatccactcgcctcagcctctcaaaatgctgggattataggtgcgggtcaccgcacccggccttaattcttttttctgtctatattttagaaagtttctactgcagtcttcaagtttactaatcttttcttctgtaatgtctaatcttctgttaatcctatctggtgtattttccactttagagattattgttttcatctctaaaagttggatttagaaattttatgctttctttgtctctacttaactttttgagtatattactattgttattattattattattattttgtagagatggggtctccctatgttgcccaagctggtcttgaactcctgaaatgaaggaatcctcttaccttggcctctcaaagtgggattacaggcgtgagccaccaagacctgcctacattaccattataataactgttttaatgtcctagtcagctaattctaacatctatgtcagttgcaggtcagttttagtgattactttttttgtttgtttttgagacggagcctcgctctgttgcccaggctggagt

SEQ ID NO: 1883417 - DNA, 4001 bp, Homo sapiens
aggcagttctcagcttctggctctgtcttctcctggataaataaccttggggaaggtacatggcccctcagagcctccaggcgctcaactgtataatggataaaccattgctctcctagtgggattgctgggctaagtcatatatatactcaagaaaagagtgtttcccttctgtctgaccttttcaaagaaaccaagagaaaaccacggagagtcaccatatttgatcaaggcaactgtgatgcaacaaataaaatgcctactatgtatgtgtctagcctgtgtgcaaggcaaatgcatttcctcaactcagaaagattactttctagtgtgagagaaagacaggaaacccagtaaattgcacatatgaatatacaattagaacacatctaagagctatgggtgagaacagcatgtaacacccagagggacattatttaccttaggaggtcagggaagcctgtctgagaaagtgctgtcaggcatgagccgaactaggaatccaatcaaaatcagactcaaggccccgccccaactgtggtcttggccgccacatgccaggtggcctcaagtggtctgagagctggaccacttgctgtttgagctgcaactctccttcaggcaccttggcaccactcatcgctcagagctagcagcctcccaggccaccaggcctggacctgagaggccagtccttccacttgtcagctgcagaactgcaacaggcctttgtggccaacccagctgctccctccctccagctggcatgagactccatttcctcatctgccactgacttgtcactctgccttcccatgggctgcagggaaactgtgacctttaatcaactgtccacgccaaccagctgtgcccaggtcagagtccagcactgcctccctggctctgctcagaaagatcagggccaagaaatgtccaccatccccaaaagctacccccagccaacatcacccaccacatgctgagtgtctgtcatgtggtcagcatttcaatgtctacttggcgatcttcaattccagtcctgtgacgtgtgataatacttaacccttcactgcagggaaaggaatccatcagtctgcctggaggcatgcagtgtgtatgtgttaaagagtcatacccaggcctgtctgcctccacatgcatctgcccacatacaaccctcacagcaccagccatatggccttatgttgttcctagctctgagcacagagccaagaaattatccccccatgcatatctttccattgaatctcccatgtcttcattcattaacaatcctgtcttaatttaccctttctgcagcatgagagactgtgccaaatgccacacaatgtcttaaggacacagaaccaacagcagaggcactttatagggaggtagatggtgacagatacgtaaactgggaacatcagaaaatggtgacaggtacaataacacacgtcagggcagggaacagtaacggcttccaggaaggacctctttagttccatctgtctcccccaggcacccagcatcacgccaaccacacagagggtgctcattaaatgccacctcgttgagaacaccagccacatcccagtgaaccctccgtgaccagccaggacagcctcacctcaagcccagctgagcgccggatggaacgtgcatcagatgcttcaccaggaagagtcggggtcttacattccatagggagacccaaaggaagttggcagagatctaagtaaacagagatctcaaccctctcagccagctgcagtccttcgtcccccatggacatccaagctgtaagaatccatgaggcattcagccacagcctcccttaaaaccacttttagtatcctgaaatgtgccgggcgtgtgtcattccagtgcatggttccaccagcgttattccccagaccactgaagatcactgtaaatccatcaggctcagaaaatacttgaacgaagctccatgcagctgacaggcacagccatcttgaggggcatctttttaatctccttctggccaaaagatcaggcctgcaacagggaagaagaaaaaaacagtcttgtcacagtcactgactcagagcagtattcagtcactctttcctccttgtgtttggccctaacagagtgtaactcactaaaaataattctccataactggtaacacacaaagttgagaccggtgtccagggaggccttcaggtgagagctgcctctcctgcggtacgaaggacctctcagacagggaactgccagctgctcatagcctcaggagcaccctgagaggggagaggaggctggggggcatccattataaagttgagaggagaatgtttgtgactggcttagaaagctgacagcaaggccaggcctggcacatagcctgggctcccctgcagggctgagaggtccctgcagggagctgaggggtttagggtcagctggtaggaagtagttctttgttttgtttctttttaaagacaaccacaaaaccctggcctgactccaggccttgtcctgcactgtgagcctcttcagggcagggcctaggacctgttctgttcttactcattcattcactaactactgagcacctgctaggtacccagcactctcccatcaggagggtgatagctttgtcttcccaatccagtgtatttaaattattccaaagataactgaagaacaaattgatccacaatgcctagggctggaggctcaatattccccatccacccaatgataacaataactgtcctttggggaatgtctatgatgtatcggctaaaaactctggcctctccatctgatatgatctctcaaacaccctgggatgcctgcccctgttttccagatgaagcagtggaggaacaaacaaccattctacttcagactagtaagaagcctaaatctgaagctagacagtctgtctcccaagtctgtgccctgatccgccgctctaagttacctagtgagggattcctgcccagaatggccacagctaaaacttacttccaggctttctgcatgtatgaaaccctcatttcatcctcacaaaaaactatgagttgtagattattgttaaccgactttagagatgagaaatttgaggcccagagaagtgaagcaacttccacaaggtcacacagctttaaaaaaaaaaaaaaaaaatcacaggaaaagggtttgaggctgggcgcggtggctcacgcctgtaatcctagcactttgtgatgccgaggctggtggatcccttgaggccaggaattcaagaccagcctggccaacatggtgaaaccctgtctctactaaaaatacaaaaattagctgggtgtggtggtgcatgcctgtaattccagctatttgggaggccgaggaatgagaatcgcttaaaccaaggagacggaggttgcagtgagccaagatcacaccactgcattccagcctgggccacagaatgagactctatctcaaaaaaaaaaagaagaaagaaagaaagagagagagggaaggaaggagggaaggaaggaaggaaggaaggaaggaaggaaggaaggaaggaaggaaggaaggaaggaagaaagaaagagagaaaggaaaaggggtttgaaacaaggcggactggcagactggctccaaagcccacgagcttgaccactgctccaacttccatcaaaagcaacgattactgccaaagaaatgtttacaaacgtagtggtttaaaacagaaaaagaaataaaaaataaaacagcacacacttatgatcttacatttctggaagtctgacatgggtctcactgagctaaaatcaggctgttgggagggctgcatttctttctggtggctgagagggaatgtgtttccttgcttttccaagcttctaaaggctgcttcataggccttggctgtggcttcttcctccatcttcaaatacaacaccaaggcatctctgactctgcttctgtggccatatctctgtctctgaataact

SEQ ID NO: 1883418 - DNA, 4001 bp, Homo sapiens; identical to SEQ ID NO: 587799

SEQ ID NO: 1883419 - DNA, 4001 bp, Homo sapiens
attattgcctgtattttggataaaagccatttcaactgggatgagattatacctcatcctagttttgatatgcatttctctgatgattagtgatgttaagcattttttcatatccctgttggccatttgtatgtcttttttgagaaataaccattcaggtcttttgctcaattttaattggattattttcctattatattgtttgagctccttatatattatggctattaattctgtgatagatgagtagtttgcaagtattttcccccacttgatgggttgtctcttcactttgttgtttgctttgcagaaggttcttagcttggcatgatcccatttgtccatttttgctttgcttgcctatgcttttaaggtcttactaagaaatatttggttctggagcatttccctaacgttttcttctagtagtttcaatagtttcaaatcttagattccagtcttcaagccattttgttttgatttttttaatatggcaaaagatagtgatctgtttcattcttctacatatagttatctagtttttccagaacaatttttggaagagaccatccttttcccaacgtatgttcttggcagctttgtcagaaattagttgactgtatatgtattgatttatttataggtcctctattctgttccgttagtctatgtgtctgtttttatgccagcaccatgctgttttgtttactatcactttgtagtataatttgaagtcaggtaatgtgatgcctccagctttattcttttgctcaggattgctttggctattcttggtcttattgtggttccatataaattttaggatttttttcctctttctgtgaagaatgtcattgatattttgatagggattacattgaatctgtagattgctctgggtagtatggaaattttaacaatattgattcttccaatccatgaacatggaatatatttccatttttgtgtgtcctcttcaatttctttcatcactggaaagatctctacaataaaaacaaaagtaaatttcttcgtggtacaagtaagtcttttaagataagaaattttaagattcctcccaagcaatactgaaaatttccaaaaggcagttattatctctgttatattaatcattatatccagagcccaacgtgtagcaaacagaagaccctctataatataggttgactgaataaatgaacctctatattttatggaattagtttgaggtttttatgttactttcatccctatagagccataaaatgaattttttggtgggggcacacaaaattgcaccacgacagcttttttctttaaaacaagcacaagaataaagctaaacgcaaatattcaccgcactggaaagcactgcgcgtgcgctatcttacgctattggctaacaccgcaactctcaaagaccctcgcaagagaatcacctttgcgcttgctcagttgtggactccacaaacagagggcgggttccaaagaaaaggaaatagtcattgcgcctgcgccgctccttctggggggaggggggggcttgggctggctgcgcaggcgcacaggtaccattttgaccgtaaacatcctgccgatttgaaccgaggatttgggcggcaggaagagccgcggcgtaacggcagccatcttgtttgtttgagtgaatcggaaaggaggcgccggctgtggcggcggcgggagctgctcggaagctacacctcgcaagggctcccccctttccccaccccctcccccgacccttttcccctccccgggccacccagcccgcccaactcccagcggagagcaaggtaagagactcggccgaccccttcttttcctccagctccctccccccaccctttccccgccgctctgccgtcggggagccggactcctgggggcgggagggcgagggagaaggcagccctcgccgcgcccacgcgtgctgccaccctcccggcgcccaagcggcggcgccacccgcccagcccccttcgccccgggcccgccctcggcccggacccatgcagcttgggcccgcatcatcgcttgttcggtaacaaatgattctgatccattctgagatctacaaaggctgttaccctgcaggtccatctcacgtcccccaggaggccggggaaaccctgggctgcggagggaggggaggaggtttgaacgagcccgctctggggaccgggccgcctactccgcgggtaaaaatggctgtctgggaggaggcggtggcgggcccggcgcccgcggtgccagccccgggagcagcaaccttccgccgaactcgggtgcggggctcaagaaagtgcggagctggtggggctgggcggggtggggcggggggtcggcgggtgcccctcggccagtgactgctgctgccctcccgttttaaaaagataatttttacgttgggaatgctgaatatttcacagacgcgtggaaaaagagacggagggaagttgcttctttttccaaggatatttgcataattggttttcccctgaacttttctgatcattctttaaagtgattaaggatatcgggtgttgtagagacgctctgggggaggtgtgtgtttctgataaatgcttgatgcccttttcgtcgctgaaaaaggctttttgcgaatgatccgctttgatagtgtggggtgacactgtcgggttgtgctgccagacttagcggccttcttcaaatttgtaagagggaaaccctgggggatttacttggtcactctgatttgttagtgtcttcagcgtgaaaaaaaaaacagcgtttgtgcgaagagtttctgggaaaggcttgtgtttatcggcttctttttgcaagggaaagttaatctttgttgtcattatactggttagaagagtaattggttttcaggcaaaaatttctattttcttaaattgggtgtaaatgccagcgggcagtgcgagtctatagaattttggagacaggcaggagaaggtttctcaaatcgtgaagtcattaaatacctttgttaatgtcggaggcaactaattatttttggaaaggcattgatgaggacatacgccatatctgatcttcaaataagttaacagtttgtatagttgaggtgacagcagtgcataactaatagacatagtgcttttttttatacacaagtcagaattacaaaagaatttctggtgaattattttgtgaaacatacaaattctaagaaacgcttttacagtttggtacagaatggaaattttctaattcttgagaaataaggttgtgtttttagtttaaatgtcaaaccagagttgttaggcatgattatactggctggttaatgttttgctgcaagattgtcttcagagttacttttcgcatcagcagtggcactatgttaggtgtgcccttgtatttaattttcataatcttttttgatgaatattatcccagtttatagttgagaagtaacttattcaccgttacaaaacaactgagcaaagagggagcttaatttgaacctacgactgtctgattgtaaaactcttggtcaaaggatgttagaaccaaaacagaggagatttctagtgtgcagggttagaaatatcttcagagatccttccccctactcccctgaagaggtagctccgttctgatctgagttaggtattgacgttttcaaaggttaggtaaaccaccagatttcaacctttcaggttttcatagtagggaaactgaactgcataaaggttaggcagcttaactgctagttaatgacaatagcaggattatgtctttacttctgagatagtagtttttactttgaataggtggtgtacatttatgtcccgagttaaaatatgtgtgtgtgtgtgtgtgtgtgtgtgtatgtatatatatatatcaaacagtacaaaaaggtaggcctcacttgccctgcatacctactttccagaggtaaccagtatcaccagtttcatgtgtacgccacaggtattttaagc

SEQ ID NO: 1883420 - DNA, 4001 bp, Homo sapiens
acaactcactttttctgtcatctgtaacaatgtttttaaaatgtactttctgcttaatgagctttgaatccatccacaaatacatcaagtagctatacaacgtggtgggaaactttgttatttgcaaatgataaaaccaaacacaaggttgttcaccagctattacgtagcaggcatcacagagtacacctgtaatagtgcttttccattactgaaatttcagtactggctcatctgttctcttgtttcaaaaatccagaagatgggaacaaatttataaagacacttcacaaggttatttatatctataaaaccgactaagcatgcatttattaagcccccaggtgttgggattgtacttggcgaacatctaaggcagtaaaattaccttttctgtggtattctagggtctacaggagcttttttatttttgttttgagatggagtttcactcttttgacctggctggagtgcagcggtgcgatctcggctcactacagcctccatctctcgggttcaagcgattctcctgcctcagcctcccgagtagctgggattacaggcgcccgccaccatgccaggctgacttttttgtatttttagtagagacgggggtttcgctttttgggcgggctggtctcgaactactgacctcaagtgattcgcccgcttcggcctcccaaagtgctgggattacagacgtgagccaccgtgcccggccacaggagctttttagaagatgttttacgccacacagtaatgcaacactgaaaagacaagtcgccttttctctgcttttgcatctctttccttaacttctggaaatctttaaagtttgtccgccgtacttcgacagttgtctaccgaagattctcagcacatctaccggctgagccctgaatgtgtctctgaatttctcccgttgaaagtcgaggtccctgggctgggcagaatctgggcatgcgcagaagctcagccaaccccggggctccgcctcccctcctctagcgaggggaaacgggtgagcggcagcgcgcgtgcgcaagcttggtggtgggttgcgcctgcagagcgcatgggcagataaaccgtacgtccgtttgtccggaccggaggggcagtgggcgccatcttcttctgggctcactgagggtctacctgttttggggaggctgctgcgacgaagagttccctcagcctccggccttgtgtgtccgactcggcagcagtggtgtgtgtttattgccaagtgcgaagcagttcccctcggggcgccgggggtggggagggctgggcgaccaagccggaagaacggggaaaggcgggaccggcggccgcgccagtatctagcgtagctcctgccgttagggcaccctcttttcttgctaaaacaccgactcttcctttcccgtcagcttccatgtggtggtgtatgtgcgcttcccagggatcttgagagtgaagatctcgaaggatttcataggtatatttttttctttgctatgtcatcgtagtcagtggtggcagaaaagcgctgcaggcccagctcgttaggcttgagaagggcaagtgttttcagttagatctgggggcagttcaccctctggcgagttagggtggaatgtttgcccttgagacggcgtaacggaaaggcacggaggttgggcggtccaggttaatttgaaggctgattttggctgaaagtctggcgacaacatcggatcccacgtagcaactttggcctggcgcgaaagaaggaagctctgacccctgggagttgtggacaaaggctttgggctgtagaatcgatgccttcggatgattcccgtttgaggatgttgggagaaatcctgtgccatgtggattcgtcttcatttacagttcttcctagggactgtggctctcattggtcattcctttggtttttattttaaacatctacattataaaaggtggatcatcgtaaagaataattatgggttggtgtagattattttctgcaggggaaactcacgtttagagtgtgaatatgctacatcatgaccttgggctttacgaagtagtcgcagagttaaaaaaaattctctccctcaccatatctggaaaatgactttttcttcgctagttaaaaatcaaatggatctgatgagatattacttatttaaattctgtctccctcccgtttccctctctgtatccccttaagtcttgattagaagaggcacgttacgtattgtttagttataatggtgattaagtgggatgaatcgttggataaaaatagcagttatttaaaatgcgctttaaatttcactgacttaagtgatcttttagggacccactcttcttttcatagaaattttaacagattattgtcttcaaatgaacacaaaggcacaaaaatactttttgcattcataactagaaaaacgcaaaattttaattgcagactacttgagggtaattttcgtgttttgcttttgtgtaatttagtgtgttaagagttgaatttctggagaatttgcttaaggaaatatagcatgttggaaccacagaagtgcccattttgagagctggtctcttacagttggtctccaaggtgtgttattgtagaggcataaatggtacattaccctactgtctcaagggtagagaagtttaagcattagttttgtttaactgtggcaaatgagaataaactttctaaatagtctgcttgaattggaattcatgagatttgtgctcatgaaactacttggttaaaagatagtttttaagtgaggtaggataaattactagagtttttttgaatttgagatataattattccttgaaacgtctctaatttctcttgtagatgaatttatgttcccagggtaaatcccgttaaaatttttttaaaagcttaggagagacaagaatatgtatagcttatggtgctttctaaaatatcttaaaaagagtagctaagccaatttgcataggagggagtcttgggactttaatatggataaagtaagtattccagaagccatttgtagtttttgttgaagtgttagtatggatattggtttgttgaagaaaataggctttttttctttttttgttactgtgcaaatactttaatagcaaacctgattaatatttttcagatgtagaatgtgtgaagtaatttgatgtctttgctagtttagcttctggttaatctacgtacccttttttaaaggaaaacagacctcagtgaatgtatcttcagacccccactttggggaacagtggtacttaagtgtaagtactggattctggattaacgcaacatttatttgtacattaaagacatgtaaattactccaggcgcagtggctcatacctgtaaatcctagcactgtgggaggctgaggtgagctgattgcttgagcccatgagttccctaccagcctgggcaacatggtgaaaccctggctctacaaaaaatacaaaaattagccgggtgtggtggtgcacacctgtagtcccagctactggggaggctgaggtgggagcattgcctgagcctgggtaagtcgaggctgtagtgagccaagatcgcaccagtgcactccagcctgggtagcagagcaagagagaccctgtctcccccaccaaagaaagtgagtgtaaattataattatttatttggcaagtcttcatgaaatagtttgggtatccctgaaagtattaaacgcaaacttctttaaaaaattacattgagatttttcagtaaacgggtaatcccagtattccaagttaatttttaattttacttttctacatcatcatttgggtttccttagtagagtgcagaatagttgtttgaaatggaaatctgctattggcattattaataagataaatagcattttctgtttggcttgagatgaattgtaacagttactatttttgcaataggagtggtattgagatttttaactttagggatattgtagtatttgccttaatta

SEQ ID NO: 1883421 - DNA, 4001 bp, Homo sapiens
atcgagtattggaaacgctttctaaggccctggaaaaatagaagttttcttaataataatgttagcttccatgtattgtaaacctaaacgaagcaagaataaatgctgggtgctgtatatagctctatcaacctataatcacctcgaaaactcgaggagacacattcagctgctcccatttcacggatgaggaaacaagtacgcaatcctgaagctggtgcaaagcccaggccccctttctttttcaagcgtgcttccagcctctgaagttcctccgtacggacccccagctctgcctgcaataaggaatattcactttgccaacaaatatttattgagtgcctgctatataccccttagcccgtttaaatagccgtgggattaaaaagataaatagggcaggatttttttttttcttccaggaaggagctttctgaagggtgagggagaggccaggtaaacaatcccagaacagtctggtgagagttgggagaggagtcggggggccgcgggacgctcaggaagcgaagcggggaaggctccgggcgcgtcgcaggacccgcgctggagatgggtttgaagccctgtcctgaaaaagccggcccggagtgggctgtccccggtgtccctcgagttctcatgctgtcattcaagcagcagaggaagaaccgggtctggctcgggaagggtgggcttagggccaggggtgcaaatccctcggtaaaagccggcaaactaaaagtcgcacacatcccaggtcccggtccaggccccggcggggcagggtccccgaagtcccggggcgcgcagacgccggggcccccgggggccaagggaacggcgggacccgacctccctgccctcggcctcccgggccctcgccctccgaccagccgctgagtcgggggctggggtcgccgcttccgcccgcggcccgctgcccctccccggcgcgcgccatccggccgccggcccctcctcccgcggggggctccgtcccgcgccccgtccctccgggctgcagccggcagcccacgtccagggagggcggagggaggaggagaggcgcggagaggagggaggggagaggggagggaggaaggcgagagaaagggagctgcttccatcccggacttcccagagcctgcctggagcgcgtactcagcggctctcgggtcccagcgtcccagccgcggcccgcgctcctccgccccgctcctcctcctcctcttcctcctcctcctcctctctaggcacccccgtcccctccttccagcggctgcagcccccagccccaactctccgcgcttactcctgggacgcgcgtcctcgccccatcctttgcttccttccttccttccttcttccttcctcccctggctcccgccctccctctccaggtcgccctcccggggcccgattgtctcggtgccccgctcccggcccgcgccctgccccgtctctcccttgcacttcctgagtcgcccgccgccgccgtcgcagactcgccgcgggagccccagcccaacccgagcccgacagccactgccccggctccagctccagccccacagcccgcggcgcccgcccgagggagccccggcgcccggggaaggctccagtgggctagcgcgccctcgcccagccccgcgccccagccctgcccggcccggcgaggaaggaccgggaagatgaacaacggcggcaaagccgagaaggagaacaccccgagcgaggccaaccttcaggaggaggaggtactgggcggctcggtgtggtggcgggggcgacgcgggacccagtgcgggcggccggcggggcgcgggcccggggcgcggcggtggaagaaggttcaggcatggcccgtgccccggacgcagccccacagtgtggcccggggagggtggatctcgggagcgtgtgtttttgtgtccacgcgcgtctgcgggccccaaattgcgtaactccaaggacttttcggagacttttgtaagtataatgctcagctttgtttgcccgggatttataagtggaaccgagagctgactcctgggtgacctcagataatcgggactcggagggtcaggacttagggccggggctggaaattgtgtatggattcagggtcggggggggagcagtttaaggaagaaactcgggggaaagttctcgttaaaagatacctctattccctgccccctccctttccgtgttaaaagttcttggtgaaatatctttctagccgaggttttttggattaatagataactcatcagccacattcttctctgctgagtcaaagaccccgagcctgggcggtgaacgcttgtgattttaggggccgtgcagctgaggggagcagagtaagagggttaaaaacgcagcaattcaccaaatgctcatcgagggtattttcataggactttgacttctgagcatgcattttaggtggtgcgtccgtaatcatgatgaaagttttgtgactgcggagcgttccttcggtggaaacaaaattgagtagatgtggtcagaaggggagtcggactcaggaacaaacgtttcagaattcagtaggatatttgtggtatcctaccaaatgactctttttgcaggtacgttatctggagtccaagaaattatttctggcgtacttcttaacatcccacacagttgagttcttaaacattctagaggaacttgagagtgtgtgtagatgcaggaaagtgcacgtctaaatatgacccgaaaagattcacacaggtattggatcctgatataggtgaacacagaaggtaaacggattctaaagcgttagaatgttgagatcattgttgagacactatgttgtgtgcaaacttcaattctgatagtgaaaccaaaattgcagaggaattcattaatacatacaacttctctgcacattgtccacttggaaaatggtaactatttagatggagaaggtagaggagcgagactatgccaaacaatgcaaaataaataggagattttactcgtcacccagttgtatggtagtgaaaacctaaatgaattgcagtcagccaaaaattgctttttcacccgaggacattttctattttattataaaagactatttgaagagttgtttacttgcatgttttctaattacaattgtaggaatgctactggcatttcttttttcaaagcgatggagagttgaatggtgtgttctgattttttttcttgaactttactggctgctttgctatttattttccctaccacttaaaaaaatttaaaaataatgacaagtgtgcttttttaggaattaccatatttaactaattcacttaccatatcaagataatcatcgcttcagaaatctttctgtttcagctagatgtgcaatctgtttgcttctcagggttagaatattatatgaaaccatctttctttattcacccagttgagaaaacttttttttttccttttggtaggtagcaaaagaggttcaatgtcctaaaaatcatacccacattaaaattaagtatagaaaagtcacatttttctgcttgacccctcttaacagctgccaggaccaagggattgcctgccctgttcctggacgctcctccgtccttgtgaggttgtgtataataatcgctgtataatcgcgggccattgcagtacagttgctgcctcttacttgtcctgttatctgacagcgttccttttcaggtaggaatggcatgtggctctagaaagtatcggtctttttagcaaaacacttgttatgtaaaaagtaaggggacacgtaggaagatttcagaacccaagttgtccaagagagatgtcgtgtacaaaacagttaagaccgtgaagagaggggggtttataatgtcagaaattgaggaaaagaaactaaggtggcctgaatgatccaggtaattttgccttaatttcctatttttggtttatattttgttcttgaaaaactcttaacctcttttttgtttttttct

SEQ ID NO: 1883422 - DNA, 4001 bp, Homo sapiens
tactcattcaggagcagcttgtccggtttccatgcggttgagcggttttgagtgagtttctcaatcctgaggtctagtgtgattgcaatgtggtctgagagaccgtttgtaataatttctgttattttacttttactgaggagtgctttacttccaactatgtggtcaatgtggaaataagtgtgatgtggtgctgagaagaatgtatattctgttgatttggggtggagcgttctgtacatgtctcctaggtccgcttggtgcagagctgagttcaattcccggatatccttttttaactttctgtctcgttggtgtgtctaatgttgacagtggggtgttaagtttgccattattattattattattatgtgggagtctaagtctcttttgatcacactttaaagaccaaaaggtagaagcgcaaagacgttatctgtccaatattacaaacctagtaagtggtggaatttggccttgaacccagatctgtaactccagagccgaagtgcttcacccacctccctgtggtgcctctacagaaaaagaggtaagcaggcattccgaaagctggtgggccggggggctggccttgtactcagaagccatggaagtcccacgtggggtggctagtggtgtaaggacagaggtctcggatgggcagagggatgtggacaggcgcgagggcgcgcggcagggactcgggggactgggagtggcggctcggggctgcgggaggcgattggtggaaggacagaggtctgggaggggcagagggatgtggacaggcccgaggggccgcggcagggattccgggggaccgggagtggggggttggggttactcttggctttttgccctctcctgccgccggctgctccagtttctttcgctttgcggcgaggtgggcagggtgagctctcgggactgatggcggttttggaagaggcctggggctaaggacaggccagggcggcgggagaggcggaccggtggcgtggctggatctgggcgcgctgtcggaccttccacatcaccagctgcaggcaggcgtttgcgtcctcgctggagttgtggccgtcctggctgtcctggatgatctgtgccaggtagtcggccgcgagattcctgagggagcgcttgtaggggaaacccaggtagtgcgggaagagcacggccgtgtccaccacggtgttgtggatgagcttcagggccagcaggtcgctctccaggctgtgcccgatgaggatggtttgggcgctgaaaaagctcagcaggatggcttggacttggggcaacgtgatgctcgtcttggcgacgtcggcctcggtgactccggaaaacctggtgttgtagtccacgatctcgttgtcgggcttgacgaaggtgtcgtacaccactcgcatgtcggcgtccaccacggtgacgcgggtcagctccaggccatgcgtggtgtagcacatctcacagtccaaggcgtagattcctggataagcgtctctggacaactctttcttgaaggtctccacgaagccatcgaggctctccttgcggccgtcccgcacgtgctgctttgccacctggcagcccacagagccaggagcagctgcacagcaggtgtactggctaacccggcctccagccacctggctcgagcggacccgcccccagtgataataacacaactggtcgcgtacacagcggcccgaggaggacaccaggtactcggtgccacaacggcagcagaccctgcaggaggagtcgccgggccccttcccctggccagtgaagaggacggcgcctccgggccgctcggggtgcgggaaggggtagccgttctccttgagctggtcctgggtgagcaggaactcctggaggcggctgtacagggcggccctgctgaggccgggcatggagctgggggtcaggcccttcagtctcttgagggtgttcaggaccacgttcaggtacctgttcttgttggggctgcagtcgtaggccaccttctcctcgttcagcgccttctcctcggcctcctgcttggaggcgcagaacttgagacactcttcggtgaacagttggagatagcctcggcggaggacggtggggacttggcacccagagcttcggaggataatgggtttcttcaaactcaaactcggtaaggatggacgacggacgattcgcttagagctggtggtggcggtggtcttgcatgccatccctgacctgttgcgagtcttccctggctgtctgccgaccttggagccacgggagcgttggctgctgctggccacccgggttctcttggcatctgtgtaacctgtgaccaagcaagggctggaagagtgggcgatcgtcttcctcttcctgggggctgagatgcggactcccgagggcctctctgtcagccttggggcggctggcaagcggcaggccgatcccctctgcgcagggaagtagcacgactccgtcaccatcttgggccacgctgggggcaccgccggacccctgttctggggctccgcctggatgtccacaaatgctgaggcctgcttgtgcatctggggcacccagagcccgaagctctgggcaggctgatgagagggcagtgggaattctggagcctcgagggccgcctcctcggccaccttcttagcttctgggtatccaggtgggaaccagcagggagctgtggctcgcaacatcttgctgccttcgggagcaccggccgggctctgctccgctcccaaatggcggcttgcctccggggccgcctccttggccaccttcttagcttctgggtatccagggcggaaccagcagggagctgtggctcgcaacatcttgctgccttcgggagcaccggcctggctctgctcccctcccaaatggcggcttgcctccagggccgcctcctcggccaccttcttagcttctgggtatccaggggggaaccagcagggagctgtggctcgcaacatcttgctgccttcgggagcaccggcctggctctgctcctctcccaactggcggcttcaatgagtgctgcggccgccacttgtcgcctttatataggcacagggcagactgggtgggacttctccttgataggttggtgcttcagtccaatcacactgagcctcatcttccaccagactccagcttgggaatgcctcagggggtgcgctaatggaatcaactggaactcccggttgctaaacttggagctaggttgcttttcctgagttaagtaactgtcccggcagggcagtcctataatggctactggaattgggctacctaggattaaattaaggttcagggaggttggtcaacttgcttgggcccacacagcaccccttggagccaggactgggccagcagtctgctgcatgctggagggcgggatccctctggggctgcctttccctgctctgtgcactccgccgctgcgggcaaattgaggacaggaagcggaccgcacccacttctctcccaggacttgggcaatgttcaacacaggtggtcttccaaaggttcatagaaaatgcacatggtgaagaaactatgcatggatttccactggtttgcactaaaataaacttgtcctaacttctgataacctttctgaactagatctagtttgaggcactaagaaggatgagacatccactgaaaaggactcccgtcagagcaacatgaattccacgaaaattgcagcaagaggaaacatcaaatttatggtgaagcttgggtggaagattgaagacatcattgacgttttaagaaaagcttgtaaggacactaccccaaagaaatgaactctttacgaatgtatagcttgtttcaagaagaggtgagaagatgtggaagatgaatcctgcagtggctgtgaaaaccactgtgcccagatcagctgcatttacgacgagagctatcagtggaaattttaaacaggagggatcacgatcctgacgcatccctctgacaaattgtaa

SEQ ID NO: 1883423 - DNA, 4001 bp, Homo sapiens
  modified_base (3710)..(4001): a, c, t, g, unknown or other
tactcattcaggagcagcttgtacggtttccatgcagttgagcggttttgagtgagtttctcaatcctgaggtctagtttgattgcaatgtggtctgagagaccgtttgtaataatttctgttattttacttttactgaggagtgctttacttccaactatgtggtcaatgtggaaataagtgtgatgtggtgctgagaagaatgtatattctgttgatttggggtggagcgttctgtacatgtctcctaggtccgcttggtgcagagctgagttcaattcccggatatccttttttaactttctgtctcgttggtgtgtctaatgttgacagtggggtgttaagtttgccattattattattattactatgtgggagtctaagtctcttttgatcacactttaaagaccaaaaggtagaagcgcaaagacgttatctgtccaatattacaaacctagtaagtggtggaatttggccttgaacccagatctgtaactccagagccgaagtgcttcacccacctccctgtggtgcctctacagaaaaagaggtaagcaggcattccgaaagctggtgggccggggggctggccttgtactcagaagccatggaagtcccacgtggggtggctagtggtgtaaagacagaggtctcggatgggcagagggatgtgaacaggcgcgagggcgcgcggcagggactcgggggactgggagtggcggctcggggctgcgggaggcgattggtggaaggacagaggtctgggaggggcagagggatgtggacaggcccgaggggccgcggcagggattccgggggaccgggagtggggggttggggttactcttggctttttgccctctcctgccgccggctgctccagtttctttcgctttgcggcgaggtgggcagggtgagctctcgggactgatggcggttttggaagaggcctggggctaaggacaggccagggcggcgggagaggcggaccggtggcgtggctggatctgggcgcgctgtcggaccttccacatcaccagctgcaggcaggcgcttgcgtcctcgctggagttgtggccgtcctggctgtcctggatgatctgtgccaggtagtcggccgcgagattcctgagggagcgcttgtaggggaaacccaggtagtgcgggaagagcacggccgtgtccaccacggtgctgtggatgagcttcagggccagcaggtcgctctccaggctgtgcccgatgaggatggtttgggcgctgaaaaagctcagcaggatggcttggacttggggcaacgtgatgctcgtcttggcgacgtcggcctcggtgactccggaaaacctggtgttgtagtccacgatctcgttgtcgggcttgacgaaggtgtcgtacaccactcgcatgtcggcgtccaccacggtgacgcgggtcagctctaggccatgcgtggtgtagcacatctcacagtccaaggcgtagattcctggataagcgtctctggacaactctttcttgaaggtctccacgaagccatcgaggctctccttgcggccgtcccgcacgtgctgctttgccacctggcagcccacagagccaggagcagctgcacagcaggtgtactggctaacccggcctccagccacctggctcgagcggacccgcccccagtgataataacacaactggtcgcgtacacagcggcccgaggaggacaccaggtactcggtgccacaacggcagcagaccctacaggaggagtcgccgggccccttcccctggccagtgaagaggacggcgcctccgggccgctcggggtgcgggaaggggtagccgttctccttgagctggtcctgggtgagcaggaactcctggaggcggctgtacagggcggccctgctgaggccgggcatggagctgggggtcaggcccttcagtctcttgagggtgttcaggaccacgttcaggtacctgttcttgttggggctgcagtcgtaggccaccttctcctcgttcagcgccttctcctcggcctcctgcttggaggcgcagaacttgagacactcttcggtgaacagttggagatagcctcggcggaggacggtggggacttggcacccagagcttcggaggataatgggtttcttcaaactcaaactcggtaaggatgcacgacggacgattcgcttagagctggtggtggcggtggtcttgcatgccatccctgacctgttgcgcgtcttccctggctgtctgccgaccttggagccacgggagcgttggctgctgctggccacccgggttctcttggcatctgtgtaacctgtgaccaagcaagggctggaagagtgggcgatcgtcttcctcttcctgggggctgagatgcggactcccgagggcctctctgtcagccttggggcggctggcaagcggcaggccgatcccctctgcgcagggaagtagcacgactccgtcaccatcttgggccacgctgggggcaccgccggacccctgttttggggctccgcctggatgtccacaaatgctgaggcctgcttgtgcatctggggcacccagagcccgaagctctgggcaggctgatgagagggcagtgggaattctggagcctcgagggccgcctcctcggccaccttcttagcttctgggtatccaggtgggaaccagcagggagctgtggctcgcaacatcttgctgccttcgggagcaccggccgggctctgctccgctcccaaatggcggcttgcctccggggccgcctccttggccaccttcttagcttctgggtatccagggcggaaccagcagggagctgtggctcgcaacatcttgctgccttcgggagcaccggcctggctctgctcccctcccaaatggcggcttgcctccagggccgcctcctcggccaccttcttagcttctgggtatccaggggggaaccagcagggagctgtggctcgcaacatcttgctgccttcgggagcaccgacctggctctgctcctctcccaactggcggcttcaatgagtgctgcggccgccacttgtcgcctttatataggcacagggcagactgggtgggacttctccttgataggttggtgcttcagtccaatcacactgagcctcatcttccaccagactccagcttgggaatgcctcagggggtgcgctaatggaatcaactggaactcccggttgctaaacttggagctaggttgcttttcctgagttaagtaactgtccctgcagggcagtcctataatggctactggaattgggctacctaggattaaattaaggttcagggaggttggtcaacttgcttgggcccacacagcaccccttggagccaggactgggccagcagtctgctgcatgctggagggcgggatccctctggggctgcctttccctgctctgtgcactccgccgctgcgggcaaattgaggaaaggaagcggaccgcacccacttctctcccaggacttgggcaatgttcaacacaggtggtcttccaaaggttcatagaaaatgcacatggtgaagaaactatgcatggatttccactggtttgcactaaaataaacttgtcctaacttctgataacctttctgaactagatctagtttgaggcactaagaaggatgagacatcctctgaaaaggactcccatcagagcaacatgaattcnnnnnnnnnnnnnnnnnnnnnnnnnnnnnnnnnnnnnnnnnnnnnnnnnnnnnnnnnnnnnnnnnnnnnnnnnnnnnnnnnnnnnnnnnnnnnnnnnnnnnnnnnnnnnnnnnnnnnnnnnnnnnnnnnnnnnnnnnnnnnnnnnnnnnnnnnnnnnnnnnnnnnnnnnnnnnnnnnnnnnnnnnnnnnnnnnnnnnnnnnnnnnnnnnnnnnnnnnnnnnnnnnnnnnnnnnnnnnnnnnnnnnnnnnnnnnnnnnnnnnnnnnnnnnnnnnnnnnnnnnnnnnnnnnnnn

SEQ ID NO: 1883424 - DNA, 4001 bp, Homo sapiens
  modified_base (2623)..(4001): a, c, t, g, unknown or other
cattcaggagcagcttgtccggtttccatgcagttgagcggttttgagtgactttctcaatcctgaggtctagtgtgattgcaatgtggtctgagagaccgtttgtaataatttctgtaattttacttttactgaggagtgctttacttccaactatgtggtcaatgtggaaataagtgtgatgtggtgctgagaagaatgtatattctgttgatttggggtggagcgttctgtagatgtctcctaggtccgcttggtgcagagctgagctcaattcccggatatccttttttaactttctgtctcgttggtgtgtctaatgttgacagtggggtgttaagtttgccattattattattattactatgtgggagtctaagtctcttttgatcacactttaaagaccaaaaggtagaagcgcaaagacgttatctgtccaatattacaaacctagtaagtggtggaatttggccttgaacccagatctgtaactccagagccgaagtgcttcacccacctccctgtggtgcctctacagaaaaagaggtaagcaggcattccgaaagctggtgggccggggggctggccttgtactcagaagccatggaagtcccacgtggggtggctagtggtgtaaggacagaggtctcggatgggcagagggatgtggacaggcgcgagggcgcgcggcagggactcgggggactgggagtggcggctcggggctgcgggaggcgattggtggaaggacagaggtctgggaggggcagagggatgtggacaggcccgaggggccgcggcagggattccgggggaccgggagtggggggttggggttactcttggctttttgccctctcctgctgccggctgctccagttttttttgctttgcgggggagggtggtgggcagggtgagctctcgggactgatggcggttttggaagaggcctggggctaaggacaggccagggcggcgggagaggcggaccggtggcgtggctggatctgggcgcgctgtcggaccttccacatcaccagctgcaggcaggcgtttgcgtcctcgctggagttgtggccgtcctggctgtcctggatgatctgtgccaggtagtcggccgcgagattcctgagggagcgcttgtaggggaaacccaggtagtgcgggaagagcacggccgtgtccaccacggtgctgtggatgagcttcagggccagcaggtcgctctccaggctgtgcccgatgaggatggtttgggcgctgaaaaagctcagcaggatggcttggacttggggcaacgtgatgctcgtcttggcgacgtcggcctcggtgactccggaaaacctggtgttgtagtccacgatctcgttgtcgggcttgacgaaggtgtcgtacaccactcgcatgtcggcgtccaccacggtgacgcgggtcagctctaggccatgcgtggtgtagcacatctcacagtccaaggcgtagattcctggataagcgtctctggacaactctttcttgaaggtctccacgaagccatcgaggctctccttgcggccgtcccgcacgtgctgctttgccacctggcagcccacagagccaggagcagctgcacagcaggtgtactggctaacccggcctccagccacctggctcgagcggacccgcccccagtgataataacacaactggtcgcgtacacagcggcccgaggaggacaccaggtactcggtgccacaacggcagcagaccctgcaggaggagtcgccgggccccttcccctggccagtgaagaggacggcgcctccgggccgctcggggtgcgggaaggggtagccgttctccttgagctggtcctgggtgagcaggaactcctggaggcggctgtacagggcggccctgctgaggccgggcatggagctgggggtcaggcccttcagtctcttgagggtgttcaggaccacgttcaggtacctgttcttgttggggctgcagtcgtaggccaccttctcctcgttcagcgccttctcctcggcctcctgcttggaggcgcagaacttgagacactcttcggtgaacagttggagatagcctcggcggaggacggtggggacttggcacccagagcttcggaggataatgggtttcttcaaactcaaactcggtaaggatgcacgacggacgattcgcttagagctggtggtggcggtggtcttgcatgccatccctgacctgttgcgcgtcttccctggctgtctgccgaccttggagccacgggagcgttggctgctgctggccacccgggttctcttggcatctgtgtaacctgtgaccaagcaagggctggaagagtgggcgatcgtcttcctcttcctgggggctgagatgcggactcccgagggcctctctgtcagccttggggcggctggcaagcggcaggccgatcccctctgcgcagggaagtagcacgactccgtcaccatcttgggccacgctgggggcaccgccggacccctgttctggggctccgcctggatgtccacaaatgctgaggcctgcttgtgcatctggggcacccagagcccgaagctctgggcaggctgatgagagggcagtgggaattcnnnnnnnnnnnnnnnnnnnnnnnnnnnnnnnnnnnnnnnnnnnnnnnnnnnnnnnnnnnnnnnnnnnnnnnnnnnnnnnnnnnnnnnnnnnnnnnnnnnnnnnnnnnnnnnnnnnnnnnnnnnnnnnnnnnnnnnnnnnnnnnnnnnnnnnnnnnnnnnnnnnnnnnnnnnnnnnnnnnnnnnnnnnnnnnnnnnnnnnnnnnnnnnnnnnnnnnnnnnnnnnnnnnnnnnnnnnnnnnnnnnnnnnnnnnnnnnnnnnnnnnnnnnnnnnnnnnnnnnnnnnnnnnnnnnnnnnnnnnnnnnnnnnnnnnnnnnnnnnnnnnnnnnnnnnnnnnnnnnnnnnnnnnnnnnnnnnnnnnnnnnnnnnnnnnnnnnnnnnnnnnnnnnnnnnnnnnnnnnnnnnnnnnnnnnnnnnnnnnnnnnnnnnnnnnnnnnnnnnnnnnnnnnnnnnnnnnnnnnnnnnnnnnnnnnnnnnnnnnnnnnnnnnnnnnnnnnnnnnnnnnnnnnnnnnnnnnnnnnnnnnnnnnnnnnnnnnnnnnnnnnnnnnnnnnnnnnnnnnnnnnnnnnnnnnnnnnnnnnnnnnnnnnnnnnnnnnnnnnnnnnnnnnnnnnnnnnnnnnnnnnnnnnnnnnnnnnnnnnnnnnnnnnnnnnnnnnnnnnnnnnnnnnnnnnnnnnnnnnnnnnnnnnnnnnnnnnnnnnnnnnnnnnnnnnnnnnnnnnnnnnnnnnnnnnnnnnnnnnnnnnnnnnnnnnnnnnnnnnnnnnnnnnnnnnnnnnnnnnnnnnnnnnnnnnnnnnnnnnnnnnnnnnnnnnnnnnnnnnnnnnnnnnnnnnnnnnnnnnnnnnnnnnnnnnnnnnnnnnnnnnnnnnnnnnnnnnnnnnnnnnnnnnnnnnnnnnnnnnnnnnnnnnnnnnnnnnnnnnnnnnnnnnnnnnnnnnnnnnnnnnnnnnnnnnnnnnnnnnnnnnnnnnnnnnnnnnnnnnnnnnnnnnnnnnnnnnnnnnnnnnnnnnnnnnnnnnnnnnnnnnnnnnnnnnnnnnnnnnnnnnnnnnnnnnnnnnnnnnnnnnnnnnnnnnnnnnnnnnnnnnnnnnnnnnnnnnnnnnnnnnnnnnnnnnnnnnnnnnnnnnnnnnnnnnnnnnnnnnnnnnnnnnnnnnnnnnnnnnnnnnnnnnnnnnnnnnnnnnnnnnnnnnnnnnnnnnnnnnnnnnnnnnnnnnnnnnnnnnnnnnnnnnnnnnnnnnnnnnnnnnnnnnnnnnnnnnnnnnnnnnnnnnnnnnnnnnnnnnnnnnnnnnnnnnnnnnnnnnnnnnnnnnnnnnnnnnnnnnnnnnnnnnnnnnnnnnnnnnnnnnnnnnnnnnnnnnnnnnnnnnnnnnnnnnnnnnnnnn

SEQ ID NO: 1883425 - DNA, 4001 bp, Homo sapiens
gtactcattcaggaacagcttgtccggtttccatgcagttgtgcggttttgagtgagtttctcaatcctgaggtctagtgtgattgcaatgtggtctgagagaccgtttgtaataatttctgttattttacttttactgaggagtgctttacttccaactatgtggtcaatgtggaaataagtgtgatgtggtgctgagaagaatgtatattctgttgatttggggtggagcgttctgtagatgtctcctaggtccgcttggtgcagagctgagctcaattcccggatatccttttttaactttctgtctcgttggtgtgtctaatgttgacagtggggtgttaagtttgccattattattattattactatgtgggagtctaagtctcttttgatcacactttaaagaccaaaaggtagaagcgcaaagacgttatctgtccaatattacaaacctagtaagtggtggaatttggccttgaacccagatctgtaactccagagccgaagtgcttcacccacctccctgtggtgcctctacagaaaaagaggtaagcaggcattccgaaagctggtgggccggggggctggccttgtactcagaagccatggaagtcccacgtggggtggctagtggtgtaaggacagaggtctcggatgggcagagggatgtggacaggcgcgagggcgcgcggcagggactcgggggactgggagtggcggctcggggctgcgggaggcgattggtggaaggacagaggtctgggaggggcagagggatgtggacaggcccgaggggccgcggcagggattccgggggaccgggagtggggggttggggttactcttggctttttgccctctcctgccgccggctgctccagtttctttcgctttgcggcgaggtgggcagggtgagctctcgggactgatggcggttttggaagaggcctggggctaaggacaggccagggcggcgggagaggcggaccggtggcgtggctggatctgggcgcgctgtcggaccttccacatcaccagctgcaggcaggcgtttgcgtcctcgctggagttgtggccgtcctggctgtcctggatgatctgtgccaggtagtcggccgcgagattcctgagggagcgcttgtaggggaaacccaggtagtgcgggaagagcacggccgtgtccaccacggtgctgtggatgagcttcagggccagcaggtcgctctccaggctgtgcccgatgaggatggtttgggcgctgaaaaagctcagcaggatggcttggacttggggcaacgtgatgctcgtcttggcgacgtcggcctcggtgactccggaaaacctggtgttgtagtccacgatctcgttgtcgggcttgacgaaggtgtcgtacaccactcgcatgtcggcgtccaccacggtgacgcgggtcagctctaggccatgcgtggtgtagcacatctcacagtccaaggcgtagattcctggataagcgtctctggacaactctttcttgaaggtctccacgaagccatcgaggctctccttgcggccgtcccgcacgtgctgctttgccacctggcagcccacagagccaggagcagctgcacagcaggtgtactggctaacccggcctccagccacctggctcgagcggacccgcccccagtgataataacacaactggtcgcgtacacagcggcccgaggaggacaccaggtactcggtgccacaacggcagcagaccctgcaggaggagtcgccgggccccttcccctggccagtgaagaggacggcgcctccgggccgctcggggtgcgggaaggggtagccgttctccttgagctggtcctgggtgagcaggaactcctggaggcggctgtacagggcggccctgctgaggccgggcatggagctgggggtcaggcccttcagtctcttgagggtgttcaggaccacgttcaggtacctgttcttgttggggctgcagtcgtaggccaccttctcctcgttcagcgccttctcctcggcctcctgcttggaggcgcagaacttgagacactcttcggtgaacagctggagatagcctcggcggaggacggtggggacttggcacccagagcttcggaggataatgggtttcttcaaactcaaactcggtaaggatgcacgacggacgattcgcttagagctggtggtggcggtggtcttgcatgccatccctgacctgttgcgcgtcttccctggctgtctgccgaccttggagccacgggagcgttggctgctgctggccacccgggttctcttggcatctgtgtaacctgtgaccaagcaagggctggaagagtgggcgatcgtcttcctcttcctgggggctgagatgcggactcccgagggcctctctgtcagccttggggcggctggcaagcggcaggccgatcccctctgcgcagggaagtagcacgactccgtcaccatcttgggccacgctgggggcaccgccggacccctgttctggggctccgcctggatgtccacaaatgctgaggcctgcttgtgcatctggggcacccagagcccgaagctctgggcaggctgatgagagggcagtgggaattctggagcctcgagggccgcctcctcggccaccttcttagcttctgggtatccaggtgggaaccagcagggagctgtggctcgcaacatcttgctgccttcgggagcaccggccgggctctgctccgctcccaaatggcggcttgcctccggggccgcctccttggccaccttcttagcttctgggtatccagggcggaaccagcagggagctgtggctcgcaacatcttgctgccttcgggagcaccggcctggctctgctcccctcccaaatggcggcttgcctccagggccgcctcctcggccaccttcttagcttctgggtatccaggggggaaccagcagggagctgtggctcgcaacatcttgctgccttcgggagcaccggcctggctctgctcctctcccaactggcggcttcaatgagtgctgcggccgccacttgtcgcctttatataggcacagggcagactgggtgggacttctccttgataggttggtgcttcagtccaatcacactgagcctcatcttccaccagactccagcttgggaatgcctcggggggtgcgctaatggaatcaactggaactcccggttgctaaacttggagctaggttgcttttcctgagttaagtaactgtccctgcagggcagtcctataatggctactggaattgggctacctaggattaaattaaggttcagggaggttggtcaacttgcttgggcccacacagcaccccttggagccaggactgggccagcagtctgctgcatgctggagggcgggatccctctggggctgcctttccctgctctgtgcactccgccgctgcgggcaaattgaggacaggaagcggaccgcacccacttctctcccaggacttgggcaatgttcaacacaggtggtcttccaaaggttcatagaaaatgcacatggtgaagaaactatgcatggatttccactggtttgcactaaaataaacttgtcctaacttctgataacctttctgaactagatctagtttgaggcactaagaaggatgagacatccactgaaaaggactcccgtcagagcaacatgaattccacgaaaattgcagcaagaggaaacatcaaatttatggtgaagcttgggtggaagattgaagaaatcattgacgttttaagaaaagcttgtaaggacactaccccaaagaaatgaactctttacgaatgtatagcttgtttcaagaagaggtgagaagatgtggaagatgaatcctgcagtggctgtgaaaaccactgtgcccagatcagctgcagttacgacgagagctatcagtggaaattttaaacaggagggatcacgatcctgacgcatccctctgacaaattgta

SEQ ID NO: 1883426 - DNA, 4001 bp, Homo sapiens
tactcattcaggaacagcttgtccggtttccatgcagttgtgcggttttgagtgagtttctcaatcctgaggtctagtgtgattgcaatgtggtctgagagaccgtttgtaataatttctgttattttacttttactgaggagtgctttacttccaactatgtggtcaatgtggaaataagtgtgatgtggtgctgagaagaatgtatattctgttgatttggggtggagcgttctgtagatgtctcctaggtccgcttggtgcagagctgagctcaattcccggatatccttttttaactttctgtctcgttggtgtgtctaatgttgacagtggggtgttaagtttgccattattattattattactatgtgggagtctaagtctcttttgatcacactttaaagaccaaaaggtagaagcgcaaagacgttatctgtccaatattacaaacctagtaagtggtggaatttggccttgaacccagatctgtaactccagagccgaagtgcttcacccacctccctgtggtgcctctacagaaaaagaggtaagcaggcattccgaaagctggtgggccggggggctggccttgtactcagaagccatggaagtcccacgtggggtggctagtggtgtaaggacagaggtctcggatgggcagagggatgtggacaggcgcgagggcgcgcggcagggactcgggggactgggagtggcggctcggggctgcgggaggcgattggtggaaggacagaggtctgggaggggcagagggatgtggacaggcccgaggggccgcggcagggattccgggggaccgggagtggggggttggggttactcttggctttttgccctctcctgccgccggctgctccagtttctttcgctttgcggcgaggtgggcagggtgagctctcgggactgatggcggttttggaagaggcctggggctaaggacaggccagggcggcgggagaggcggaccggtggcgtggctggatctgggcgcgctgtcggaccttccacatcaccagctgcaggcaggcgtttgcgtcctcgctggagttgtggccgtcctggctgtcctggatgatctgtgccaggtagtcggccgcgagattcctgagggagcgcttgtaggggaaacccaggtagtgcgggaagagcacggccgtgtccaccacggtgctgtggatgagcttcagggccagcaggtcgctctccaggctgtgcccgatgaggatggtttgggcgctgaaaaagctcagcaggatggcttggacttggggcaacgtgatgctcgtcttggcgacgtcggcctcggtgactccggaaaacctggtgttgtagtccacgatctcgttgtcgggcttgacgaaggtgtcgtacaccactcgcatgtcggcgtccaccacggtgacgcgggtcagctctaggccatgcgtggtgtagcacatctcacagtccaaggcgtagattcctggataagcgtctctggacaactctttcttgaaggtctccacgaagccatcgaggctctccttgcggccgtcccgcacgtgctgctttgccacctggcagcccacagagccaggagcagctgcacagcaggtgtactggctaacccggcctccagccacctggctcgagcggacccgcccccagtgataataacacaactggtcgcgtacacagcggcccgaggaggacaccaggtactcggtgccacaacggcagcagaccctgcaggaggagtcgccgggccccttcccctggccagtgaagaggacggcgcctccgggccgctcggggtgcgggaaggggtagccgttctccttgagctggtcctgggtgagcaggaactcctggaggcggctgtacagggcggccctgctgaggccgggcatggagctgggggtcaggcccttcagtctcttgagggtgttcaggaccacgttcaggtacctgttcttgttggggctgcagtcgtaggccaccttctcctcgttcagcgccttctcctcggcctcctgcttggaggcgcagaacttgagacactcttcggtgaacagctggagatagcctcggcggaggacggtggggacttggcacccagagcttcggaggataatgggtttcttcaaactcaaactcggtaaggatgcacgacggacgattcgcttagagctggtggtggcggtggtcttgcatgccatccctgacctgttgcgcgtcttccctggctgtctgccgaccttggagccacgggagcgttggctgctgctggccacccgggttctcttggcatctgtgtaacctgtgaccaagcaagggctggaagagtgggcgatcgtcttcctcttcctgggggctgagatgcggactcccgagggcctctctgtcagccttggggcggctggcaagcggcaggccgatcccctctgcgcagggaagtagcacgactccgtcaccatcttgggccacgctgggggcaccgccggacccctgttctggggctccgcctggatgtccacaaatgctgaggcctgcttgtgcatctggggcacccagagcccgaagctctgggcaggctgatgagagggcagtgggaattctggagcctcgagggccgcctcctcggccaccttcttagcttctgggtatccaggtgggaaccagcagggagctgtggctcgcaacatcttgctgccttcgggagcaccggccgggctctgctccgctcccaaatggcggcttgcctccggggccgcctccttggccaccttcttagcttctgggtatccagggcggaaccagcagggagctgtggctcgcaacatcttgctgccttcgggagcaccggcctggctctgctcccctcccaaatggcggcttgcctccagggccgcctcctcggccaccttcttagcttctgggtatccaggggggaaccagcagggagctgtggctcgcaacatcttgctgccttcgggagcaccggcctggctctgctcctctcccaactggcggcttcaatgagtgctgcggccgccacttgtcgcctttatataggcacagggcagactgggtgggacttctccttgataggttggtgcttcagtccaatcacactgagcctcatcttccaccagactccagcttgggaatgcctcagggggtgcgctaatggaatcaactggaactcccggttgctaaacttggagctaggttgcttttcctgagttaagtaactgtccctgcagggcagtcctataatggctactggaattgggctacctaggattaaattaaggttcagggaggttggtcaacttgcttgggcccacacagcactccttggagccaggactgggccagcagtctgctgcatgctggagggcgggatccctctggggctgcctttccctgctctgtgcactccgccgctgcgggcaaattgaggacaggaagcggaccgcacccacttctctcccaggacttgggcaatgttcaacacaggtggtcttccaaaggttcatagaaaatgcacatggtgaagaaactatgcatggatttccactggtttgcactaaaataaacttgtcctaacttctgataacctttctgaactagatctagtttgaggcactaagaaggatgagacatccactgaaaaggactcccatcagagcaacatgaattccacgaaaattgcagcaagaggaaacatcaaatttatggtgaagcttgggtggaagattgaagaaatcattgacgttttaagaaaagcttgtaaggacactaccccaaagaaatgaactctttacgaatgtatagcttgtttcaagaagaggtgagaagatgtggaagatgaatcctgcagtggctgtgaaaaccactgtgcccagatcagctgcagttacgacgagagctatcagtggaaattttaaacaggagggatcacgatcctgacgcatccctctgacaaattgtaa

SEQ ID NO: 1883427 - DNA, 4001 bp, Homo sapiens
tactcattcaggaacagcttgtccggtttccatgcagttgtgcggttttgagtgagtttctcaatcctgaggtctagtgtgattgcaatgtggtctgagagaccgtttgtaataatttctgttattttacttttactgaggagtgctttacttccaactatgtggtcaatgtggaaataagtgtgatgtggtgctgagaagaatgtatattctgttgatttggggtggagcgttctgtagatgtctcctaggtccgcttggtgcagagctgagctcaattcccggatatccttttttaactttctgtctcgttggtgtgtctaatgttgacagtggggtgttaagtttgccattattattattattactatgtgggagtctaagtctcttttgatcacactttaaagaccaaaaggtagaagcgcaaagacgttatctgtccaatattacaaacctagtaagtggtggaatttggccttgaacccagatctgtaactccagagccgaagtgcttcacccacctccctgtggtgcctctacagaaaaagaggtaagcaggcattccgaaagctggtgggccggggggctggccttgtactcagaagccatggaagtcccacgtggggtggctagtggtgtaaggacagaggtctcggatgggcagagggatgtggacaggcgcgagggcgcgcggcagggactcgggggactgggagtggcggctcggggctgcgggaggcgattggtggaaggacagaggtctgggaggggcagagggatgtggacaggcccgaggggccgcggcagggattccgggggaccgggagtggggggttggggttactcttggctttttgccctctcctgccgccggctgctccagtttctttcgcttgcggcgaggtgggcagggtgagctctcgggactgatggcggttttggaagaggcctggggctaaggacaggccagggcggcgggagaggcggaccggtggcgtggctggatctgggcgcgctgtcggaccttccacatcaccagctgcaggcaggcgtttgcgtcctcgctggagttgtggccgtcctggctgtcctggatgatctgtgccaggtagtcggccgcgagattcctgagggagcgcttgtaggggaaacccaggtagtgcgggaagagcacggccgtgtccaccacggtgctgtggatgagcttcagggccagcaggtcgctctccaggctgtgcccgatgaggatggtttgggcgctgaaaaagctcagcaggatggcttggacttggggcaacgtgatgctcgtcttggcgacgtcggcctcggtgactccggaaaacctggtgttgtagtccacgatctcgttgtcgggcttgacgaaggtgtcgtacaccactcgcatgtcggcgtccaccacggtgacgcgggtcagctctaggccatgcgtggtgtagcacatctcacagtccaaggcgtagattcctggataagcgtctctggacaactctttcttgaaggtctccacgaagccatcgaggctctccttgcgggccgtcccgcacgtgctgctttgccacctggcagcccacagagccaggagcagctgcacagcaggtgtactggctaacccggcctccagccacctggctcgagcggacccgcccccagtgataataacacaactggtcgcgtacacagcggcccgaggaggacaccaggtactcggtgccacaacggcagcagaccctgcaggaggagtcgccgggccccttcccctggccagtgaagaggacggcgcctccgggccgctcggggtgcgggaaggggtagccgttctccttgagctggtcctgggtgagcaggaactcctggaggcggctgtacagggcggccctgctgaggccgggcatggagctgggggtcaggcccttcagtctcttgagggtgttcaggaccacgttcaggtacctgttcttgttggggctgcagtcgtaggccaccttctcctcgttcagcgccttctcctcggcctcctgcttggaggcgcagaacttgagacactcttcggtgaacagctggagatagcctcggcggaggacggtggggacttggcacccagagcttcggaggataatgggtttcttcaaactcaaactcggtaaggatgcacgacggacgattcgcttagagctggtggtggcggtggtcttgcatgccatccctgacctgttgcgcgtcttccctggctgtctgccgaccttggagccacgggaccgttggctgctgctggccacccgggttctcttggcatctgtgtaacctgtgaccaagcaagggctggaaggagtgggcgatcgtcttcctcttcctgggggctgagatgcggactcccgagggcctctctgtcagccttggggtggctggcaagcggcaggccgatcccctctgtgcagggaagtagcacgactccgtcaccatcttgggccacgctgggggcaccgccggacccctgttctggggctccgcctggatgtccacaaatgctgaggcctgcttgtgcatctggggcacccagagcccgaagctctgggcaggctgatgagagggcagtgggaattctggagcctcgagggccgcctcctcggccaccttcttagcttctgggtatccaggtgggaaccagcagggagctgtggctcgcaacatcttgctgccttcgggagcaccggccgggctctgctccgctcccaaatggcggcttgcctccggggccgcctccttggccaccttcttagcttctgggtatccagggcggaaccagcagggagctgtggctcgcaacatcttgctgccttcgggagcaccggcctggctctgctcccctcccaaatggcggcttgcctccagggccgcctcctcggccaccttcttagcttctgggtatccaggggggaaccagcagggagctgtggctcgcaacatcttgctgccttcgggagcaccggcctggctctgctcctctcccaactggcggcttcaatgagtgctgcggccgccacttgtcgcctttatataggcacagggcagactgggtgggacttctccttgataggttggtgcttcagtccaatcacactgagcctcatcttccaccagactccagcttgggaatgcctcagggggtgcgctaatggaatcaactggaactcccggttgctaaacttggagctaggttgcttttcctgagttaagtaactgtccctgcaaggcagtcctataatggctactggaattgggctacctaggattaaattaaggttcagggaggttggtcaacttgcttgggcccacacagcaccccttggagccaggactgggccagcagtctgctgcatgctggagggcgggatccctctggggctgcctttccctgctctgtgcactccgccgctgcgggcaaattgaggacaggaagcggaccgcacccacttctctcccaggacttgggcaatgttcaacacaggtggtcttccaaaggttcatagaaaatgcacatggtgaagaaactatgcatggatttccactggtttgcactaaaataaacttgtcctaacttctgataacctttctgaactagatctagtttgaggcactaagaaggatgagacatccactgaaaaggactcccatcagagcaacatgaattccacgaaaattgcagcaagaggaaacatcaaatttatggtgaagcttgggtggaagattgaagaaatcattgacgttttaagaaaagcttgtaaggacactaccccaaagaaatgaactctttacgaatgtatagcttgtttcaagaagaggtgagaagatgtggaagatgaatccttcagtggctgtgaaaaccactgtgcccagatcagctgcagttacgacgagagctatcagtggaaattttaagcaggagggatcacgatcctgacgcatccctctgacaaattgta

SEQ ID NO: 1883428 - DNA, 4001 bp, Homo sapiens
tactcattcaggagcagcttgtccggtttccatgcagttgagcggttttgagtgagtttctcaatcctgaggtctagtgtgattgcaatgtggtctgagagaccgtttgtaataatttctgtaattttacttttactgaggagtgctttacttccaactatgtggtcaatgtggaaataagtgtgatgtggtgctgagaagaatgtatattctgttgatttggggtggagcgttctgtacatgtctcctaggtccgcttggtgcagagctgagctcaattcccggatatccttttttaactttctgtctcgttggtgtgtctaatgttgacagtggggtgttaagtttgccattattattattattattatgtgggagtctaagtctcttttgatcacactttaaagaccaaaaggtagaagcgcaaagacgttatctgtccaatattacaaacctagtaagtggtggaatttggccttgaacccagatctgtaactccagagccgaagtgcttcacccacctccctgtggtgcctctacagaaaaagaggtaagcaggcattccgaaagctggtgggccggggggctggccttgtactcagaagccatggaagtcccacgtggggtggctagtggtgtaaggacagaggtctcggatgggcagagggatgtggacaggcgcgagggcgcgcggcagggactcgggggactgggagtggcggctcggggctgcgggaggcgattggtggaaggacagaggtctgggaggggcagagggatgtggacaggcccgaggggccgcggcagggattccgggggaccgggagtggggggttggggttactcttggctttttgccctctcctgccgccggctgctccagtttctttcgctttgcggcgaggtgggcagggtgagctctcgggactgatggcggttttggaagaggcctggggctaaggacaggccagggcggcgggagaggcggaccggtggcgtggctggatctgggcgcgctgtcggaccttccacatcaccagctgcaggcaggcgtttgcgtcctcgctggagttgtggccgtcctggctgtcctggatgatctgtgccaggtagtcggccgcgagattcctgagggagcgcttgtaggggaaacccaggtagtgcgggaagagcacggccgtgtccaccacggtgctgtggatgagcttcagggccagcaggtcgctctccaggctgtgcccgatgaggatggtttgggcgctgaaaaagctcagcaggatggcttggacttggggcaacgtgatgctcgtcttggcgacgtcggcctcggtgactccggaaaacctggtgttgtagtccacgatctcgttgtcgggcttgacgaaggtgtcgtacaccactcgcatgtcggcgtccaccacggtgacgcgggtcagctctaggccatgcgtggtgtagcacatctcacagtccaaggcgtagattcctggataagcgtctctggacaactctttcttgaaggtctccacgaagccatcgaggctctccttgcggccgtcccgcacgtgctgctttgccacctggcagcccacagagccaggagcagctgcacagcaggtgtactggctaacccggcctccagccacctggctcgagcggacccgcccccagtgataataacacaactggtcgcgtacacagcggcccgaggaggacaccaggtactcggtgccacaacggcagcagaccctgcaggaggagtcgccgggccccttcccctggccagtgaagaggacggcgcctccgggccgctcggggtgcgggaaggggtagccgttctccttgagctggtcctgggtgagcaggaactcctggaggcggctgtacagggcggccctgctgaggccgggcatggagctgggggtcaggcccttcagtctcttgagggtgttcaggaccacgttcaggtacctgttcttgttggggctgcagtcgtaggccaccttctcctcgttcagcgccttctcctcggcctcctgcttggaggcgcagaacttgagacactcttcggtgaacagttggagatagcctcggcggaggacggtggggacttggcacccagagcttcggaggataatgggtttcttcaaactcaaactcggtaaggatgcacgacggacgattcgcttagagctggtggtggcggtggtcttgcatgccatccctgacctgttgcgcgtcttccctggctgtctgccgaccttggagccacgggagcgttggctgctgctggccacccgggttctcttggcatctgtgtaacctgtgaccaagcaagggctggaagagtgggcgatcgtcttcctcttcctgggggctgagatgcggactcccgagggcctctctgtcagccttggggcggctggcaagcggcaggccgatcccctctgcgcagggaagtagcacgactccgtcaccatcttgggccacgctgggggcaccgccggacccctgttctggggctccgcctggatgtccacaaatgctgaggcctgcttgtgcatctggggcacccagagcccgaagctctgggcaggctgatgagagggcagtgggaattctggagcctcgagggccgcctcctcggccaccttcttagcttctgggtatccaggtgggaaccagcagggagctgtggctcgcaacatcttgctgccttcgggagcaccggccgggctctgctccgctcccaaatggcggcttgcctccggggccgcctccttggccaccttcttagcttctgggtatccagggcggaaccagcagggagctgtggctcgcaacatcttgctgccttcgggagcaccggcctggctctgctcccctcccaaatggcggcttgcctccagggccgcctcctcggccaccttcttagcttctgggtatccaggggggaaccagcagggagctgtggctcgcaacatcttgctgccttcgggagcaccggcctggctctgctcctctcccaactggcggcttcaatgagtgctgcggccgccacttgtcgcctttatataggcacagggcagactgggtgggacttctccttgataggttggtgcttcagtccaatcacactgagcctcatcttccaccagactccagcttgggaatgcctcagggggtgcgctaatggaatcaactggaactcccggttgctaaacttggagctaggttgcttttcctgagttaagtaactgtccctgcagggcagtcctataatggctactggaattgggctacctaggattaaattaaggttcagggaggttggtcaacttgcttgggcccacacagcactccttggagccaggactgggccagcagtctgctgcatgctggagggcgggatccctctggggctgcctttccctgctctgtgcactccgccgctgcgggcaaattgaggacaggaagcggaccgcacccacttctctcccaggacttgggcaatgttcaacacaggtggtcttccaaaggttcatagaaaatgcacatggtgaagaaactatgcatggatttccactggtttgcactaaaataaacttgtcctaacttctgataacctttctgaactagatctagtttgaggcactaagaaggatgagacatccactgaaaaggactcccatcagagcaacatgaattccacgaaaattgcagcaagaggaaacatcaaatttatggtgaagcttgggtggaagattgaagaaatcattgacgttttaagaaaagcttgtaaggacactaccccaaagaaatgaactctttacgaatgtatagcttgtttcaagaagaggtgagaagatgtggaagatgaatcctgcagtggctgtgaaaaccactgtgcccagatcagctgcagttacgacgagagctatcagtggaaattttaaacaggagggatcacgatcctgacgcatccctctgacaaattgtaa

SEQ ID NO: 1883429 - DNA, 4001 bp, Homo sapiens; identical to SEQ ID NO: 1883426

SEQ ID NO: 1883430 - DNA, 4001 bp, Homo sapiens
tactcattcaggagcagcttgtccggtttccatgcagttgagcggttttgagtgactttctcaatcctgaggtctagtgtgattgcaatgtggtctgagagaccgtttgtaataatttctgtaattttacttttactgaggagtgctttacttccaactatgtggtcaatgtggaaataagtgtgatgtggtgctgagaagaatgtatattctgttgatttggggtggagcgttctgtagatgtctcctaggtccgcttggtgcagagctgagctcaattcccggatatccttttttaactttctgtctcgttggtgtgtctaatgttgacagtggggtgttaagtttgccattattattattattactatgtgggagtctaagtctcttttgatcacactttaaagaccaaaaggtagaagcgcaaagacgttatctgtccaatattacaaacctagtaagtggtggaatttggccttgaacccagatctgtaactccagagccgaagtgcttcacccacctccctgtggtgcctctacagaaaaagaggtaagcaggcattccgaaagctggtgggccggggggctggccttgtactcagaagccatggaagtcccacgtggggtggctagtggtgtaaggacagaggtctcggatgggcagagggatgtggacaggcgcgagggcgcgcggcagggactcgggggactgggagtggcggctcggggctgcgggaggcgattggtggaaggacagaggtctgggaggggcagagggatgtggacaggcccgaggggccgcggcagggattccgggggaccgggagtggggggttggggttactcttggctttttgccctctcctgccgccggctgctccagtttctttcgctttgcggcgaggtgggcagggtgagctctcgggactgatggcggttttggaagaggcctggggctaaggacaggccagggcggcgggagaggcggaccggtggcgtggctggatctgggcgcgctgtcggaccttccacatcaccagctgcaggcaggcgtttgcgtcctcgctggagttgtggccgtcctggctgtcctggatgatctgtgccaggtagtcggccgcgagattcctgagggagcgcttgtaggggaaacccaggtagtgcgggaagagcacggccgtgtccaccacggtgctgtggatgagcttcagggccagcaggtcgctctccaggctgtgcccgatgaggatggtttgggcgctgaaaaagctcagcaggatggcttggacttggggcaacgtgatgctcgtcttggcgacgtcggcctcggtgactccggaaaacctggtgttgtagtccacgatctcgttgtcgggcttgacgaaggtgtcgtacaccactcgcatgtcggcgtccaccacggtgacgcgggtcagctctaggccatgcgtggtgtagcacatctcacagtccaaggcgtagattcctggataagcgtctctggacaactctttcttgaaggtctccacgaagccatcgaggctctccttgcggccgtcccgcacgtgctgctttgccacctggcagcccacagagccaggagcagctgcacagcaggtgtactggctaacccggcctccagccacctggctcgagcggacccgcccccagtgataataacacaactggtcgcgtacacagcggcccgaggaggacaccaggtactcggtgccacaacggcagcagaccctgcaggaggagtcgccgggccccttcccctggccagtgaagaggacggcgcctccgggccgctcggggtgcgggaaggggtagccgttctccttgagctggtcctgggtgagcaggaactcctggaggcggctgtacagggcggccctgctgaggccgggcatggagctgggggtcaggcccttcagtctcttgagggtgttcaggaccacgttcaggtacctgttcttgttggggctgcagtcgtaggccaccttctcctcgttcagcgccttctcctcggcctcctgcttggaggcgcagaacttgagacactcttcggtgaacagttggagatagcctcggcggaggacggtggggacttggcacccagagcttcggaggataatgggtttcttcaaactcaaactcggtaaggatgcacgacggacgattcgcttagagctggtggtggcggtggtcttgcatgccatccctgacctgttgcgcgtcttccctggctgtctgccgaccttggagccacgggagcgttggctgctgctggccacccgggttctcttggcatctgtgtaacctgtgaccaagcaagggctggaagagtgggcgatcgtcttcctcttcctgggggctgagatgcggactcccgagggcctctctgtcagccttggggcggctggcaagcggcaggccgatcccctctgcgcagggaagtagcacgactccgtcaccatcttgggccacgctgggggcaccgccggacccctgttctggggctccgcctggatgtccacaaatgctgaggcctgcttgtgcatctggggcacccagagcccgaagctctgggcaggctgatgagagggcagtgggaattctggagcctcgagggccgcctcctcggccaccttcttagcttctgggtatccaggtgggaaccagcagggagctgtggctcgcaacatcttgctgccttcgggagcaccggccgggctctgctccgctcccaaatggcggcttgcctccggggccgcctccttggccagcttcttagcttctgggtatccagggcggaaccagcagggagctgtggctcgcaacatcttgctgccttcgggagcaccggcctggctctgctcccctcccaaatggcggcttgcctccagggccgcctcctcggccaccttcttagcttctgggtatccaggggggaaccagcagggagctgtggctcgcaacatcttgctgccttcgggagcaccggcctggctctgctcctctcccaactggcggcttcaatgagtgctgcggccgccacttgtcgcctttatataggcacagggcagactgggtgggacttctccttgataggttggtgcttcagtccaatcacactgagcctcatcttccaccagactccagcttgggaatgcctcagggggtgcgctaatggaatcaactggaactcccggttgctaaacttggagctaggttgcttttcctgagttaagtaactgtccctgcagggcagtcctataatggctactggaattgggctacctaggattaaattaaggttcagggaggttggtcaacttgcttgggcccacacagcaccccttggagccaggactgggccagcagtctgctgcatgctggagggcgggatccctctggggctgcctttccctgctctgtgcactccgccgctgcgggcaaattgaggacaggaagcggaccgcacccacttctctcccaggacttgggcaatgttcaacacaggtggtcttccaaaggttcatagaaaatgcacatggtgaagaaactatgcatggatttccactggtttgcactaaaataaacttgtcctaacttctgataacctttctgaactagatctagtttgaggcactaagaaggatgagacatccactgaaaaggactcccgtcagagcaacatgaattccacgaaaattgcagcaagaggaaacatcaaatttatggtgaagcttgggtggaagattgaagacatcattgacgttttaagaaaagcttgtaaggacactaccccaaagaaatgaactcttttcgaatgtatagcttgtttcaagaagaggtgagaagatgtggaagatgaatcctgcagtggctgtgaaaaccactgtgcccagatcagctgcagttacgacgagagctatcagtggaaattttaaacaggagggatcacgatcctgacgcatccctctgacaaattgtaa

SEQ ID NO: 1883431 - DNA, 4001 bp, Homo sapiens
tactcattcaggaacagcttgtccggtttccatgcagttgtgcggttttgagtgagtttctcaatcctgaggtctagtgtgattgcaatgtggtctgagagaccgtttgtaataatttctgttattttacttttactgaggagtgctttacttccaactatgtggtcaatgtggaaataagtgtgatgtggtgctgagaagaatgtatattctgttgatttggggtggagcgttctgtagatgtctcctaggtccgcttggtgcagagctgagctcaattcccggatatccttttttaactttctgtctcgttggtgtgtctaatgttgacagtggggtgttaagtttgccattattattattattactatgtgggagtctaagtctcttttgatcacactttaaagaccaaaaggtagaagcgcaaagacgttatctgtccaatattacaaacctagtaagtggtggaatttggccttgaacccagatctgtaactccagagccgaagtgcttcacccacctccctgtggtgcctctacagaaaaagaggtaagcaggcattccgaaagctggtgggccggggggctggccttgtactcagaagccatggaagtcccacgtggggtggctagtggtgtaaggacagaggtctcggatgggcagagggatgtggacaggcgcgagggcgcgcggcagggactcgggggactgggagtggcggctcggggctgcgggaggcgattggtggaaggacagaggtctgggaggggcagagggatgtggacaggcccgaggggccgcggcagggattccgggggaccgggagtggggggttggggttactcttggctttttgccctctcctgccgccggctgctccagtttctttcgctttgcggcgaggtgggcagggtgagctctcgggactgatggcggttttggaagaggcctggggctaaggacaggccagggcggcgggagaggcggaccggtggcgtggctggatctgggcgcgctgtcggaccttccacatcaccagctgcaggcaggcgtttgcgtcctcgctggagttgtggccgtcctggctgtcctggatgatctgtgccaggtagtcggccgcgagattcctgagggagcgcttgtaggggaaacccaggtagtgcgggaagagcacggccgtgtccaccacggtgctgtggatgagcttcagggccagcaggtcgctctccaggctgtgcccgatgaggatggtttgggcgctgaaaaagctcagcaggatggcttggacttggggcaacgtgatgctcgtcttggcgacgtcggcctcggtgactccggaaaacctggtgttgtagtccacgatctcgttgtcgggcttgacgaaggtgtcgtacaccactcgcatgtcggcgtccaccacggtgacgcgggtcagctctaggccatgcgtggtgtagcacatctcacagtccaaggcgtagattcctggataagcgtctctggacaactctttcttgaaggtctccacgaagccatcgaggctctccttgcggccgtcccgcacgtgctgctttgccacctggcagcccacagagccaggagcagctgcacagcaggtgtactggctaacccggcctccagccacctggctcgagcggacccgcccccagtgataataacacaactggtcgcgtacacagcggcccgaggaggacaccaggtactcggtgccacaacggcagcagaccctgcaggaggagtcgccgggccccttcccctggccagtgaagaggacggcgcctccgggccgctcggggtgcgggaaggggtagccgttctccttgagctggtcctgggtgagcaggaactcctggaggcggctgtacagggcggccctgctgaggccgggcatggagctgggggtcaggcccttcagtctcttgagggtgttcaggaccacgttcaggtacctgttcttgttggggctgcagtcgtaggccaccttctcctcgttcagcgccttctcctcggcctcctgcttggaggcgcagaacttgagacactcttcggtgaacagttggagatagcctcggcggaggacggtggggacttggcacccagagcttcggaggataatgggtttcttcaaactcaaactcggtaaggatgcacgacggacgattcgcttagagctggtggtggcggtggtcttgcatgccatccctgacctgttgcgcgtcttccctggctgtctgccgaccttggagccacgggagcgttggctgctgctggccacccgggttctcttggcatctgtgtaacctgtgaccaagcaagggctggaagagtgggcgatcgtcttcctcttcctgggggctgagatgcggactcccgagggcctctctgtcagccttggggcggctggcaagcggcaggccgatcccctctgcgcagggaagtagcacgactccgtcaccatcttgggccacgctgggggcaccgccggacccctgttctggggctccgcctggatgtccacaaatgctgaggcctgcttgtgcatctggggcacccagagcccgaagctctgggcaggctgatgagagggcagtgggaattctggagcctcgagggccgcctcctcggccaccttcttagcttctgggtatccaggtgggaaccagcagggagctgtggctcgcaacatcttgctgccttcgggagcaccggcctggctctgctcctctccccactggcggcttcaatcagtgtcgcggtggtcgcgcatcgcctttatataggcatgggtcagagtgggtggggcttcttcttgattacgttggtactttattctaatcacactaaatctcatcttccaccagactccagcttcggaatgcctcagagggtctgctaatggaagcaactggatctcctggttgctaaccttggagctaggttgcttttcctgagttaatttactgtgcctgcacagcagtcctataatggctactggaactgggctacttaggagtaaaatgaggttcatggaggttgttcaacttgttcgggcccagacaacatcccacggacccaggactggtgcagcagtccgctgcatgctggcgggcaggatctctctggggttgcgtttccctgctctgtgcactcttccactgtgggcaattggaggacaggaagtggaccacatccacttctgtcccaggacatgggcaatgttgaatactgggggtcttcaaaaaattcatagaaaatgcacatggttaaaaaactattcatggatttcagtttgtttgcactaaaataaacttgtagtaactttttacaacctttctgaactagacgtagtttgaggcataaagaaggatgagacatccactgaaaacatctcctatcagagcaacatgaattccgctaaagttgcagcaagaacaaacattaaatttatggtgaagcttgagtggaataatgtagaaattattgatgttttatgaaaagcttgtaaggacaatacccccacagaaatcagccgtttaccaatgtagagtttgttttaagaagagatgagaagatgtagaaggtgaattctgcagtggctgtgaaaaccaactgctatggaaaccactgtggccagatcagctgcagttaggaggagagctttcagtggaaattttaaacaggagagatcatggtcctgtctaaaatgtaaactaaaaatgcaaacattatctgagcatgatggcgggtgctggtaatcccagctactcgggaagctgaggtaggagaattgaacccaggagttggaggttgcagtgagccgagatctcgccactgcactaccgcctgggcgacagagcgagactctgtctcaaaaaaaacaaacaaaacaaacaaacaaaaaaacaaaaaacaaaaaacccaaacaaacaaacaaaaaagaacttgcaatgttccagttatttatccataataccttcct

SEQ ID NO: 1883432 - DNA, 4001 bp, Homo sapiens; identical to SEQ ID NO: 587816

SEQ ID NO: 1883433 - DNA, 4001 bp, Homo sapiens
aaagaaaatagtaattgaatattttccttcaggaaacagcaccctgcagggaggggaagtcttatgaccctcaaagtttgagagcctctcttaacttcccaatggcctctgtctgctgaaccaagaagcctgcaaaacaaatacgtaagaactggataccatttcagtcacacatgcttgctgacagtcactgatatggtaatgcctcctgtacacatagctgactctgaagactgctaagagggtttgggtctctgctgtacaggaccttggcagcctgcaaggagatgactcacatggaagtccccacacaagtgcacccagtgtgaactttggaagcatcggcccatgctcaggcccacaggtaagatggccaggagcccctaaccttgaggaaacttgaaccacagagctgctggcgaagggggtgggtgaaggtctcatgtagcctgtgtgattcaggcagaagtgagaaggacgggtgggaacccaccaagtggacgacaagctgaagggctcccagggagcagacacttcaagggccccaaaaggccaggagaaagaaaaaaaaaagccgggtatggtggctcatccctgtaatccagcacttttgggaggttgaggcagatgaattgcttgagcccagaagtttgagaccagcctgggcctgggcaatgtggcgaaaccctgtctctacaaaatatacaaaaattagccgggtgtggtggtgcaagcctgtagtcccagctattcaggaggctgaggtgggaggatcacatgagcccaggaggtggaggctgcagtgagctgtgatcgtaccactgcactccggcctggggaacagagtgaggccctgtctcaaaaggccaggagtggaagacaggccctagccaggaggtttcgcgtggctggcaggggccttatgagaaggctgttgctgggaggggcctgctgcagatggctgcggcagaccacggagcttagccttcaggatttagatctggggatgacaggctcctgtgtgcttgttgcggagccgggagcacaggcaccagaatgatcccagggctcagctccaaggctccgctgggcctgtggtggggcagtgaacgtggacaagacctgggcttcagaggaacttgatgaccaggagccgtggttaccgcctgtgccctggccttcctgctcttcaaagggtgtgttctgagctgaggcgagacccacacgaaatccgagcgggctccggagtcaccagacacctagggaagtatggaaggcccggaaggacacacacagccgggtgagccccgcagggagctgtgcagtctcaggtcgtccagtcctggggctgcaggccagttctccaagcaggtggtcctggaggcaagctggttttgaaagtaggttctgaaaataggtcagtccaggaaacaagctctggaagtaaagagattcggaaagcaggttcgttctggaaacaagttctacaaacaggtagttctgaaagcacgtgggttccagaggcaggtgctagaaggatgtgggttctgtacggaggttctggagggaggcgggttctggacggaggttctggaaggaggcgggttctggaggccggttttggaagcaggacgacaccgacagaggcgcctcggactggggccaggcctggagcctccgctccgcgggcagagagaagaaagcaggcattgtcggaggactcacacaagcacttgtccctaacaaaaccgtttttaaaaaccccattgtgaacatttttggaacaagcctcttagagggtcccgttgccggggtgacaggacgaaacggcgcgagcgggcagactcctggagtccccgcaaagggagccgaggagctaggcgcgccgagtccaggtccgccctgactctcagcttgggacgttccgtatagtttttttctccgtttcccgaacttctcccgcacgctcagcggccgccgcggcgcatgcgcagtacaacctgccagccagccgcgggcgttccggccgcggttgccaggggttaccgtcccgcgggcgggcggagctggccgtccagagcccgccttcctggaactctggttggctgatatagctgtccgtcgaagcggcattgccgcctattgggcaatggccagcttcgcacgccagacccgtgccccgcccagccgcgccgcgggccgcccccactcaggagggacagtcggggaccggcgcgggcactcaggagcccgcggcccaggtggtgcgggcggccctagcccggctgcggagcgctgcgcgagcggcgggctggctgaccccgagggacccccagcgcagcgggtgcggcgatgatcctggaggagaggccggacggcgcgggcgccggcgaggagagcccgcggctgcaggtgcgcagaactggcgcggcggcgggaggaggggcccggaatcccggccttttcctgccccccctcgaggcgcgttccgggcgcccccctcctacgtctcattcggcccggacgcaggcagggaaactgaggccagagcctgcgtccctcctcctctgagctcggtggaggtgcttccaggccactcatgtgagccgggaaatgcggacagccaaagtctggatcatcctcaccgctgaagcgggttggggggacgccctcctcgtgtcccccttctgggcggatgtggggctgggctctgtgagcgccctccccacacccgccatcgtgttcctttccggcacctgtacagcctccttccctagttcggtcctccctctgcatccgctcaggaactgcatgcccattgggtgcactggtagcagcgggcagcgaagcctcctgggtatgggaaaccgagagaggtcttcccggctggcctcttctcacttcccaaacctccttcccttctgaagtccctaacccggggtgctgactgggcaagtgggaggggtgggcagggctgtggagacctgctgagtctgtgcctgggaaggaggggacgtctgtgggccttgctctgcagcccagagcctgcttgttccctgcggaccagctcgaggctgccccagtcctcctgccaggccctgggcgcccacgcccgccacgggctttcagccgcgggctgctcctgctcctcgccccgggtgagcctttgatagcgcgcggccctcctcccctctgggacgtcagactgtgttgtccctgggctggttctactcggctttggtgtttggggttaggtctcctagaggaggaggcggtgctatcagccagggtttggcttcaggtcactgggctggtgatgctgaccgtagccctcaaggacgcccttcttgcccaccccgaggcgtgccagaggctgcagcacctcctgggcactggagggaaagaggcagcctgtgcctgccccctatgaacttgctctgtcagggcggccatgcctgcaggtggcctgggacggcacatgttgttttgggtggaatgtttgggaggctgtacaaacaagatgtcccagagggctccggaggtgacgcttttcaggctgggggctgtgcctgggctccctgtcctggccctccctgggctgccaccttggaaagttggggagaagctgtttccaggctgccgtgtctctcacagcgtccagaaatgaccccacagtcagggtactggggaggggcccgtgggaggtggcagtggggcggaggcaggccctgtgtcacacgcgcaccactcaggctgtcctgccatctggaaagtcttccccgatgcctgctgccgggctagagtgaggcctgttccacccccatcaggctggcccccaaactggccctaaagctcagagttcagtgggtcaggggtcggtcgttcatccacttagaggccacacctgggcctgaggccctgtggacaggtctgggtgacttgtatttgccccaggcgtgatgagagcaggcttccagcaagcgcttacctggtgccagggc

SEQ ID NO: 1883434 - DNA, 4001 bp, Homo sapiens
aaatttaattttaacgtagtattttaacacagttgccaggacctcattcaaaccttcattttatagatggagaaagagagctcacacaggggtgtccaagggagataatacagtcatgggttcttagtttccgcttctggttgggtcagtaaatacctcctcatctctcttttccgcttatcactagaaacagaaactaaaaaccatggcttcaggctgttaacagcctaaaacaaaacagaacaacaacagtaacaaaataaggtgggttggacaagtttggcagagagcctgcttggagaagctgtgtgaaaaaaaaaaaagactgccaccgctcctgaaagttctcggcccaagatggaatttagtcaaagaaactcttacactaataaaatttgtacatcaaattaagatcagggacagttaaaacattaataaagactgaagcatttgttcatttaaaaaattttatttaatatttacatttatttttaaaataaaaattagaggaaagcccatgaactcattttccatgaacataatataatagtactcacctatctcctctacccaacttgtgttttagatgagtccttttggatctttttccccataatggcctctctccttttgctttacagtgcaatcagggcagaataacagatatgttgagtagctaatttatatttctgaagatctccatagaactcttaagttctaagtcttcatagtctttgcaccttgccaagtttgctttcctttgggaattctgtcataaccacaaggttattccccagacatgcagtttggggaaattaacccggcagtagtaaacagactggattagaaaaggtggcagtcgtaataaggatattccaataaccggggaaagctacagaaggatcttgagttaggatgatgacagttacaatagaaaggagaccagtacaagagacggtgaaaacagaatggatacaatttagttgaagaattggctgtgggtgaaaagaagaaatcaaagatgcctgaagttgtgagtttcaggtagccctgagtttataatcctagttctgactcgtactatctttggatatactagctgctgactactaactgaacaaggtagtaaccttgtcatcttgtaacttacctaagtctgtttcctcctctataaaacaaactatcaaaataaagccgatgaaaagattgaagtaaaacataaaacccttagcacagtgcctagtatccattaagcagtagataaatgatggcggtcattattagggagtagggtaaagaacagaaggttaaaaacatgagtagcagtaaggacttttgggtggggattcggtctttctactacacattacacatacctctaagcagagaaaggggttggaggggagtttgataatgtgactaataatcctcctccccctgggggggatcttgataaaggatagccacccacatggaggcctaatataaactggattgcagaatgcacttgagctgggagcccaagcgggccaggcttcttgattcctattttatcccctttaacctaggatagctaggtctatagtgcagactcagacctaacttacactttcatttgcagctgaagtttcggaacaaagacaaagatagccagatcatattaattacacggataggcaagaaagcatgagccctgaggaggaaggaagggactgtccaggtgtacttacctcaaagatgagaaatatcaaagacaggaaaccctaggttcttgcccttcagtcgctatctccttgccattagtaaaatgcggccgatgaatgtcctcacttctgtccatctgggcaggaggtgggaagggtgacgtgcaaatggatgggaggaacccttttttcggcagcacccaccacacccagcctagtgccacgcaccgcaagcgctccataaacgcacacagcgtcgcctctaccaggatcccgggcggccttcgcgggatttctcctggcgtcggctttcagactcccgagggtgggataaatcgagagggtggcatcctttggcttttcttctcccaggcagctctgaaccatgtttatgcaacgtttaatgggctctaataaaacggctaataattttgatccgcggaagcaccgactcgctcgctaagccgaatctgcgagggtgaagctgcaactccaacgccggaaagcgcggctaccgaaaagcgcatgcgccacggggtggcacgaagctagagtaagctgaggaggtgggcggaaaccatggcaaccatgggtgatgacgacatggggagcgtctctagcgctggattatgacgctggattatgacgcaggcagtgggcgcggactctgcggttcgcttgactgacggcgcagcctccgggcctagccacagcagcaacggcagaggccagcgggcgaggtcaagatggtggctccgcgggcgggggaggcagtggagggaggaggagtcagaccttagccagccggaaacaccgaaacccagagacctcctggggagccgccgccgccgccctctcggccatcgctgcctccgccgcctgctccacctcgagggacgcgagcgggcggcggggctggccgtgagagagacaggagaggaaggagggcaggggcggagttgcccgccttagcccccgcccccggccgcggccccgggccctgccccgcgcggccctgcccggcccaccgagccctggtgtggcagcggctcatggcggccgtggggcccccgcagcagcaggtgcggatggcccatcagcaggtctgggcggcgctcgaagtggcgctccgggtgccctgcctttacatcatcgacgccatcttcaactcctacccggattccagccaaagccggttctgcatcgtgctccagatcttcctccggctctttggtaagggaacagggtaccgtacgtcccgggacggctatgcgggccgagacgttccccggggagcgggcaggcgcgcagaggccatgggtcgagtatgtgtctttgggaactacagtttcatccctcaaagggtcgtctttacgggttgggagggggaaggagatgatacttgtctgagttgacagcggagcagtccccctagcgaggattcagtgttgtacctgagtgaggtggggagaaagtaaggatgtgtgagcatgcagctctttgcccgtttgccttgggaaatgagtactggcttaccgcgtcctatgcgacagccttcgaaaaacaactctgctatcccagtctcgtcgtgtgtgaccttggacttctgccaaggcgtgggcctcagtttccctttattaccaaatgccgagtacttgtatgttgtcacttctgctgcacccgagggtccacaggatcgtgaagtgtctgcagtaaatgacatccaagcgaaggagacagggttttgaatgtcagaccttgaaaccattaccaaaaattctcatgaaagcggcgatgcttaaatcgagtcctaaaattttccatgaataaacgagaaggtattgaaagtgactgtaaaaagtgatgagacatttgccaaagagacttctgaaaatcattgtctttgtttcgtatggatggagtgttaaaagtatcttatatttcatttcttcctttccatcttcacttacatcatcagagggagatgcatttatgcgtaaaataattttttaagtaattgtaacttggcaaattttgttgatgaggtaattctggtgatcggtcttaagtaggctagtgcttttgaagtgttgctgagggcagactgatggtgaggtctttaccaagcctttctgaattacaagccatctgttgctttattccttcaaaagaggagtggcaataaaggccgaattttgttcttagcaataaatagccatattttacatttatctggtattttccttttgcaaagcattttcactggtaggtattatctaacctaaccttcaaacatcc

SEQ ID NO: 1883435 - DNA, 4001 bp, Homo sapiens
cttcaggctgttaacagcctaaaacaaaacagaacaacaacagtaacaaaataaggtgggttggacaagtttggcagagagcctgcttggagaagctgtgtgaaaaaaaaaaaagactgccaccgctcctgaaagttctcggcccaagatggaatttagtcaaagaaactcttacactaataaaatttgtacatcaaattaagatcagggacagttaaaacattaataaagactgaagcatttgttcatttaaaaaattttatttaatatttacatttatttttaaaataaaaattagaggaaagcccatgaactcattttccatgaacataatataatagtactcacctatctcctctacccaacttgtgttttagatgagtccttttggatctttttccccataatggcctctctccttttgctttacagtgcaatcagggcagaataacagatatgttgagtagctaatttatatttctgaagatctccatagaactcttaagttctaagtcttcatagtctttgcaccttgccaagtttgctttcctttgggaattctgtcataaccacaaggttattccccagacatgcagtttggggaaattaacccggcagtagtaaacagactggattagaaaaggtggcagtcgtaataaggatattccaataaccggggaaagctacagaaggatcttgagttaggatgatgacagttacaatagaaaggagaccagtacaagagacggtgaaaacagaatggatacaatttagttgaagaattggctgtgggtgaaaagaagaaatcaaagatgcctgaagttgtgagtttcaggtagccctgagtttataatcctagttctgactcgtactatctttggatatactagctgctgactactaactgaacaaggtagtaaccttgtcatcttgtaacttacctaagtctgtttcctcctctataaaacaaactatcaaaataaagccgatgaaaagattgaagtaaaacataaaacccttagcacagtgcctagtatccattaagcagtagataaatgatggcggtcattattagggagtagggtaaagaacagaaggttaaaaacatgagtagcagtaaggacttttgggtggggattcggtctttctactacacattacacatacctctaagcagagaaaggggttggaggggagtttgataatgtgactaataatcctcctccccctgggggggatcttgataaaggatagccacccacatggaggcctaatataaactggattgcagaatgcacttgagctgggagcccaagcgggccaggcttcttgattcctattttatcccctttaacctaggatagctaggtctatagtgcagactcagacctaacttacactttcatttgcagctgaagtttcggaacaaagacaaagatagccagatcatattaattacacggataggcaagaaagcatgagccctgaggaggaaggaagggactgtccaggtgtacttacctcaaagatgagaaatatcaaagacaggaaaccctaggttcttgcccttcagtcgctatctccttgccattagtaaaatgcggccgatgaatgtcctcacttctgtccatctgggcaggaggtgggaagggtgacgtgcaaatggatgggaggaacccttttttcggcagcacccaccacacccagcctagtgccacgcaccgcaagcgctccataaacgcacacagcgtcgcctctaccaggatcccgggcggccttcgcgggatttctcctggcgtcggctttcagactcccgagggtgggataaatcgagagggtggcatcctttggcttttcttctcccaggcagctctgaaccatgtttatgcaacgtttaatgggctctaataaaacggctaataattttgatccgcggaagcaccgactcgctcgctaagccgaatctgcgagggtgaagctgcaactccaacgccggaaagcgcggctaccgaaaagcgcatgcgccacggggtggcacgaagctagagtaagctgaggaggtgggcggaaaccatggcaaccatgggtgatgacgacatggggagcgtctctagcgctggattatgacgctggattatgacgcaggcagtgggcgcggactctgcggttcgcttgactgacggcgcagcctccgggcctagccacagcagcaacggcagaggccagcgggcgaggtcaagatggtggctccgcgggcgggggaggcagtggagggaggaggagtcagaccttagccagccggaaacaccgaaacccagagacctcctggggagccgccgccgccgccctctcggccatcgctgcctccgccgcctgctccacctcgagggacgcgagcgggcggcggggctggccgtgagagagacaggagaggaaggagggcaggggcggagttgcccgccttagcccccgcccccggccgcggccccgggccctgccccgcgcggccctgcccggcccaccgagccctggtgtggcagcggctcatggcggccgtggggcccccgcagcagcaggtgcggatggcccatcagcaggtctgggcggcgctcgaagtggcgctccgggtgccctgcctttacatcatcgacgccatcttcaactcctacccggattccagccaaagccggttctgcatcgtgctccagatcttcctccggctctttggtaagggaacagggtaccgtacgtcccgggacggctatgcgggccgagacgttccccggggagcgggcaggcgcgcagaggccatgggtcgagtatgtgtctttgggaactacagtttcatccctcaaagggtcgtctttacgggttgggagggggaaggagatgatacttgtctgagttgacagcggagcagtccccctagcgaggattcagtgttgtacctgagtgaggtggggagaaagtaaggatgtgtgagcatgcagctctttgcccgtttgccttgggaaatgagtactggcttaccgcgtcctatgcgacagccttcgaaaaacaactctgctatcccagtctcgtcgtgtgtgaccttggacttctgccaaggcgtgggcctcagtttccctttattaccaaatgccgagtacttgtatgttgtcacttctgctgcacccgagggtccacaggatcgtgaagtgtctgcagtaaatgacatccaagcgaaggagacagggttttgaatgtcagaccttgaaaccattaccaaaaattctcatgaaagcggcgatgcttaaatcgagtcctaaaattttccatgaataaacgagaaggtattgaaagtgactgtaaaaagtgatgagacatttgccaaagagacttctgaaaatcattgtctttgtttcgtatggatggagtgttaaaagtatcttatatttcatttcttcctttccatcttcacttacatcatcagagggagatgcatttatgcgtaaaataattttttaagtaattgtaacttggcaaattttgttgatgaggtaattctggtgatcggtcttaagtaggctagtgcttttgaagtgttgctgagggcagactgatggtgaggtctttaccaagcctttctgaattacaagccatctgttgctttattccttcaaaagaggagtggcaataaaggccgaattttgttcttagcaataaatagccatattttacatttatctggtattttccttttgcaaagcattttcactggtaggtattatctaacctaaccttcaaacatcccccagaggtgggtggtggtattgtcattttacaaaccaggaaacagggtcatagaggttaagtgttttgctcttggtaggctgccgctaagtggttgccagagcctgagcttaaaaatcttttgacattaaatatggtttactttcctccctaacagctgcaatccagatacagaatgcagtagtaatgatcatatgctagatcttaaa

SEQ ID NO: 1883436 - DNA, 4001 bp, Homo sapiens; identical to SEQ ID NO: 587830

SEQ ID NO: 1883437 - DNA, 4001 bp, Homo sapiens
tgagtaatattccaatatatatcacagtttctttatccactcattaattgatgggcatttgggctggttccatatttcctgcaagctcatttttgatatgcaaaccaaccaattccaagtccatagccccaccagatcccaaggccaggacactaatcccctgccctaattgcctgagggccagatactggacaaccacctctaaagcccagagcctgccaaaattattcaaatttttcattcctagacctgttgggctgcttacccttccctgcctattcctttccaagataaccacacacaggctgttacctgtgtttcttcttgacagaccctggtgcttcccacgggaccctgggtggtaagtgcacttcctctgcttgggaacagtttgaatggcagttgtctcctgatctgctggtctcatcatgcctaaataaatcccaggtacattttattttgttattattattatttttgagatggagtcttgctctgtcacccaggctggagtgcaatggcgcgatcttggctcactgcaacttctgcctcccgggttcaagcgattcttctgccttagcctccggagtagttggaattacaggtgcccccaccacgcccacataatgtttgtatttttagtagagatggggtttcaccatgttggtcaggctggtctcgaactcctgacctcaggtgatccacccgccttggcctcccaaagtgctgggattacaggggtgagccacctcacccagccaatcccaggtacattttaaaacagaccctgccctactgatctttctattcctaactgtgcctaatactatttcgtgcatgcaatggggtttccgtaaatatttggtgaattgattctaattgagttgtttgagccccatatgccagcaaattttattttgctttattgattttttttttatttcaccttttttattgaatttgtattaaaggaggtagtgagggggaggaagcacttaagagtcagaatccatattagactctggggagtgaaaaattaaattaaatcaataagatggggagtgggggaagagtcagagggaactttgcccacctttcaagatcaaatcaagaaatcagggaaagcaaagacttaggagaggagaaagacattctctcaatccatcctccttccccagggcagagaattaaacaacgttactgagtgagcctctgagcagaaggctctcccatctatgcacagacttcactcctcctccccaggccttcctggagaatgtccaaggctggccttagccaacagaaatagaggggtcaagggggtccaggagtacggaagggtcagcagggaccctcaatactgattctcctctggctggaggtgggcgggaagcagacatagctcaaatactgagcagccaaaaaaagaagaagatggcgagaaacaggaagagggaatcctgtcagctggaggccgggtgaccctgtcccagatccacacctgtaccccggcggaaaggctcatgggcattgaagacgatggtgaaaaagccaaagggaaaagcaccaacaccaaatgagaagtggaagcccccggtatcaccaaatggctggaatccccctctgctctctggagctggtctctggccctgggggcggggtggagttttcaatctgggatcctggggcttctggctccctcgcccataaagcgggacaaccttctctctgctgatcccagctttacatactggacactcttgccgttctggccgtgccagccactgatgaagacatggccaacagtacaggtggccacacacactgaccacagcttcccgagcagtctccaaacatatattacattcgaaggtcgcgcccgccccgccccgctcgcgatttggcccctcggggcccccgtcctcctcctccgctgctgccatggccggttttgtttcgccccacgtacccttcagtccccccaaatacacatacacacgccccaacctgctttattattaccaagacgctcccactccttctcccaacagatttccatggtgcagcatcttccacaatgctttcttcacaccttgccctagagcagtaacaagctcaagaatttgagtgcccatagcatttttctccctggtctgtgtcactccaaaaagcctcattctgtgaaatatatggtggagctggcttcttggtagcctggcagcccttactcagccttgcttccttggagaaagtttcctgatgtctgacacttgcaacctgaggggagggatattgagattgtctgaggatggatgccaacaaagacctctttgtgctgcagcccatgtagttctgtgtctggctttggagtgacgagggctgggacctgttctcacctgggcatgtcactgctgcaggaagacggctgtctgagcttgggtcccaagcgccggatgaagggcacagcctagctggtggaggcagcagcctgcatgtgacacttttacaaatcaggttcagagaaactcattataactggttagatggaggagtctgaactgttgaagtgtgagcttgcaatggtatgatttattttccccaattgctgctttcatttatacagtgtaggccctctgtcccgctgcttcacatcccctaatgcttccttggatgggtgccatgcctcccctgtcacttttggacattcacacagtctcattccagcagttaaggcttgggcctgttcacatttccaaacttcagtcttaagcacaatgcaacactctgtcctccctcctcctgggctggtgagagcattggctcccagcaacccggagaacaggaggatggtgtagtctgcctctgcaaccctccctccttttctctctcttcgatggggctagagggcaggaaggaggggtagaggcagagctttccctacctgaccagtccctgccagtgtggggagacttccgggcctggctttcttgggggcagtgttcagcttcacctcggtttcctccaaaataaggaaccccctccagggtgggcggcagtctccctttgggtgcttgtcccctctggtttaggtgtcctactacccagctctgtggctgtcctggaactcctggttctttttttttttttttttcgagacggtggtctcactctgttgtaccggctggagtgtactggcacaatcatagctcactccagcccctcttgggctcaagtgatcctcccacttcagcctcctgagtatgtgcaccaccacacggtagagaagaggttgcccacgctgctattgaactcctggcatcaagtgatcctcctgcctcggcctcccaaagtgctgaaattgcaggtgtgagccaccacgcccagccaccacaggcttcttcctgcacaactgcaggaatccctgaggtcctctttatagagaactggagcagggtgggagtggccccatcttctttctaagtggtctatgctacagtcccttcagatccaccggccactccagtgagcctctcactttcagaaacctttagttcagaaacaggcatcagtatgtgttatgggatgtgttccccaaaaagatatgtggaagtcctaactctcagtaccttatgccttaccttatttggaactgggttgttgcagatataatgagttcagatgaggtcatcctggagtagggtggggccttaatccaacatgactgttgtccttgtaaaaaaggagaagagacaaagagacagagtcacacagggacaaaatggctgtgtgatgatggaggcagaggttggaatattgcaactgcaagccaaggaatgccgaaccacattcctgcaaaccatgaggagctaggaagaggcaaggaaggattcctataggttccagagggaacatggctccaccacaccttgattttagactttcagcctccagaactatgtgacaaggaatctctgctgtttaagtcacctgtgtgtgacact

SEQ ID NO: 1883438 - DNA, 4001 bp, Homo sapiens
aaaaaaaaagcaaatcggttaaaaggctgaaccatacaagtactggatataaacaaactcatcagtcatttccatctgtaacttctatcaaggagggttatagctggtcaaagagttattttatgaagttgtgtcaaaagcaagaaggacatccctgatttctcaaagattccatgggaacttgatgacctgtgctcaataatgttttttttctgtatcctttcacctgaaaaaagcatactgtatagtaggaaaggaaaagagaaaaagggggaaagattcaagatagctactaataaattactaatagttaccatttattgatagcctaagatgaacccagtgtaataagcatttcacgtgccttgcaaaatcccatgagagagatattatcatccccatcatacaaatgaagaaggaggttcagagaggttaggtcatttctctaggggacacacagctaagagctaagattccaaccaaggtctacccagtgccaaatccagtgctttttttgccttattctcctccatccaaaaggaagattctagaaaaaatgccatctatccttacaaagaattctaggcctttaaaactataattagctgatgcttcagaagtcattaattattagtaatatatgtagaaaaaaattcggagtgttttttttaatttgttccaataatgtgatgtatttaactctttaaaacagcaatggatgatggctgggcatggtggctcatgcctgtaatcccagcactttggaaggccaaggcgggaggatcacttgaggtcaggagttcgagaccagcctggctaacatggtgaaaccccatctctactcaaaatacaaaaaattagctgggcatggtggcaggcacctgtaatcccagctacacaggagactgaggcaggagaattgcttcaacgcgggaggcggaggttgcagtgagccaagatcgcgccactacactccagcctaggcaacagagagacagtccatcttaaaaacaaaacaaaacaaaacaaacaaacaacaaaaaaaacccagcaatggatataaagacacattgtcaaaaaacttgccatttcggaacaaagcatgattgtgctccctaattgtgagtttagtgcacgttgtgtagccatcctcctacatcccctgacccccttgctaaactgccaaactctccttcctctagggtgctcagaggtaaaatgtgctccataggtaaagtatatgctcaactgccattgtaataaagattaacaagcaactagtacttgctaagctaagcccttcatgtgcgatgcctaacctcaccctcacaggatccctgagacatagacattacgggattccttttacagacgatgaagcttaatgttggagaggatgaagcattagcaaagcatacagctagtcagtgagttcctactcatactgtgaaacttcggaatctctgttcttaacctccagcctgtcatcactcttctcttcctgttcatccttctcgtgacttagcacccctcctctgtaaaatacctctgtgtcaagtacctgacacagatgagagaccagtgctccgggtaacggagtctaaacaccacctttgactccagagtcttttgggggagatgaaattgttcaatactccccagcaaaaggcaactgaatttattaactctattaaatacaatttctaagtgagattgtctattcacttgttgtctatcacattccaaatatgttgggtttttttgttgttgtttttttttttttcaaactaaacttgtttcctgcacgatttgtctcaccagtcatcatccacaggactcagggaagctataggaatatgcaggcgcagacaggagacccagcttcatctccagcattgtggaaaggggctgtactgtacgtcatggaccaaacgtctatgctccccaacaccacttccacagagcctggggagagtgacctcccagactatccatgttggaattttatttattcttgaaagctcttgcaaggtttgtgttctaaacttcacacttattactcagcgtgtctcccttttattactagagatttcccaaagtggataaatgcagtcagcagtcaaattcctggagactggtcggctctgactggaaggaagtgacataaaatggtgagaccaggcttcgtaatcagacagtcctgggtttgcctcttgactctgccacttgcattttatgctgtgtgaacttaagttacttacttaacctttctgagttggtttcctcagtatccatgttaccaatcccattttctgtctcttgatgtttgcactgaatattttatgggcattgattgccaaatttggtgcctgcctccctagtctccatcaggctgctggagtgcagtagcgcgatctcggctcactgcaacctccgcttcccaggttcgagtgattctcctgcctcagcctcccatgtagctgggattacaggcgcacgccatcatgcctggctgatttttgtatttttagtagagacagcgtttcaccatgttggccaagctggtctcaaactcctgacctcaagtgatctgactgccttggcctcccaaagtgctgggattataggcatgtgccaccacccctcaccctaaagtatattttgaatctgtatcctctcttcttcagaactactaccataggtcataccatcatcattcttttcctggacaccaaaatgttctcaaaattagtttgccccattgctttcttctccccttcaatctcttctccatccatcagccagagtgatctttttaaaaagaaaagggattgtgtcattccctcgtcaaaatcatgcaatggctcctaactcaataatttcaaactcttcttcacacccgttaggattactattacagaaaaacaaaaatcaggaaaaatcataagtgctggcaagggtgtgatgcaactggaacccctgtacattgctggtgagagtgtaaaatgtgcagctgctatggaaaacagcgtggcgactctaaaaaaataaaatgtagaattaccatatgatccagaaattccatttctgattatatacccaaaagaattgaaagcagcaactcaaacaggtatttgtacaccggtgtttgtaacagcattgttcataataaccaaaatatgggaataatccaaaagtccatcaataggtgaatggataaacaaaacatggcatatgcatataatgggatatcattcaaccttaaaaaggaatgaaattctgatgcattctacaacatggatgaacgctgaggacatagtgctgagcgaaatcagccagtcaaaaaagacagatactttacaatcctacccacacggggtacctcgagtactcaaattcatagagacagaaagtagaattgtggttgccacgggctgcgaggagagggaaatgggagttggtgtttaatgggtacagagagtcagcttgggaagatgaaagagttctagagatggaaggtggtgatgcttgcacacaatgtgaatatacttaatgccactgaacagtacacttaaaaatagtccagatggcaaattttgtcttatgtgtatttaccacagtaaaaataatatccaaaacttttaccatgatctaagaggccataggtgatctagtccttgcctatctctcgacctgccctctcattcattcccaccctggctgcactctctgggctctggccgtttgtcccttctgttcaccgtcagactccctcctaccttggaatatcggccattccctccgctccaccccagtgggctgcttctcctccaccggcctcaataaacagctccacagagaagccttccctcacagttcagtcttaagcccgctatttttcctgtcatattttacttcttcctaatgtgtcacagcagagttcatattcacacttagtagcttaatgaaagctgcctcgttctttaagtaaaagccctgat

SEQ ID NO: 1883439 - DNA, 4001 bp, Homo sapiens
tgggcgacagagtgagaccctgtctctctctctctgtcacacacacacacacgttaaatttgttggattatatatttcgggggttgagcacttttcgttataaaatatttatgattgtgggaacaagttaataaagacatgaaagttatttaaatgtcccagaactttaagaacaaaaagcattcttagtttaaaaataagttttactttaaaggtaacagtacacacataaattgttgttaaaatcgacagtaacaaagagaagtaacaatactaatagcctgtcacaaactgattcttaataacctatataaacaaacattaagcccgggcgccgggtggctcatgcctgttatcccagcactttgggaagccgaggcaggcagatcacttgaggccaggagttccagaccagcctgaccaacatggtgaagcccagtctctaccaaaaacacaaaaaattagccgggtatattggcacgcacctgtaatcccagctacttgggagactgaggcaggagaatccttgaacccaggaagcagaggtcgcagtgaggcgagaccatgccattgtgacaggagagaaactctgtctcaaaaaaaaattatatgtttacaacaggtgcatttctcctcttgctttctgaggacgccctgctatgtagctgagtagtcactaataaactatcttaacttcactatactctgtgacttgccaaaaggtctttcccatgtgaaatccaaaaacctgttcttggggtctaggacaagacccattttataatgacaaaactatacaaattctagagggaaacatagaaagaaagctatgtgaccttgcgtttggccatgagttttaacacgacactatcagaggcatttgaacccctcctctatatgaactccagggtggtttatgttccattggctaagagaaagttttcttcaaaaatgtgacatgatttgaggtcaaacattaatatcaagtaaactcaaaagattgagaagctagcattagttctgggaaaaccagaagtgtgccttttttggaaataatcattggtagcacaaacttaagaatctccaaaggaaataaaaatgagttattaacttacagttttcaccaattaagatataaatgaagctaacgaaatccggaaatacaatttcactgtttttaatgttcattaaaaaaaaatccttatcaaatagccccagtaagtcaccaattaagtctttactacttaaaagcaaaatccacctatgtcctgaacagtatccactttacgagcctcattatatgtacgagataaaattcagaaataaataaatatacatgtatacgtatacaaatatatttcaaattaaaaaatacttttagatagtggtatgtattacatttagaaattaataacgaagtaaattatgggatgtcatccacgcctgtcccaaaggtaccgaatttataaatcatctcaggtgcggagcaggacaggttgaaaataggaatgacatgaacccgcgcggaacagctgccggcgcggtgtccagggcggcaccccgcccggtcccggcccctccagccctgggcccgacccctactacgcctctgcctcgacgcgaacgcggagcccgagcgcgcgtcacgccgtgtggggccgaagaggctgctacccagaggcggagtgcgggctcgcgagggtccccacccgactctcgctcccgccagcacctacggactcgcgtccccgccgcgcgccgactcgggagcagcaccgcccccggcacaggagcctcacgcgcctcttacctaacaggaagttgggtggaagcagcgcggacccacggcacaccgaacgcactccaacagaacccgacgcagacacgcgctttcaaccggcggagacactggcagggccagaaacgcgcgcagcgggggcgggaggtcggtaagctccccgcccctgcccgagaccccgccccggcccggccccgcctttttctctgcctcccctccctgcacgtacgggccccgcccctcgcgcgacgttttttgttgacccggaaacggattctccggagccgaggtccgctcgggtgagtgccctccgctttttgtggccaaacccagccacgcagttcccttcctgcggcgtcctccacacccggggtctgctggtctccgcggatgtcacaggctcggcaaccgccctcctgtcggcggggagtcccgcgacgcccggaaatgctccgaagcctgtcgcccagctgccagatctgcgtctgtgtccggttccgtcactgaggtcgcccctgtccggcccttccaccctagttctcttcaccgtccgcccatcctatcgcgcgcggcctcaggtcccgattcggcatgtggcttgtcttccatcgtccccaccctcgcccctcttggcccctcagggcagccctgggattcggcagacgccagtcctccctgagatgcttccccatccttccctccgccaggccctacgtctccgcaaaccccacgcttcggggtggccgcctcagacaggaccctgagtccgagactggggtaggggacctgcccgatcctgtaacaaccctcgtgcttctgcacaatcgcctcccactagcggtgactgttgggtgtttaccttcccggtgtcccactgagaagcgggctcttccttggcaggggcttcttcattgcctcgctgtggatgtcgaggtggggcaggagagtgaggagaaaacagaggagggaggtagagccaacgagcgagaaaaggggagggaagtttagatgggaagtggatgggtctgaggaatttgaacaaacaccgacaatgaaggagagtgacctgagcaagtagtagtggggtaaatggaaatagacaaaatgggaatcagcagagatatggaggacagaatacaatgaggaggccttgaccgtcagtagcagagagggcagcagaagcctaattcccaaattctttagatggttttctgatttccaaattagtttcccttttaaatttattgtgtcaggttcagcttatgaggcctcaatacttttcagtcttaattgtatattgaaaatactttttgtttactaaatgctttttacattaattcagtgtgcacttcgtaaggataatgatgatttgagttagtttagtattcaacagcttcctctattcctttatatgatctctgtatttaatggctgtggcataaagtttccaactaagtttaagtatcaagttttctttgtgctgttttctgcaaatattgaaggatgacctggattgtcctagaactttgttccaacagattacatgtgttcataatgaatagactgctcaaagatatttccaaagctcaccttttatgtttttcagttccaataattacatctttttaaggtttatattttttgatgacttaatgtgatgttctggagaagacaaatgcttttaatcaatatgattaaaaccgtgaaagacaaatcgctgttacttaagagtgtgacatatgatctgaaatctttagggggcagggatgttaagggaaaactgccactatcgtattaaggtcatgccattcctgtgaagctggtgcttgttactctctactggcttctgttcacctttccaccggccccaagacacacacatagtgacacaaggcagtggacagggaaagagcaagactttataaagtaagcacacaacaaaggtatctttctaatgaggaggaggtgttggttctgggaaggaagcttgggatttgggtattcaggatccagaagtgagagagcctgggaagttcaggaaccagagaaagaaaaagccttgcccattctcacccatgacactgtgctcagcaggtactagcagacttcaggctctgtgactaaaaggggtcagaccagttgatatacccacagctgccatgtaaggatgtgtgtggacttcactagggaagaacggtgttat

SEQ ID NO: 1883440 - DNA, 4001 bp, Homo sapiens
cccagtattccataaggtctcagttatctttgcacctagtgtctgccacatggtagccattcaattaaatgtttgtcaagtgaatgaatgaatgagaaaccaagccaagcccatagcagtcatatcaatacactcaactctctcctatggcaaatcccaaaggtttaaggctcaaggcagttagctaatatggtctttgacctagccttggctacatgggatgactgatgttaaagccttgatgctgaatgttaaagtaggttcaaggggaaaaaaaaaacagcaaattctaaaatgcttctggatgagaaaggctagcacaatgctgaaactaaactgagtctatttgctaattgctattaagttaatttcattggttaattctccagcataaccccctctaggataaacctggcccccagtgaaaggaagataaaccctgtaaaccacgcaatcaacagtgcctctgatactcaaatgtacatcctagtcacctacagatcttattaaaataaaggttctgataaattacatctagagtgaggcctgacgttctgcatttccaacaagctcccaggggatattatgctgctggtatgcagaccacactttaatgagtatcaagagcttggacgacattgcagagaatagatctacagacttaaaaccagagttaagatatctcttgttcttatattccctaactgcataactttagataagtcatttcacctctctgagccctccttgtttcatctgtgaaaataatatagttaatacaataattaataacatagttaatactaatagctaacacatactgagttcttaccatgtagcagtaactaatgttttatgtttgtcaatttataaataaggcttagatcaaacatcctctccaagtaatggtgacctgatacctgattgtaggccgtttgactcatacttaacaccatgtagcacttacctcccagagcctatgaaaatgaaataataatcggtatttggctaatttgtactgagtactcatacgctccaggccctcgtctaaccctcccttggacgatattaactcatttatcttataaccaccctaggaagtattattatcattatctcgcaggccttaaaacggcctcaacaagtaaaattgctgaaggaccaacagtggcacagtcaggattggaacccaggcagtgtaactgcagagcgtggcttagtttcagcactgtactagattaattgaactagactaggttctgtaactgcagaatcccggatctccgagtcagctagctcactagggtcggtgcacacccgcgcccactcggggtggcttcattgccagagccactgactcccaaaacaaaacgaatcttctacaattagctctatgtgtatctttgggatgttatctttctcgggccacaactaggaaccctgaaagccgactatgactccagtgaaactatttggccctaagaagggtgattgtctaaacatcttcacaacggatttacactgaaattgtaacacgcacttgattggaaccccacaccacaggcagtcccaggaatttgtacccgccccggtcccggaccgcgcccctggacaaaccctccggcccgcccctccggattgagccccaagactgtccccggaccaccatcctaagaccactccctgaactgccccccccaagaccgccccctagatcgccccccgggaccgccctctctagaccgcctgcgagactgtccccggaccgccccctggaccaccccctaggcggccccccgagctgtccctggaccgccctctagaccgcctcccgccccctgcatcctgggaatcgtagtcccaatcctgctctggaactagcagtgcggcctgctcgggccagctccgcctctatctggcgccagcctaaaggtcccgcttctaatcccatcatctctccataccgccctctgccggcctttcctctggtcgcccggattgcgagccgcttccggacgctccggaagcgaacctttcttttccggattgggcatcccggcatctgcacgtggttatgctgccggagtttgggccgccactgtaggaaaagtaacttcagctgcagccccaaagcgagtgagccgagccggagccatggagggccagagcgtggaggagctgctcgcaaaggcagagcaggacgaggcagagaagttgcaacgcatcacggtgcacaaggagctggagctgcagtttgacctgggcaacctgctggcgtcggaccggaaccccccgaccgggctgcggtgcgccggacccacgccggaggccgagctacaggccctggcgcgggacaacacgcaactgctcatcaaccagctgtggcagctgcccacggagcgcgtggaagaggcgatagtggcgcggctgccggagcccaccacacgcctgccgcgagagaagcctctgccccgaccgcggccacttacacgctggcagcagttcgcgcgcctcaagggcatccgtcccaagaagaagaccaacctggtgtgggacgaggtgagtggccagtggcggcggcgctggggctaccagcgcgcccgggacgacaccaaagaatggctgattgaggtgcccggcaatgccgaccccttggaggaccagttcgccaagcggattcaggccaagaaggaaagggtggccaagaacgagctgaaccggctgcgtaacctggcccgcgcgcacaagatgcagctgcccagcgcggccggcttgcaccctaccggacaccagagtaaggaggagctgggccgcgccatgcaagtggccaaggtctccaccgcctctgtggggcgctttcaggagcgcctccccaaggagaaggtgccccggggctccggcaagaaaaggaagtttcaaccccttttcggggactttgcagccgagaaaaagaaccagttggagctgcttcgtgtcatgaacagcaagaagcctcagctggatgtgactagggccaccaataagcagatgagggaggaggaccaggaggaggccgccaagaggaggaaaatgagccagaagggcaagagaaagggaggccggcaggggcctgggggcaagaggaaagggggcccgcccagccagggagggaagaggaaagggggcttgggaggcaagatgaattctgggccgcctggcttgggtggcaagagaaaaggaggacagcgcccaggaggaaagaggaggaagtaatagtttctaactgtcggacccgtctgtaaaccaaggactatgaatactaaatgttaagttctaggcaattatacggggactcagaaggacctggccgctgccttcattgagtttaaagggacaggattgcccttccgtcaagaaagtatgtaagtgttggactgcacaaattaatgtttttcccacaaccgagactttggagattaagaacttatttgaggatttaagaattagggaaataatttggtggaaaccgggaatgagttctattcttaaacagcctttttttttctttttaatgttggatatacggcgaggtagagttggccatatttcagagacttagattgacgtatatgtttctgcattatttttacaacaagtttgtgtatcagagcgggagtgcgggggagggaaagaaaacaaacagtttcagaattgaataggcaagtgactgttttaaagattaagtaataaagatgtcttatctagtgtgacttttaactttctgactactgggtagaaattgtacttgaagccggttacctggatacctggtacagattatttttgtttactttctgaaaaacacaaagcaggccgtgcgcagtggctcactcctgtagagtcccagtactttgggaggccggggcgggcggatcacctgaggtcaggagttcgcgaccagcctggccaacacagtgaaaccccatctctactaaaaataaaaaaattagccagacacggtg

SEQ ID NO: 1883441 - DNA, 4001 bp, Homo sapiens
gatctcctgtttactagacaggtactttaaccaagtcactagaaaataaactctccatagtccacatgtacttccttcctaagttcttgtttttgtaaagtctggcttcactggtgtaatcacccatcacgcaagaaataagacaaatttatacttcttacagggaacaagaaattgttttcgagaacagtgtggactagcaacaaagaggagtgtccctgtcttggggacacaggagtggtgaagacgagagatcataatcagtgtcacctgatgggtgacatagaacggacacttaaggagtaggtcaacatatccttggtctcaagctcaagatgaactttatctcggcttttgttttgttctttggcatctgaagtcttgactatcaagcataacgatgcaaaaaaaaaaaaaaaaaaaaaaaaaagattctcaccctactggtacatttgcacagaaaagaaaacctagaaaaatcttgattgtaagagagagagaggatttcatttttgttaataaagttaggaaagctggaagtggctggctgtggatctctgaacctgagatagcccaaaggcaagagtttcccgagtttatgggtgctgagtataggagctgggttgttgctacttcaggttgttaagacagtcgttataaggggagcaagagtcagattagttcaatttctttctcctggggcagggaggagagggagcagcaagccagcctcgtggccttctcgtctctagcctacaaggaataggctgatttccccttggcaaggcgcctgaagcagctggcaggcaagccctcctcttcctacttcagtacgccctctgacctgactgcactcagaaaccaaaattctgcaggtgaatgtaggctcccatttcgtcccacaatcatttcatcattcaggcacagcttgacctctaatgtgacatcacaaacccttccggtccacagtttttttttcttcttcagaaactacctaaacaaggaagtttgtgttccaaggtaagataacctgaaatgaaaaactcaggatccctcacgaacagcctgaccctgctttcaaccaggaagttcaagggaggcaggactttacggtcaaaactgcaaagccgaagctcaagactgtaagaagaaagtgatcttcaaagaaaaggattcacccaaatcgaagaggttgttgcacttcttttccctggctgattacatttcatgtctgtaaactttgctaagcccggggcgctggctgtataagcagagacaggtgtagggacacctctaccctctgggtacatctgcggccgccgctgctgggtgcataggacgaagggccctcgacccaatcccagtccaagcttccggatgacgcacctgggctggggacctctcccacgtgaggggggccaaccaagcatccccagccccggggccacccagcctgctccggagggagggggcagggaaaaagggcatctcggggccaaaacctcatgccggatcctccggctttccccccatttccaggatatcgtttcgcatcagggacactcgtctccacacctcctacctcaaagtcctacgcacctacccttcacgtctctccaaagcaactgaattaaagcgcctactggccttggcggcgcaggtgagtgccaagaggtggaggaggaaggggcccgctctccgccaccccctttcctcgcctccccacgatcgccaagcttcatcggggatgtgtgccttggggtgcgcgggttaagagggagcttaaaaatgccccaagcgtcccttaccttccacagccattctctcagagcttccctaacgcatgcataattttcttggccgaggtactcctcctgccccgcgctccccccttcctctcgctttcgcctaaatattctgcgcttatctgctccaggaccaacctgccgcggtcacgcaaagcgaggcagccggctcccggctcggcgcgcgcagggcgtcctgggaagtgtagttccctcccttcgctcggactggggagagcaccccgactcctccgcggagtgccgcctggccccgacacttggagagcaactccagcttcagctggccaggccgagcaatctctcctggggaagttgtgaggggaccagggatgcctggttgtggcggggcggggggggagggggggggggttcccgggaagcggtctggactacatctcccaggaggccgtgcgctgagataggttcgctgctaagagtagggacccgtgattgagcccttccctgtccattacaaggggtttggcacctagcaggtgtggtgaggtgggcaggtgacggtcagctgtgtgatgagctcctgcgagctcgtccgtgggcctctgccgccggtaccgccccgccccctggcctcctgaaccaccatttagtagggagagcaggaccactgtcctcctgtgtggttctccacctgggccagagaacgctgcccagggtgaggttgaaacttgttccttcgcaccctgagatgtatgggttttgtgggggaattccgacggttgatacagttgtcttatcctacagggtggttcaggtggctaaatacttggcatgggggtgtaggggaggaggagtggcttaaaccccaataggcaacgtccccaaggggttgttaggaacaaagtctgggagccaggattgcaccggaggaggtcagatgaaagcctgtctggcttccaggataggaggctttcaatttgcctagacttggagcctgttgacagcctgtgatagggcctaataattaacagtgcctgagaatcaggttccttcaacttctgaacctatgtcctagctgtaggtgctggggatgctataagcagacatgataatgggaatcacgtggatagcaatacaattcgacagctcgtaaaaattaagtttctaaacattttttcctgcgtgtgaaaatacggatacagttgtggctggaaggggtaagggaatagcctcgggaataaatctggctcaagactggattgacttttaaaggccttcagtttacaaatgtatttggtaccacatccacccagtcactcatatataatgttaatctctgtaaaatgaggaagtacaaaaatcggattcttcccatgatgactacttagacatttttgtgtgtcttggtcatcagcaaaaaaaaaaaaatgtttttcaaaacaatttcgtttctcagtgtatacatgcacacctgttgttctggtcactaattacatgcttagttcccctactgggtaatatataataataatatgtgtataggtactttaaaaaatacctgcgtgtaaccattaaatgctcttgttgatactttaattctgagtccatggagctgtgtacaagtcaaacctaagcctctcttttaggtacagtagagagagacccattcagtgagacataatttccatgggaaaaagaattttccgacctaatacacagccaagcattctaaactctggaaagaactgaaatccaggtgcttcactactttatgtatataaaatcaccaaagtgttaagtattttctgagattgaatgaatgtgaaagaaagccataggacaggtagtatcaatggttctcaaccttggctgtgcatcagccttctacaaatatatattcctaagcttttatcttagtctcacagaatcagagcttatgggggtttgggtagaggcactcaggttttaaaaacccacaggtgattccagtcttcattgagggtgaaaaccattggtctggttccaagcttttaaatatctgggtgatataaaaatataaaagtcattgaaatctgtggttaattttaaaacttcatcttagctcatctttaatatttttcccagtgatgtgcattctagacgagttttatttttagtataaataaaatgtgaaggagatgttagtttctaccatatgaaatagccaatgtttgacca

SEQ ID NO: 1883442 - DNA, 4001 bp, Homo sapiens
cttaccccttccagccacaactgtatccgtattttcacacgcaggaaaaaatgtttagaaacttaatttttacgagctgtcgaattgtattgctatccacgtgattcccattatcatgtctgcttatagcatccccagcacctacagctaggacataggttcagaagttgaaggaacctgattctcaggcactgttaattattaggccctatcacaggctgtcaacaggctccaagtctaggcaaattgaaagcctcctatcctggaagccagacaggctttcatctgacctcctccggtgcaatcctggctcccagactttgttcctaacaaccccttggggacgttgcctattggggtttaagccactcctcctcccctacacccccatgccaagtatttagccacctgaaccaccctgtaggataagacaactgtatcaaccgtcggaattcccccacaaaacccatacatctcagggtgcgaaggaacaagtttcaacctcaccctgggcagcgttctctggcccaggtggagaaccacacaggaggacagtggtcctgctctccctactaaatggtggttcaggaggccagggggcggggcggtaccggcggcagaggcccacggacgagctcgcaggagctcatcacacagctgaccgtcacctgcccacctcaccacacctgctaggtgccaaaccccttgtaatggacagggaagggctcaatcacgggtccctactcttagcagcgaacctatctcagcgcacggcctcctgggagatgtagtccagaccgcttcccgggaaccccccccccctccccccccgccccgccacaaccaggcatccctggtcccctcacaacttccccaggagagattgctcggcctggccagctgaagctggagttgctctccaagtgtcggggccaggcggcactccgcggaggagtcggggtgctctccccagtccgagcgaagggagggaactacacttcccaggacgccctgcgcgcgccgagccgggagccggctgcctcgctttgcgtgaccgcggcaggttggtcctggagcagataagcgcagaatatttaggcgaaagcgagaggaaggggggagcgcggggcaggaggagtacctcggccaagaaaattatgcatgcgttagggaagctctgagagaatggctgtggaaggtaagggacgcttggggcatttttaagctccctcttaacccgcgcaccccaaggcacacatccccgatgaagcttggcgatcgtggggaggcgaggaaagggggtggcggagagcgggccccttcctcctccacctcttggcactcacctgcgccgccaaggccagtaggcgctttaattcagttgctttggagagacgtgaagggtaggtgcgtaggactttgaggtaggaggtgtggagacgagtgtccctgatgcgaaacgatatcctggaaatggggggaaagccggaggatccggcatgaggttttggccccgagatgccctttttccctgccccctccctccggagcaggctgggtggccccggggctggggatgcttggttggcccccctcacgtgggagaggtccccagcccaggtgcgtcatccggaagcttggactgggattgggtcgagggcccttcgtcctatgcacccagcagcggcggccgcagatgtacccagagggtagaggtgtccctacacctgtctctgcttatacagccagcgccccgggcttagcaaagtttacagacatgaaatgtaatcagccagggaaaagaagtgcaacaacctcttcgatttgggtgaatccttttctttgaagatcactttcttcttacagtcttgagcttcggctttgcagttttgaccgtaaagtcctgcctcccttgaacttcctggttgaaagcagggtcaggctgttcgtgagggatcctgagtttttcatttcaggttatcttaccttggaacacaaacttccttgtttaggtagtttctgaagaagaaaaaaaaactgtggaccggaagggtttgtgatgtcacattagaggtcaagctgtgcctgaatgatgaaatgattgtgggacgaaatgggagcctacattcacctgcagaattttggtttctgagtgcagtcaggtcagagggcgtactgaagtaggaagaggagggcttgcctgccagctgcttcaggcgccttgccaaggggaaatcagcctattccttgtaggctagagacgagaaggccacgaggctggcttgctgctccctctcctccctgccccaggagaaagaaattgaactaatctgactcttgctccccttataacgactgtcttaacaacctgaagtagcaacaacccagctcctatactcagcacccataaactcgggaaactcttgcctttgggctatctcaggttcagagatccacagccagccacttccagctttcctaactttattaacaaaaatgaaatcctctctctctcttacaatcaagatttttctaggttttcttttctgtgcaaatgtaccagtagggtgagaatcttttttttttttttttttttttttttgcatcgttatgcttgatagtcaagacttcagatgccaaagaacaaaacaaaagccgagataaagttcatcttgagcttgagaccaaggatatgttgacctactccttaagtgtccgttctatgtcacccatcaggtgacactgattatgatctctcgtcttcaccactcctgtgtccccaagacagggacactcctctttgttgctagtccacactgttctcgaaaacaatttcttgttccctgtaagaagtataaatttgtcttatttcttgcgtgatgggtgattacaccagtgaagccagactttacaaaaacaagaacttaggaaggaagtacatgtggactatggagagtttattttctagtgacttggttaaagtacctgtctagtaaacaggagatcctgagtttgaatcacaatgaggtctcaaagaatgaaggaagtattttaaactttaacttcaaatatgattcctatctttggtctttgcaaagatatcagcctggaccagtcccttcctggttactcctacttggtctttcaagcctttgggaaaatgtcacttcctctgggaaactgtcccagccctcctttttcttctgccttctcagcactctttccagtctatgggaagtgcctcctgctcacatttatcttaatacttatcatacttaatctgcctcttactagactctaacccccttgggggttagacttggactttatattcctagctcatagcacagtactttgcccataataggtactcaatgctcatgaattgcatggcaaatatattcatggaggttttgtaactggttctataagggtacatggggctttcttggaagcctaaatgtgatacaataagggatttctgacagatttgaggatgggagatttttttttttttttttttgagacagagtcttgctctgtcgcccaggctagagtacagtggcgcggtctcagctcactgcaagctccgcctcccaggttcacgccattctcctgcctcagcctcccaagtagctgggactataggcacccgccaccatgcctggctaatttttttggtatttttagtagagacggagtttcaccatgttagccaggatggtctcgatctcctgacctcgtgatctgcccacctcgaagtgcccttctcttcagtcttttgtcttgatgcccaaaaaatcttttagaacagtttacctctactgctgggtgacattgtccctggacacatttgggatatgtaggaactgctgctgggggctgctgttggtattttgtgcccatggccacagataataaatgtcctgcagcgcatggccatcccgtataacgaggccaagccatggccaagtaatgatcagtttacccaacttattgag

SEQ ID NO: 1883443 - DNA, 4001 bp, Homo sapiens
ctgctggtggtccaggaccacccagttctgttgcacatgcaggtacagttcccgggtgaggcagtggcaggcagctcaccacttcagggccctcagcacagctaggagcagcttcttggcctcaagcatcttcccctcaaacacgtgggagatgcagttgcccacgacctccagctgccctgggctcttgacctgcagcctgctgcacccatccagtagggcagtcatgcggggccctgagggccctgtggtcctcctcccagccttcatggctaggggtgcaccttgcatcttggcctcagcctggtccacgatccactgcatggcgccctcatccagccaggggaagggccggggcgcccatctcaggtggctgctgtcacccggcctctgcatgttgtgcatcgccaagtctgggtacaggttcttgttcttgcagagctgctctaccagttcttggatgtgatgcaggactcattgggggtggttctcatccacccacctctgtgccacatcgtgggccaccagctcatcaaacaggtccgtggggcagtacgggaccccacactccaacacaaagagagcaaaggccatgccctccagcacattcatcaggaaatcgtcctccaccagcccacactggcccaggaaggctgccttatggaagcggatgacaggctccgggtgaatgcacacgacgtgcaggcaccagagatagccctgcagcagctgatggaagagccgcagctctttgtcctgcatattcaaggaggagggggacgtcatgggtggagggaaggcgaggtcaaccaactccagctccgggtccaggaccattcttagaacactgtgcgtctgactctgcagtggctctagcaagggtggaatgtgcacacactcagggatggtcaccgtctctccatccagatcagctacaatcacgtctagcagctcctgggtctctgcctggaaggccgcattgaccccgattatgaagggcgtgggtgtgctgagggcctccagcagctgggccggcaggatgggcacataggtgaagctgtatctgagaggaaacagcaatgccaggaggctcctgcaggcatcggtgagctgctggtagctccgggacaggaagagaacctcgtgctccatgagggtggcacagaccaaagacagtacgttggtgatgcccagctggcggaagagcaggccacgctgcagctgctgatgggcagggagtcggccagtggagtctggatgacctgccggtcaccagcccccaaataaatcgtcctctactagcccccagccaggggcacggtgcacgtcagcaggttcccaattacgttccctgggaacacattcaggccctccacgtggacggcatagatgaggccgaggctgttcctgaacacctccgcatggtcaagtcgcgacacaggtaccagcgtctttggggcaaacatctgggcagatgggcaggctctgtgggcgacaggtgcgtaaggcctccctcatcctcctcttcctcccactcagtggcatccttagcgcgtgtcgtttcctgctcccagaaggtcaagcagcacagtagtggcgcccggagttgatgtcggtgaggacagcaacaaagaaggtcggtggattcctctcgggacacatctgccacccgctggactggcaaaacagctgggggaatgggttggcctcccagtccttctccgggaagaactgcagaatctggccctggcctttcccactcccgcgcgggtgcggcctgaatgccaccagcaggaagtagtctgtgatccgcgccatggggagggacgctgggcgggctccgcggctcggggactcgagggctgcgcgctcatggcccgggcctggccctggaccgcacacccgggacaccccgggttcgctccgcggcggccgcagcggctgcggctgcggcggcggcccgggctccagacaccatcttctcagccagctggcccgcctggctgttcttgaaaatgttatagagcttcaggtaaaggcagcaggaatctgtggccctcttcgcaaagactacctccatccttcctccccctcagtcagtaagaacagtaattttaccaacctgaagttcaacacggaattcataaactttggtgctagagggggctggctcaattgggcaataggtcaaaatactatagccttcctcgctaaaagtggaaactcagtaggaaacaaaaaaagaaagaagacttgtagcttttccagctcaagtttacaatcacagttacaagtggtagaccaataagaaattgaatagcgagatcctggatatgatacaaccacagtaggattagataagatcaccacacatttctggcctgcagataaccaatgcatttgtgcaggtgagactcaagaaagccaggtgggaaagtaaggccatggcagacttgagaatgggaggactctgaatgtgcttcctgacccacacaaagatcagtcatcaggaggtaggagctttatgggttcaaggtgcttgagaaaaatctggccaaatcttgactgatctctgagttatgcagacaaagggacaacctcaatagctacatgtcatggggaagaaagattatacagtttaaatctatggaaattacttaatcaacaacaacatcctcagaaaaattagtcagaattcagagttgccataatatattatctaaaatttccattttggggcaaaacaattactaagcatgcaaataattaggaaagtgtgatccatactcaggaaaaaaaggaatcaatagagattgactcagagtagcagctgggtgcagtggctcacacctgtaatcccagcactttggaaggccaaggcgggcggatcacctgaggtagggatttcgagaccagcctgaccaacatggagaaaccctgtctctactaaaaatacaaaattagcctggcttggtggcatgtgcttgtcatcccagctactggagaggctgaggcaggagaatcacttgaacccagcgggcagaggttgcggtgagctgaggttgcgccattgtactccagcctgggcaacaagagcgaaactctgtcttgaaaagaaaaaaaagaagaaagaaagaaaaagaaaaaaagaaattgactcagagtagacctagatgatatatgtggcaaacaaataattaatgaaacgcatgatgtctatgattccataaataatctttagagagaaatagaacccaaatattggaagtgaaaaagaaccaaatagaaattccagagttgaaaagtattttcaatatgaagattttgcttgttatatcaacagcaaatttgagatgaggggagaaagaagcagtaaactgaaatatagttcagtagaaatatctcaatctgaaaagtacagacaattttttttgaataaacatagcatcaaaggcatgtagggcaatgttaagcctaccaacatatgtgaaataagggtctcagaagtaaaaaagagaagggaaggggaaaataatttatgtgaaaaaataatagataaaatcctccaaaatttgatgaaaggctgtctacaaatattaaaagctccacaaacctcaaataggataaacatatcagaattcacacctagacacatcataatcaatgactgaaatagaaatacaaagagaaaatcttgaaaaaagaaaaaaatgactcatcagatatggaaaaaaatatgattaatagctgacttatcattataaacagtgaagaccaggaagcagtaaaatgacatattcaagtgctgaattttttttccttttcttttttttttttttgagactgagtcttgctctgtcacccagactggagtgcagtggcacgatctctgctcattgcaagttctgcctcgcaggttcacgccattctcctgcctcagcctcctgaatagctgggactacaggcgcccaccaccacgcccagctaattttttgtatttt

SEQ ID NO: 1883444 - DNA, 4001 bp, Homo sapiens
catgtaaaggaagcccattccaaggtcctatttttggagacacagagaactagggccatacctgtccccacttccccatgtctcccaatgccctggtttcagcacctgtttctcccacaggccccatttgccgctgatccctgttcattccttggcagcatcaagtatgaaccctcttagtggaaacatctctggtaactcttctctcctttagcctctacccactttctagagttgcactgaccaaggaggtagcctttaggcatgtgtggctgtttaaatatgcatttaaggttgggtgcggtggctcacagctgtaatcccagcacttaaggaggccaaggcaggtggatcacctgaggtcaggagttcgagaccagcctggtcaacatggtggaaccccatctctcctaaaaatacaaaaattagccggcacagtggcgggtgcctgtagtcccagctactcaggaggctgaggcaggagaatcgcttgaacccaggagatagaagttgcagtgagctgagattgtgccactgcactccagcctgggcaacagagtgagactctgtctcaataaataaataaataaatatgcatttcaatagattatatgatataaagttaaaagtttagtgcttaatcccattaaccacacttcaagtgctcagtagccacagatgactagaggctttcatattgggaagcacagatgaaggccatttcccccatcaaagacagctctactgggcagcattgtgtaaaccactccaggcctcaggaaagacactcctgagccatgaattaactcatctttttctgtaatttttcactctgtacttcttccttctgtaagcatgggccaccatttaccagttgcctgaccttggggaattcatttaaatactttgggcctcagtttccttatttgtaaaatgagagtgaaaatggcataatggctgcaagtactcaacaaatagtggtgattgtgattcatcccccccttaattcctctattagaatgcccagtcctgcatgcccataaaccaccactctaaaaatagcccctgtctctgcacaagctccttttgcactcatggccaaattaaatctctcttgtataattgctgtcactttcagtttgtatttaggtgggaagatttctgacagcctaataagtcttgggaacaaactgcagagggtagagggaaaaaaaatttctctgataatttggaagaaaacaagatcaggaaaagcacaacagataaaccctgcaaggattgagaccccacatctttcaatggaaaatccccaaatggtatgtttataaagaaatgcatgaacaagtgtttataggactgcatggaattttcgtactcaccaacaaaataaaatgataaagaaagaggtttacccagaaatgagtgatggcatttacaagaaaggatttttccaccatgtgatctggaatatcgaggaagggctttcccgtgactaagtcagcattgttaacgaggatggtcacgtcaccaaattctttcctgacctggtcagagggaggcaagcattggttcaattgaggcactgcattttgacatttattttctcaagttgcgatttttttttctcattttcttcatgtagtttctctgaagctagatttttttttttttttttttgagacagagtctcattctgtcgcccaggctggagtgcagtggcacaatctcggctcactgcaagctccgcctcctgggctcacaccattctcctgcctcagcctcccgagtagctggaactacaggcgcccgccaccacgcccagctaattttttgtatttttagtagagacggagtttcaccgtgttagccaggatggtctctatctcctgaccttgtgatctgcccgcctcagcctcccaaagtggtgggattacaagcgtgagcaaccgcgtccggtcgaagctagatatttttatcttgcatgtagaaattcttcagcttaaaaaaaaaaaaacagatttagccagattctggattttttgtgtggagacgacctgcagcatattttcctcacctcccatttctgttacctgactgcccgttcccgggtcactaatggcagtggagtctgagtgacactgcctgcctgcatgtctcagaacggctccctttagatggccttcaggttttcccgcagcacatcagcaggtgtctgatgcctgcttctgtgggcgtcatctcccctacttctctctgaggaggaaggcaagacatatctcatcccctcaagccgggtgagttttgcatgaacacatcctaaacatggatgcctttgatccgctgccgatggacttccatgtttctgtgctcttctatccaatggaccccgtagaatcgaattactctctgtgactgatgttgccttgagttcctcagctgtgccgctattgtgcctcctaagtcctcatcattttccttcacccttccctcctaaattgcccacctcatctgcctgcacgaaccccaatataccacaagcgctgatcagagaagagtatgctccaggaaacacctgagggactggtttcctctcttcaccgttttgactcacattattatgactttgtaggtgacattgagaaaggtgacccaatggcaaatcatgaagtatgtttaaacagcaattaagactttcctcccctgaaatggatctctcagctgctacaactatctgtttctttttttctaaacaaggagcactacctgccctgattttgttttctaattcctggtccatgcactgctagttgagcctgccagataacacgatttggagaataaggtaaatattgctgctgatgtagtaggttggaatgagctaggaaaggaatagttaatactgctgagctgatgctgggctgaggaattagactcctctactagggagagaggcagggcagaggcaaacatccacaggagactaacttttaaagaagggcatctcattggcttggtgaagcaatcagtgtgagcaagtgctcaagaccaatgaggtggtaacagggacccaagaaagaggtagaatcttcagcttaatacgttcctgaacacttaagaaaagcccagtggctgctgtcatgcagtttaagaagccttgagccttagggacaacagggacaagagaaattttatttagatcatgggatttaatttttactttatctccaagaggcagtctagggaggcatcattatcctagtatacagatgaggaaacaggctctgagaaattaacatcttgccaaaagacccatagcttttgagaagagcaacagtgattcacacccaatttaaatacacacaaaaaagctgtttccctccaaatttactactctttctagtaaaaatgattattgctgtaacaagccagtctcatgtgtgtgcacatgcgcacacacacactcacacacatacagataaatattaatcattgattggacctggacatttgaaaataaattgtgaacctacttattttaacaaaagcaatttattaatatattggttttctatgaatgttacctcactctaattttgggaagttaattaccatgcacctttagaatgctgttattgctattcacttttccacgaatttcaaggaatctggtaaagcctgtggtttgttgaacgtcttgaagcacaaccctagtatttaggtttcttggaagttgctacataattgaaataatacaaaaaacacatataaagtagttggctgagaaaaattctatttataggagtgcggaaaagaacattttaatatgaaaagataattttaggttaaagttttagtctggtttctactaagtaacaagaaaatgttgaccaagaaggaaagatttgttaggggttggcagtgggggaagaaggcaggagattacaatacttttgatcaaagaaagaggattatgaaggggtctttcgattatgcacatattg

SEQ ID NO: 1883445 - DNA, 4001 bp, Homo sapiens
acctcccaagcagccatgaaactcagctaattccatcttcttttttttttttttttgagatggagtcttgctctgtcacccaggctggagtgcagtggcaagatctcagctcactgcaacctctgcctccgggttcaagtgattctcctgcctcagcctccccaagtagctgggactacaggcacacgccaccacgcctggctaatttttgtatttttagtagagacagggtttcaccttgctgaccaggctggtctcaaactcctgacatcaggtgatcacccacctcggcctcccaaagtgctggaattacaggcgtgagccaccccacccggccactaattccatcttctaagcatctctagaaacatccttctccccaaccctatctgcaccaacccttgccactgcagaactctgtcttaagcaggaggtatctgagtctgtcactctcccactcctgtcactctcctgctgctcttgggatgatgtcttctcacacaggtcctgaccctgcctgctctgcctcttcatgcttgcctctcatccttcctgagggttaaggaagtgcaggctgaggttccagggcttcctggtggaggctgcaacttgtgctggctggggcctcagatggtgtaggagactgactccagcagccactccaagtactccaagctactccaggctccacctactccctcctggaagccttcccagacatccagcagtggggaaggtggatccaacttccccaaccaggactggggggccaaggctattccaaattgtaattgtatccattacagggcactgaccattctgtccttccacggtggcacctcggactaggactgcccaccgctgagcttcctgagggttgaggaagtgcaggctgagggttccaggccctcctggtggaggctgtagctcgtgctgggtggggcctcggatggtgtaggaaactgactccaggggccactccaaattaacctgagaagagggagagtccaggctcagggcgtccccccgccctacatcgcacgaggagcaaagaaatacaaggtaacatttatagaccatttacacggtcctaagccctgtacgcctatcatcaaatcctcacaatagccctgtaaagtaggtccaggtaggtcccagtaggtccgagcgtcacccccatttcacggacgagaaaacagaagcaaagaaacataactgcttaagggcacccaggtggcaagcggaggggcctaactttgggctccgtgccctgcccgggccaagaggactgaccgcgcgccctccgcccccactcaccgccccaggtcccgcgcccagcagctccagccggaagcgcccaggccgctcagggtccgcgctcagctgcagcctccgcagctgtgcctcggcgtctggcccggcgcccagcggcctcaccgcggcgtgcacagccaagagcactgcggcggagcccaagtccgaggccgccgccgccgccccgcccgctggcggcgccatctccggtccggccgggtcccacccctccgagcgcgcttccgtgggatcgggccgctgagccccctccgccggtcggaaacacgggccgcgaacctggggttccgggcgcgcccagagcgtcgggcctgggacggcgccgagtggtgcactctggccaagcctgccccgctggctttgcccacaaatggacacggcccgagggtctccggacaccggctgggcgaggctggcggcgtgtacgaggctggggcagggcggccgaggcgctcacgttagagctggtctttgggggcgaagggtcagggggcgaagcaccggccacaactgaaggcggacgcggcctcttcgccccaggggctcggcggacgtagatgcatccagcgtgcgactatcccagcgcctaacggcagctggacttcgctcccgggacctccaatgggctgccaccttcgcccgcagaccccagcccccgccacgcccacacgtcgcactaggttggcccgcgcctcactggttacggggtcgacccccctagggggcggagctagagaggccacggccaatgaacgccgggggtaagcgggttagtacgacgagaagagtgacagacaggctccataaccagtagacgtagaaggcagaactgagtggcgggtacggcacccgatggctattcgagctctcgatctcggagactggagcgggccattcagaggcgcggggccgggcccggcggacgcttgttgttgtccggccgggggaggcggaggtcgctcgctcgctcgctcggctcgctgactcgccggagcgctctgtggcggtcggcggcaggtcggtcgcgagagcgggctctgtggaagggggcgaggctatgtcgcggtggcagcccggatgggccggcagggccgggagtaacgggacgtcgccgcggagcttcttcccccggatacagtgcggcccgagcggaggccgcggcgccgccctccgatcttgaagagcccgcgctgcgcggagcccgcccccgcctgcgcaccggcaccgacgcggagcgacccagcccagccagacccggcccggcgcggcctgatctaacccagccaggcaggtgggtgtccgccctgcgtcccgcgccgtctgcgtacccggaaccacagcccccagcaggcctcgcgcggcgcgctgcctcctgggatttgtagttccaccgcggcttggctggtgcccgacgtggcccaggcgggcgctgcctggtgactgcagcgccccagcggggccgagggaccgccctcctaggcgtctggagaaactaggcaatttttccgggtagagtggaggaacctgtagttttcctctccccgggccagaaagtagccaaaacgaaagagcgcccgcccaggtgaccgcagggcccggagtcccaggtgtcctggttcctaaccgggatgcagcctcttaccttggctgaggagcccagccagcctgagggagactgcaggagtcacgtcccgttgcggactcaagagttacccccatggtggctggagctcttttggagtgggcgtggagatggggaatgggaatgttgagcaacaatctcagccagcagccccagggtgagcagggtccccggtggtctagtctagtcccagaactcgcgtgttctgcagggggtatggctgacctggagcctggacttaccaccctcaggtaaaacaggatctctgtcacctctcctggccgggcagagaggggagctcctgatgtgcagcctggacagaggccagactcagcttgttcctagcggctccacttagtgggtaggagggctgaaggcagggccccaaggggccagatagatacccatggtctggtctctcactccccaggcaatactagcccctctggagcacggagctccttccccaaagacatgaagctattggagaactcgagctttgaagccatcaactcacagctgactgtggagactggagatgcccacatcattggcaggtgaggcaggctgggggggctggcatctcggaggtcacactgccgcgcccttcagtggaacctgggggaagcatgcttcatggttctctctgcatcctataggattgagagctactcatgtaagatggcaggagacgacaaacacatgttcaagcagttctgccaggagggccagccccacgtgctggaggcactttctccaccccagacttcaggactgagccccagcaggtgagccatggtggggcctacctggggctgggggttgaggggaggtgatgggcccagctgatggttctgtctgtgcagactcagcaaaagccaaggcggtgaggaggagggccccctcagtgacaagtgcagccgcaagaccctcttctacctgattgccacgctcaatgagtccttcaggcctgactatgacttcagcacagcccgcagccatgagttcagccgggagcccagcctta

SEQ ID NO: 1883446 - DNA, 4001 bp, Homo sapiens; identical to SEQ ID NO: 587879

SEQ ID NO: 1883447 - DNA, 4001 bp, Homo sapiens; identical to SEQ ID NO: 587894

SEQ ID NO: 1883448 - DNA, 4001 bp, Homo sapiens
tttaatattatgattcacaggaactacagacaactacatgcataatcctgtctttacaaagcttaaaaaatgggccggacacggtgtctcccgcctgtaatcctagcactttgtggggtcggggcgggtggatcacctgaggtcaggagttctagaccagcctggccaaaccccatctccactaaaaatacaataattaactgggcatgatggtgggtgcctgtaatcctagctactcgggaggctgaggaaggagaatcgcttgaacctgggagatggaggttgcagtgtgctgacatcgcgccactgcactccagcctgcacgacaggaatgagaatccatctcaaaaaagcaacaaaaaaccccacaaagctatccacaccacccccctcccccacaaaacccaaaagactgatgggcacaaaattccaaatggtgggtacctatgaataggaagcagggaaatgtaaacaatagataccctagtattggtaatattatagttctcaaatgtatcggtggattcttttgtattatgcttcagaactttcctgcactaccaattttatcaattatttagtttgaaaatttttagaagtcccagcacttaccagtgaaaacagaattcaagctactgaagcctcaaaaataataatacctaaaatatttcaaggataagccatgacattcgtcttcttgacagttaatgattatttcagacgaagcaatgcatttcaaatttgaagaaaaaaaaaaacctatacgaagtctcactgatgaaattttaaaatttgtttctatggccgggcgcggtaactcacgcctataatcccagcactttgagaggcctaggcgggtggatcacgagtggtcaggctggtcaggagttcaagaccagcctggccagatggtgaaaccccgtctctactagaaatacaaaaattagccgggcgtggtggcaggcgcctgtaatcccagctactcgggaggctgaggcagagaactgcttgaaccccgggaggtggaggattcagtgagccaagatcgcgtcactgcactccaccctgggcgacagaacagactctggctcaaaaaaaaaaaaaaaaaagtttctgaatagctaacaggttttcccagcctcccagttgctgaccggtttcttctgtattatgtccagaaatacacatctctatgtaaatacaagcatctccgtgtgtagcaggcatttagcctaagggcctcctatacttgcacgtgttgttctccaacctccatgccttgactttagcgcgtattacgaaggaaggtccaggaacaaatactgactagctctacgaatgggtcgagactagtaatgactcagtaaactgcgctcattacagtttcaaagccactcacaaagtacggttaactaagggtcgtcctgacacctaagggataatcaccttcctatttataaaacgctcccttttaaggaaaacaagctgcctaagagcctgaaaccgccaaggccgcacgcacaactttgctggggacacaagagagatctggccaagaccgggtggagcacgaagcctcccgacggtcccttgcaggcacctccttaagtcagaaggcccttgcccagtttctgagcagaggacagcgaaccggtgttgacggagaaaggtcagctaagccttccaggtggttactcacaaaacgcgactgcgcaaatggcttgtggggaaagctcgtgggccttgggggcaccgggagcgtagccttttggcctacgcagcagccgcccgctccgctgcgcccggggaagggacaggggccgcgctgggcacccatatggcggaggaacccggcacgtagaggagttggacctaagaccgcgatcactctcacctcgcagagcccagctacgggcccgcagtctccgccgccgccaccacaccggcatgactaacggctcttcgcgcttcttcctccctcgccggtcgcgcgggaaaggaagagcgacatcggaagacagctcttaggcactccggtggccccgcctcttccggtacgcggccccgcccctccgcgggtgcgaaggggggctgagtgcaccggctctggggagggggcggaggggagatgagacccgcaccttagccctcttccctggttgcgcggtgcggcgacgctgtgtgccacacagcaagtttatgtgggggctttgtgacttcccgcaggggcttttcaggctcaggagtaactctgctagagctagtcaatgtttaatttaccagtttgcagtggatgcaaacgagcagaatatgccctaaaaggccgggcgcggtggctcaagcctgtaatcccagccctttgggaggcctaggcgggaggatcacccgatgtcaggagttcgagaccagcctggccaacatggtgaaacccccatctctactaaaaatacaaaaaaattggccgattgtggtgacgcgtgcctgtagtcccagctacccggaagctgaggcacgagaaatcgcttgaacccgggcagcggaggttgcagtgagccaagatcgcgccactgcactctagcctgggtaaggctccgtctcaaaacaaacaaacaaaccaaaaaacatatatatagcattcataaagcagttacctaccttgtttatgaacatgttataatttgctgttgattttcacgtcttattacttctgtttttctcattgtattatagaatcctgactgcaaagcactgggcttgatgctggagcagaaaggcttatgatcttgttgccagaaagaatacacatgaaagcatatgattaaacaatctactcacttaaagataggtcatctctccttaatatttttggcttttgttttgttttgaggcggagtctctctctgtcgcccaggctggagtgcagtggctcgatttcagctcactgcaagctccgcctcccgggttcacgccattcttctgcctcagcctctcgagtagctgggactacagacgcccgccaccacgcccagctaattttgttgtattttcagtagatccggggtttcaccgtgttagccaggatggactccatctccttacctcgtgatctgcctgcctcggcctcccaaagtgctggaattacaggtgtgagccactgcgcccggccaatttgtttttgtgttttggttggttggttttgtttttagagacagggtctccctctgttgctcagcctggagtgcagtagtgcagtcatggctcatagcagcttccatcttctaggatcctcaagagattctcccacctcagtcttgagtagctaaatgctcaccaccatgccctgctaatttttaaaacgtttcgtagaaatgcgggggtctcactatgttggccaggctggcctccaactcctggccttaagctatcctctcgacttggcttctcaaagtgctgggattacaggcatgagccacagcgcctggccaatctctcctttagacaccggaaatctaagaaacgaatacaaaatccggtacaaaatttcaatttgtctcaagtaacatagagtatgaatatctaagcctagtaagcctagcaaaacaaattgtgattgtacctcctttaacaaaggattgcaaagtattttacaggagcttaaaaatctttgcttgggcctccaaatggaagccgtttctcctgttaagtagtgacatggacctcaacctgcttcttggactaagattcctggctggatgttgcttccacaacctaattttgcaacctgggctgtcacctccagtgtgaaggggaagctgtgggagccaccattactaaaaggtataagtgagagttagtttggacattaaatccatagatgctaaggcaacaatttaggcaagttcttggtgtcactgagtgcagggccatatgataactggaggcaaacatggacaattcccctgccatggttccagagaggatagctcctgcgttgctaacag

SEQ ID NO: 1883449 - DNA, 4001 bp, Homo sapiens
gttatatagctattaagagctggggtcctctgactccaagtgcagtaaatgcttgattttctgcatactatttagaaggcatcctcatttactgtctcactcatctaccatcaaaacttgcctgaaagaggggagggagaaaaggagcaaggagattgagtctaaaatccaaaagacattgtcttttctgacacttctgtggcctccctccctcaaagcccagctgactacatagggcataccttactagcaccattcaactctgtaaattagtatctaactaaatcattatttcccctcaaattaattctttcgaatgttccaaaagatattaacatatgaaggattccctgggacatactcttgggggatgcagtatagtttccaaaaatgtgaatacttaacgtacttcacagtacatcttttaggtgtatgatataaaacatacttgggcaaacatggacttaactattgatgatctgggattactcagaaatcgtccaagtgcaccaaccacttaacttaggaaagattattcattaaagtaaaacttttcttaacctatgacagcattttggatggggaaacatttcagttaatcttttttagctactcaaatttggtaaattgcaattctgggtatttaaccttgttacctcctaagcatactagaatataaaatgcaaacaatgtcctgagaatggaattacaaaacttgagctttctaaacatctagtactagaaaggaacccagtgcagtccctttacaaaaactgggccaggagcagtggctcacgcctgtaatcccagcactttcagaggctgaggccgggggatcacgaggtcaggagatcgtgaccatcctggccaacatggtgaaactccgtctctactaaaaatacaaaaaaaaaaaaaaaaattagccaggcgtggtggtgcgcacctgtagtccctgttactcaggagactgaggcaggagaatcgcttgaacctgggaggcggaggctacagtgagccaagattgcaccactgcactccaagctgggcgacagagcaagactgtctccaaaaaaaaagaacaacaacaaaaaaaccctggaaaacagaaatcaggatgtgtaactttttttttttttttttgagatggagtcttgctctgtcgcccaggctggagtgcagtggcacgatctcggctcattgcaagctctgtagctgggactgcaggaacccgccaccacgcccggctaattttttttgtacttttagtagagatggggtttcactgcgttagccaggatggtctcgatcttccgacctcatgatccgcccgcctcggcctcccaaagggctggaattacaggcgtgagccaccacgcccggcccaggatgtgtaactctttactgaaaagtcttgccaccacatctgcctcatcctctctaatccaaccttcaggaaattgtattgaaacaaaaatagagaaaaatactgaaatagatacaatgtttttaaaacaagcaaattttattaaaggaaaattttgcaggtttaaggtttgcaggtgaaattttgtaggtgaaaaggtttacttttcaccagtctgttctggcatgcttctaatgatgtcagagtcacctaaaaaataaaaataaaaaaacagtaattttacaattcatttaatagcaactggtaccataaaatttctctacctttggttatcccttctgtagacaatggtctgcaaattagcactgactttttgcaaaagttatcacattagctgtactgtcatttttcttaaggttgaccaaagataacctagaatcacagccattatataatcacataaaatgatcatataataaaattggtttatcaccagcatttataaaaccagacctagggaaagaactaggtttggggacacatgcatggtcttaatatagcgaatgtttagcctgtcctgactattacaaaatcagaacagcgagaatattcgcagtattctatgaatcaaagattcacaattggaaaacagaatgatgtagattttttggcacttttttttttctcaagctaattttacatgtctgttctcaagaagcaagaattactttcttctgttttgccagattattctctccttataatttcaccttttaccaaatctatgtcattatttcataggtacttcatcaaatgaaattcattatctgacagtaaaaattttaacttataataaagccaattataatgtattggcattcattaccaattctctacaaaatacaactacacgatatgccttgctagatccatattctatctgaatttaggaaccaaagacatttgcgtagtaagaaatacttgtccagacattacattagaaaggcaaaaaaaaaaaagactttatgatttaaaaagcatacctggatcaatgatagccagtgtgcacactctgtagtattttccgcatgctgtgcccagttcaatattattgccactgtagtgatggacaccagttttagccaacatagcatagtactctatttcagatttcctttgggaaccaaaatgggcaaataaataaatgcgataccaagtgactgacagactaaatgttactacttcttttactagtgttaatgttgttaaggccttcaaaaagtaacaaaatcacatattactcttaaaaacatcatattcattatccaatacaaaccaacatttgtatgtatcccttgcaagtgaaggggcaaccagcaaatatctaatcaacccctactatgtttaagacagtatcaatactcacggaagagggtaagatgcaaataaaagaaagcaaagcattatctagcattagtaaggaccacatactttatatttccatgacaatctctaaagtaggtattatgtacttttttttttgagatggaatctcattctgtcgctcaggcggatcgtgcagtggcacgatctcagctcactgcaacttccacctcccgagttcaagtgattctcctgcctcagcctctcaagtagctgggattacaggcgtgcaccaccacacccagctaattttttatatttttggtagatggggtttcaccatgttggccaggctggtctcgaactcctgacctcaagggatccgcccgcctcagcctcccaaagtgctgggattacaggtgtgagccacggcacacagccctattctttttttttttttttaatctaatgaaactgagccacagaatagtaagtggaggatccagaatctaaacctttaaaagataagccatttctatcaccatcccctcagtgcccagaattccagatgggaagtgataccgttttagagttaaaatttctggcctcacgcgtgtaatcccagcactttgggaggccggatcacttgaagtcaggagcgtcagaccagcctggccaacatggtgaaaccttgtctctactaaaaatacaaaatttcagcgtcaaattagtagatactaatggttttaggaatcggaaaggagtcctatactatcttgccactcaattatgtgaatccacataccagcaatagtgctacaatgtattagttaaaaaaacacctcaagccgggcacggtagctcacacctgtaatctcagcagtttgggaggccgaggtgggtggatcacctaaggtcaggagtccgagaccagcctggccagcatggcgaaaccccatctctactaaaaatacaaaaattagccaggcatggtggcaggtgcctgtaatcccatctactcgggagggtgaggcagaattgcttgaacctgggaggcagaggttgcagtgagcttagattgtgccattgcactccagccggggtgacaagagcaaaactctgtcttaaaaaaaataaaataataaatggcacctcgggccccatcccagatccaatgaaatcagaacttgcattttaacatcacccatgtgactcctttgcacagtcatgtttc

SEQ ID NO: 1883450 - DNA, 4001 bp, Homo sapiens
taggaggccaaggagggaggatcgcgaggccaggagctcgagattagcctgggtaatacagcgagaccccatttctacaaaaaaattagaaaatattagtagggtgtggtagggcgcgcctgtggtcccagttactgggagactgaggcgggaggatcgcttgaacccaggagtttgaagctgcagtgagatacgatgacgccactgcactcctgcctgggccacggagcaagaccctgtctctaaaaaaatattttttaattaaataaaaaataaaaagaaatgaaggcacagagaggctaccgaacttttgcccaaggtcagacagcaaaatggaaagaagggcaggcgagtaggcagcaagacaccgcagatgggacagttgcaagtagtgcaccaagaagctggtgcgctccccaaggtgggacgaaaatactgtatgtccctctaccccataaccacctcctcgcgaggacaaaggacacctgacacgtcacccctccctcgcccctgcgcgcacacacgcccctcaccctaccccaggtcagaagaccccgaagggctttctctggactcctggaaccctggaggcgcaattgacgccttagaggctgaataagagtccctctccgagcagctggcgacacgtctctctcgcgccacccctcccagggtccgaagctcccgcctgtgcagtggcacaaatgaagtttgcctcctcgggctcctgcgaaaccgtggaagctatgagagtcacaaggtcctaaatggaagcagctcctcgggaactgaaggccaatcggacgcaattctaccctccaggaaagcgcaggaagagggaacaagcaatgccgacgcggcgtgggggacccaacacagggcggtcgcacaggcgcgacccttctcgcgccttctcaaaacccaagcaaacaccactggttcctacacccgccgagcccgagtctgcagcctccagctcccctggcccgttccgggcgccgcctgcgacccatgcccaagacagcgctctgctgtccctgcgcacccggcgccgacactggcggggcgggcccaagccggatccgccaacccgacgacccacctccctcagggctgccccagacgccagctgggggcttctaccttgacgctagaatttgaattttcaaacgcttgtggctacaggctttaaaacgctagctccagaaaccagctaaagtattgcattgaacagaaaaccaaataccgcatgctctcattcataagtgggagctaaacattaggaacacgtggacataaaagtggcaacaacagacactgtggtctactagagggggcaatgaaaacgggctaagctgcactccaaatcccagcatcccacaacatatccaggtaacaaacctgcgcaggtatctcccaaacctaaaaaattaaagccattaaaaagctctgcattggccaggcgcggtggctcacgcctgtaatcccagccctttgggaggccgaggcgggcgcatcacgaggtcaagagatcgagaccatccttgccaatatttatacaaaaattagctgggcgtggtggcgcgcgcctatagtcccagctactcgggaggctgaggtaggacaatctctcgaaaaccggaggtgggggttgcagtgagccgagatcgcaacactgcaactccagcctggcgacaacgcgagactccgactcacaaaagaacaaacacaaaaacacattacacagttggacaacggaaaagcacccgtgcgtgtagcatacagccagaaaaaagggcacccgaaaacggtaaacacaaagccatgaaactaggccacctgttatcataagtaacaagcccacaaatacaagtgttaaatcgatccttgaagttcaggtcagacgggtaatgtgcccacgtcgtaacaaggttcaagggtggcacatctcacacaagcgtatgaacacccaatcatcacgctcatgaactacaaaaggatcatcttatagttgacattaaggagtgccaagtatgtgccactaatttacacatagggtgactaccgtaatgcgatacatccattcttcacgtataaaatcctggatattttcaaagtcccactgagattctgtgattattcttttgtttctaccttagcaaaggaaaacagaaacacaattagcgagcggattattatatatgcaaatttattctctatagttccacctctccgtcattttcccgagcctggatctttattgctttacgaccatacgtcgtgaaataagaaggtgttgcggcagtactggcggaagctagccttgcgttttgcggcagcaatatgagctaggtccggatcctgttagacaccggcgggcgcgagccgttgcaggtacctgggggtggttaagttggtgacatggctcagaagtttatttctttaaatttttaagttttttttctttttagtcttcagaaaggcaacagtagtcttttaacgtcactgttaaaagtgtaagactcttttactccctgagagtcccctttccctttcttgcgtcctttcctctttattcttttttttttttttttttttactgagacggagtctcactctgtcgcccaggctggagtgcagtggcgcgatctcggctcactgcaaactccgcctcccgggttcaccctttctctttattcttatcccggtcagactcgccccctcctccaagacatctctctgttttattttatttgattttagttctctttgggtgatcgctccttccctcttcaacggatccctccccgcctccatcctcgttctgtgggagagaccagccttctggtgctgcagtcaggaatggagcttgacagcgctctggaagccccatcgcaggaagactctaatttgtccgaggagttgtctcactccgcctttggacaggccttctccaagattttacactgtcttgcccgcccggaggcacgacgaggcaatgtaaaagatgcagttcttaaagacctcggtgatctaatagaagccacagaatttgataggttatttgaggggactggtgcacggctccgcggaatgccggagacactggggcaggtagcaaaagccctggagaagtatgcagccccctccaaggaggaggaaggtggaggtgatgggcactccgaagcggccgagaaagcagcccaagttgggttactgtttcttaaactgttagggaaagttgagactgctaagaattccctggtcggccctgcatggcagacgggcctgcatcacttggcaggacccgtttatatttttgccatcacacacagcttggagcaaccatggaccactccgagatctcgggaagttgctagggaggtgctcacctcactgcttcaagttactgaatgcggttctgtggcaggattcctacatggagaaaatgaagatgagaaagggagactttcggtgatactagggcttctcaaacccgacttgtataagtgagtactcctgccctttgccaccgacttgagcctcacagttttttatttttattttttattatttatttattttcgagacagagtttcactcttgttgcccagggtggagtgcaatgttgcgatctcagctcactgcaacctccgcctcctgggttcaagcgattctcctgtgtcagccttcggagtagctgggattacagttgcccgtcaccacgcctggctgattttttgtatttttagtagagacggggtttcaccatgttggccaggctggtcttgaactcttgacctcaagtgatccacccgcctcgggctcccaaaatgctgggattacaggcgtgagccactgcgcctgccctagcttaattttttatagcgttatacctcaaaggaagctcaatttcttcagcagtaaaataagggtgctgtaaccacggatctcttaaggcccagaaacgttgtgatttgctataaatgacataactggat

SEQ ID NO: 1883451 - DNA, 4001 bp, Homo sapiens
aactttccccaataagtttagcaaacctgtaagggtatctatctgattttaaattctaggctgggtacagtggctcactcctgtaacaccagcagtttagtaggctaacacaggctgatggtttgagtcttcagagttccagaccagcctgggcaacatggcaaaacctcacctctacaaaaaacaattagctgggcatggtagccacatgcttgttaagtcccagctactaggcagtttgaggtggattgcatgagcccaggtcaaggctgcagtgatcacaccactgcactccagcctggactgcagagaccctgtctaaaacactgaaaatataagtatttttaaaaaatgtaaaagtgaaaatgggccaggcatggtggctcatgcctgtaatcccagcactttgggaggctgaggcaggtggatcacctgaggtcaggagtttgagaccagcctgaacaacaggacaaaaccccatctctactataaaataaaaaattaaccaggcttggtcgcaggcacttgtaatcccaactacttgggaggctgaggcaggagaattgcttgaacctgggaggcagaggttgcagtgagccaagaacacaccactgcactccagcctgggccacagagcaaaacgccgtccccccccccaaaaaaaaaaagtgaaaattttatatttaaaatataaaacactgaaaatataagtatttttaaactaagttttagttcctaaaaccctaaaacttagttttagtcctgcctctgccacttaatccttttttaaggacgttaaacttggttaatttaaaaatattagttactagctttttaacacgtgcctactagcgcactaggttctcaaccatgggtgtgcattacaaacgccccagaaaccttaacaccccataccaatcagaatttatctagagtatgccaaagttataaactgccagtgtccaataaaaccagtcaggtctcacatattatgtagttaacggaatccagttttcaaatgactcaaacgacaacgaaaacaggatagaccactctaagatacccatatattccacctgaaaagtggaagtctcatagtacacctttatattcctaaaatctgccagtattctgaataaaaaccaacagaagttaacaactggtcatcaatttattaaaatagttgacttaagcatctgcaatggtgacttccacctcaactcctggctcaatactgatggaagtaatctgcttaacaatctcagaaggactgtgcaagtcaatgagtcgcttgtgaattctcatctggaaacgatcccacgtcttagaaccttcaccacaaggagtttttcttgtagtgattctcaaagtctgtaacaaaagacaaaggaaaccaagtgtttatcgttttatacttatccctagaacatctggaaaatcattacttctaatcatttcattagtttccctttggtatgattccaatttacactaatagattttcaggtaccatgggttgaaaatgccaggtctgttttcactgtgctaggacaccacccttagagcttgcgcctgttaagcaccaaagcacaccaagaacacagcaacaataattcaacaatcatatctaaacattagctacttactaggaaccgcaatctaccaccgatttctatgtgcgtttgtagacagcatcagtgttaacaattttggcagccgaactccttaaagaacctgaatttatgcaacatccggaagcaactcctacttcctgcccctccgatttactttaccttggtaggcattcgaactggtcctttcactttgagattcttttcttttgcgcctcttatcaagtcagcacacactacaggaaataaaagacctctcagtataatcgaaacaattaaaatcggcttaaggccttcacttctgctggctcagaatagcgtataaaattatcaccgttactcaacacaataggtacctcctcatcgccagctgtatgacagtaaaagcaattttaagccacgctttacttttttaagtaacttgtcactttagttcttgcagtccaccttctacactaacattaacgagtaaagctcgtcgcttttcgcccaattccccctcccccccgcataacgaatgcactgacccttttccaaggattttacgttgcggcttgttagggtgattcgaattcggtgaattgccacctccggctccacgggtgtttttccggtatccttaaaagcctattattagatacatgaaaaagaacaataagccaaaaatggtctgccacttctggagaaaggcagcttccggaagcttcccgcgtttccccaccatttcaggagcgcctttccgcccctacacgccccggcatctgccctcaggagcacgaactcgaaaccggggtccccccggcgcccgagccctgcgttgcgccgcccgccgccgactgccgcctcaccatggctgttgcgcgcgggcttcctgaccgacttgttcctcggcgagagcgaacagcggtgagtcaggagcaggagcgtgcggaccaaaaatcctcagcccttacgaccgcgtcttcctcaaaaagaaaggggtgggacttgagcaacgcttatatagcacgcttgcatccgggtcccacacgccccggaacaggaaatatcccgggccctagaggcggtcgcacaagggcgagctggagcactagtggagttggcgggaaaggcacggctgcgggcgccccctgtccgcacggaggagccgaagtcccgcagggtggggtccccgcctgcgccgagagggccacctggtcgagagaacaggcgacacggaaacctgagaaactcctctgtctggtgcacctaaccctcttcctcataaagtgcacacgaactctggtttttccgttgcaaattttgctttctacatagaccataccattcgttgctctctgaggatgaggtaacttctctgagcttagctgacatgagcattggcagaaatgcttctcgtaatctggataacttacgttagaattagtaagcagttatttttcatagcctgaaacgtcctgttgtgatatttcagctcctggcttcccagtccagcagaagtatctacatctatttctggaaaggacctgaacttggcttctcgtccttctggaaagtgaggcgaaaatgccaggctgcgcagctatcctgaggcccggcctggaacctggctagccacccagtcctgatacctcatctcctttctgttggataaagtcattggataagatcccccagggtcttcttaatactgaacatctgttcataatcacataagtgaccaagtatagtggaaaacccgaatggtcaactgagctgagcagtgggagagagcgcagggtgagctcacctacacctgagcaagaagccggggctaaatacgtggaaatcactgagatggattttgatacagggcagaaagaagagtaaaatcatctcatattactttccacctgaagctctgagccgaaagagttatttgctcaaacactctgaaatggggagggacagagctctgacccctccgtccaggcctgtttgttgttttttttttttgtttgttttgtttttttttttttgtgagacggagtttcattcttgttgcccaggctggagtgccatggcgcgatctcggctcaccgcaaactccgcctcctgggttcaagcgattctcctgcctcagcctccggagtagctgggattacaggcatgcgccaccatgcccggctaatttttttttttttttttttttttttagtagagacggggtttctccatgttgatcatgctggtctcaaactccagatctcaggcccgcctcggcctcccaaagtgctgggattacaggcgtgagccaccgcgctcgccccgtcaggactctttcttgaggttttgtcttctgttccttggtaggaaattatgtttgaaact

SEQ ID NO: 1883452 - DNA, 4001 bp, Homo sapiens
ttacagttctataatgttaagacgtttattttgtgcttctcaaatactacatttcaaacatgtctggctctctatggggggaaggcaaaacacattcctattttataaaactaggatccttttacaattggaaagtttaaaaacttttttttttggagacaggggctgtcaccgtttggagggttgtggcgccacctcagctccctgcagccttgaccttgcaagtaattctcccaccttaggcctccgagtagctgggactacagggacatgctaccaccctgggataacttctgcattttttgtagagatggaattttgccatgtttcccaggctggtctcaagtcatcctcccatctcagtacctcagcttcccagtgttgggattacaggagtgagccaccatgcatggcacaaagatggcttttatttacttatctatatttatatatacatatttatatgtagctgtcacccaagctgtagtgtactgatgcaatcatagctcactgccaccttaatctccccagctcaaaaaacccaacctcagtctcaaagatggttacttcaccacaaaaaaattaaaatgtttaagtttctcattaaagagtagaagtgtacattcagaaacaattatgggaggtaattcattaatattaaatatgccaacggtattttaaaggttattggagaattagaagggggtggggtgcaggacgaaaaattaatgggtgcaatgtacaccattcaggtaatggctgcacaaaaagctcagactccaaactacttcatatacctatgcaacagaactgcacttataccccccaaatctatactgagggaagtgactaagatgttgctatacaggttttataccatttatcatataaaaattataaccttggtaaaaggaatttataagctagtactcaacaggagaaaagatttagctctaaaccttcacccagatataaattcagctttagaattcttgccaatttagtcctagacagactggtctgctcagtcatttctcttaacatagcatattgcttagttattacatgtactagtattaggatgacttttttgttcacaaagatgaaagcaaactgaataaaaaaggtgaaacctttatctgtaagggggaatttgattgctatttggtattaaagagttttaagattcaaccacctggtacaacagcaggctctgaaggggaagccagacagggaacctagaggtacaagcaatgtctccccagctgtcagcctcaatgagaatcaccacccataaataagctaattattgacaagattataatctttcgaatatgttcaaaacaggtctgactagtgactatgagaatggagctatttagagttgatttaaaagaaaacactttattgttcagcaattaaaagttagccaaatatgtatttttctccataatttattgtgatgttatcaacatcaagtaaaatgctcattttcatcatttgcttctgttcatgttttcttgaacacgtcttcaattttccttccaaaatgctgcatgccacacctccaaaacaaagtcagaaaccacagtgaaaatcattccatactcaaagttctcatataacctcaatattcacaagtgcccctcaaaaaactaatgttgagaataccacacatgcaaaagcaacttcaacaagaatctgcccccacccttaagtttatcagatactttctgaactgtcagcagacatagttgcttgacaaatcacttacttgaggtaacgaagcagaagtatttttaaacatgacagctaagaacattcatctacagcaacctatatgctaaaaacaaagaatattcacccttaattaaattattgccttacatacatgtcagtaattaatcaatgtacagtactggcatctcagtcttaaaattatttcttcaaagacaacctcagctgggtaaacggcaaaaagtaatttaagtcatcattgtgccagctattaaacctatctgtcaagaatacatcacataactaacattaattaaatttaggtacctcaatacatgccgcgtgatcctagtagttttttcacaaccttctacaagtttttggaaaacatctgttatgatgactttcatacaccttcacctcaaaggctttcttgcacctggaaattaaatattacatttcgaattcccatttttatttgcattttgttgggcatcttatatgtaggaatggtccaagaagagaatctcattcctttaggaactgtacttgcaacctacctttcagactcccaaaccactttttaataaaaaagtactattattctattacctgtttctgcttttttgatagtcagtactgacaaacccaaacctctgtaactgagtatgtttgtctcattagtacctagtatttccacaaatgagcttattccaaactggaaacaggagccattagcactggcaggaaaatggtggaaacatttcatgatatccttcactgtggcagttttgattttaagacataatggtcatagtgagtacacagccgttgcttttctgtctcacagctcgacaaggatgagctatgagccaggttagatgtataaaaactaacgtgaagaccttcacctaaaaacattataacggcaaacctagcagtttcagagcagggatacctatattggcatttttactggacacattcctgtaaaattaagtcccaagttaactaaaaactgcaaagaacatggactggggcaaaaaatcatgtcatacagcagcccaggagaataaatcattgagccaggcagcaatacgaaatgatttatgaagacatacaaggttggagcttgcaaaaacaatcattttcatgtgctgaaatgctgaaaatgtttcacacaatcagtattaggaatataaactactggttttgaataattcaaaaaaaattaactgaaacaaaaaaagtttcagtttaatattatgattcacaggaactacagacaactacatgcataatcctgtctttacaaagcttaaaaaatgggccggacacggtgtctcccgcctgtaatcctagcactttgtggggtcggggcgggtggatcacctgaggtcaggagttctagaccagcctggccaaaccccatctccactaaaaatacaataattaactgggcatgatggtgggtgcctgtaatcctagctactcgggaggctgaggaaggagaatcgcttgaacctgggagatggaggttgcagtgtgctgacatcgcgccactgcactccagcctgcacgacaggaatgagaatccatctcaaaaaagcaacaaaaaaccccacaaagctatccacaccacccccctcccccacaaaacccaaaagactgatgggcacaaaattccaaatggtgggtacctatgaataggaagcagggaaatgtaaacaatagataccctagtattggtaatattatagttctcaaatgtatcggtggattcttttgtattatgcttcagaactttcctgcactaccaattttatcaattatttagtttgaaaatttttagaagtcccagcacttaccagtgaaaacagaattcaagctactgaagcctcaaaaataataatacctaaaatatttcaaggataagccatgacattcgtcttcttgacagttaatgattatttcagacgaagcaatgcatttcaaatttgaagaaaaaaaaaaacctatacgaagtctcactgatgaaattttaaaatttgtttctatggccgggcgcggtaactcacgcctataatcccagcactttgagaggcctaggcgggtggatcacgagtggtcaggctggtcaggagttcaagaccagcctggccagatggtgaaaccccgtctctactagaaatacaaaaattagccgggcgtggtggcaggcgcctgtaatcccagctactcgggaggctgaggcagagaactgc

SEQ ID NO: 1883453 - DNA, 4001 bp, Homo sapiens; identical to SEQ ID NO: 587926

SEQ ID NO: 1883454 - DNA, 4001 bp, Homo sapiens
atttctgaaatccagctcatagctttgctttaatgagatgtgaacagaaggtctcaccaaagagactgaatttggggtctctccagagactcaatttatactaaaaaaaaaaaaaaaatggaaaggggttatatttatatagtagaattcaacctctttccaagcagtaataatagcaggtaggatctcagaacacatgcaggagataacatttttaggtttaaaagaaaataaaaatagtcaacccaggaagtaaaaaccagatacactgatcttacagttaaatgagcattccaaaaaatttttaataagaaaaaacagcatttggttgttaatatttagaaggtgagagcgtgagaagaaaacatttggtaaacagacatggcattttaagttgtctatagattgtcaaccatttataagctaatttaatcaaaaacatttccacatgatctcatcagtagactatctgaacataaatattgttgtttcactttaaaatgtcacttttgtggtgacctttgaatcctctgtgccatctgctaataaacatgtctgaagatgtgcaaccccaggccttcagctcttgttaatgtattaatctttcagacaagccaagcatctgagagagaaagcggacaataaccaggcacccccgggctccatcgctcaggactgcaagaaatcaaactcggccgtctagcagctcccagaacccgcggctgccaccgcatccttataaacctgtcagcacgcatgagggtgtctgtgttcagggaaatgaatgactaataccattatttgagtcttatgtgaagacaacactattctaacacgagagataatatacatggtactgtttattcaactggggaaaaataaaactttgagcatttcccttggaactcgagatcagatcataactcatttgcctagaggcagcagaaatctgatcctgctactggagcttaaaataacaagtaaagaaaagtgttagaaacaaagctaaaattttaacatgattaataatagagaagttgggtttggttctgttgttatgattgttttgtcgtggtgcttgtgttcagttatattctctctctctctcatttcaaatactgcttgacaattcgaaaatgaaccaatgatgtgctgtggaatgtgatggttgtcttcatatagagtcacatggtttctctttttatgcagatatttataatcttcatcctatatcagtaggaataactataaggtgcactacaaaaagatgtatgcaaacaaacatgttttaaatcaggtcagatatctgatgaaaaatacgaactaatgttaagagcaagtagtttcaacatactccaggaactgagaaacaaaacaaagcaattgtgggttttgagctccatatactcttagcaagtaagggggcgtcttgcccctatatatcatcttcccggattccactccctgttgtgggaatcgcgcccacccccatccgtgtgttgtagccactcacggtttgcatcaagagtgttttttgtaactgcctctggacttgggacagtgagtaggatcaaaaataaataatgtacatgacggggaagggaaaaacctgttggagttgcttccagccagccacgctccgggccagcatgttggaatccagcgtggagcagatgcagtaaaaatgtggttggtttctgtgtgaagcgctgttgttgttcttttgttctctcactctcatcttttaaatatcacctccgtgaaacccatccgaaaggccaccacccggcctagtcactgcccagcagtgggattagagaatggataggctgtacctgagaaactgcagagccgcctcctgggtgactcgggccgggttcctggccaacgtcatcgcattgttcaggctttctccttattgatttgcaaacattgtgcaatgagaaaacactacatggtctaactgctcgacccaacatgacaataggaatataattatgtaagatttcacaagcaaaaccaccacaaatcatgatctggctgactcacacgcgactggagaataaacaaacagcaacataaggaaataactctagggttgtttttaatgattcccatgtggggaagtccgtcagtattgggagggctgggtgcccttggaggaaataggttatgttacataaagctgagtccttgcgaaaaaaagcagcacatttgtaaagttggggctcacaaaggtaaactggatggaaacccagtcctgctgcctgacaccagggcgcagatggccctaaatcattccctttgaagggcgcaggcccttccttctgctaggccttcgccacctgaggtttagaccctcaaatggggcgagggactgcttcaggcaggatcattgaagtggatcttcagtttacccaatgcaataaacacaggctccctccggcagcccacatcaaactacaccaaggctgtcaggtctataggagagcaatgagctccgggaacaaacccagctaatcagttctcacgacgcacgtatctgaaggatttaactcttgagctgtctgacacagcttatccttagataagtcacccttagacccgatatatccatgaatacagcaatggtggtgggggcgagggaatggaaatttgcataggagctcaagcttagtgatagcttatttattcaaatcccatcctctctacctgctcacagagtccaggaaggccttcgggtattttctcctgcacagcagcacttcctgggaaccgcctgggttttctttgggttgaattaccaatgcagatgatgggtggcctgcagttgttggcagggacccgctgcaacgctcggttccaaagagcaatgttatatatcattagagggaaaccattaagtagatttattgaaagtatgtttcttcggcacaaggagatctttttgatgaaaaatggaactcattattctctaaaggacacagattgacttatctccgttatcaattacagtgtctgctttcagcttgtctcaatcaaagcactgggctttgtagtcgctttccagagccgaggccaatgtgttttatgaaaaaggtttatttttacattttaattggaaatataatattgtactttggaactctgaccatcctttccaggacaacttgccagagatcaatggtgagacaccacccatcaggctgtgacagacatctctcccctttcctggggtgacccctctgataagctgtcctagaattcttctccccagaaaacatgcttaatagtgattctttttgacagcttcaaccaatttcctgtaccataaaataaaaatagcttaatgaaaaacttaccttattatacagaggttttcagggctcctagtgactttggaaacgtggcccagaccaactgactggtacttaaatcctgctgcaggtgggttatcactgcaattgcctaaagtttgtttcgtaccttttaatttccaaaggctacctcttaccactatggccaagaatgatagagaatctaacagttttgtacacagagctgacaagctgttaattgcatagtcctctgtaaatttatctttgagctgcccatagcctgacccaccataatataggcaccagataaatgtagaaatcatacattgaataaatggacgaatggatgatttatcactcaacacccattgaagaaatacatgttaaatctcactgtttttttacatgacacagaggcaggcacccatgacaatggttttgctgttggtcagatattatatttgcaatccaaggggaaccgtgacatttttaaatcaagaacatggcaagtccaaaaagccctcacttcaaaggacttcggacccatggaaccatccttcccccatgttcccatttctgtatttatattccttccatcagctggcagatttcattctaatcccagatacattccactgtttccacaatcacatgtgcatatct

SEQ ID NO: 1883455 - DNA, 4001 bp, Homo sapiens; identical to SEQ ID NO: 587950

SEQ ID NO: 1883456 - DNA, 4001 bp, Homo sapiens; identical to SEQ ID NO: 587952

SEQ ID NO: 1883457 - DNA, 4001 bp, Homo sapiens
aacacagtcattaaatgaatcttaaaattctgacagatagggaagtcaccttgatttgagcaaatctccagagttagcattagaaaacactttcttggctaggtgcagtgactcatgcctgtaatcccagcactttgggtatccaaggcaggaagattgcttgagcccaggagttcaagaccagcctggacaacatggcaaaaccccatctctacaaaaaatgcaaataaataaataaaaagaaagagaaaaataagtccaggtgccatggctcatgcctgtagcctgtaacctcagcactttgggaggccaaggtgggcgaattacctgaggtcaggagttcgagaccagccttaccaacatggtctctgctaaaaatacaaaaattagccaggcatggtggctgggacctgtaatcccagctactcgggaggctgaggcaggagaatcacttgaacctgggaggcagaggttgcaatgagccgagatcacactattgcactccagcccaggcaacgagagggaaactccgcccctcccccaccctgcaaaaaaaaaaaaaaaaaaggaagaaagaaaaataagccaggtgtggtggtgcacacctgtggttctagctacttgggaggctgaggtgtgaggataaattgaacccagggaggttgaggctgcagtgagtcatgatcatgccattacactccagcctgggtgacaagacggaaactccatctcaaaaaaacaggaaagcaaagcaaagcaaagccaggtgtggtggtgcacacctgtggtcctagctacttgggaggctgaggtgggaggatcaattgagcccagggaggtcgaggctgcagtgagccatgatcatgccactgcacaccagcctgggcaatagagggagaccctgtctcaatgataataataatttcttgatgagaaaacttgatatatgcatgatatttattgaatatttgtatttatgaacagactcaagacatccaccaggtcaaaatggtaatacaatgtgccctttacttacacttcacatcttagcccttgttggtaccccatacccaacagagatcctttcccctaaaaaagaggaaatccccctccagcaggcccctggagaagccttccccacaccacgcagccaggcaaccattgcttctcaatgcaggtagaagactcagctacatggatacctccagcaccatgatgtccaatgcatgagtcacatggcccaaggcagcgagctgcttgtatggcagctagaactcactgcaaagcctcctcctgatctttgaggcccatctcaaaactggcggcctttctttcttttttttttttttttgagacggagtctcgctctgtcgcccaggctggagtgcagtggcgcgatctcggctcactgcaagctccgcctcccgggttcacgccattctcctgcctcagcctcccaagtagctgggactacaggcgcccgccactacgcccagctaattttttgtatttttagtagagacggggtttcaccgttttagccgggatagtctcgatctcctgacctcgtgatccgcccgcctcggcctcccaaagtgctgggattacaggcgtgagccaccgcgcccggccgcggcctttcaagtcacctgataaatggatccagtggtattctcatgagtgaatctgctgtctatgaaatagaagaggcctaaccaagtgctgtgcctgtctcatagaggtaggaggtgcaagcttgaataagttaatggctttatcttgaaaaggatgcctcagcatgcccagaccaccagccctccaaaaactccaccaatgtggcaggcccctgaatcttttctaggtctatcttccatcctctggaattcatgagtcttaccgaggcacccaacgtactcaccacttctgctccccagctctgacaaacgtgattcaccaacatagggagcagcctgacgttccagagcagaggtcagcaaattttctgtaagggaacagattgtaaatactctattttattgtcacagctactcacctctgccatcatagagtgaaagcggccatagacattactgtacataagcaaaggagtgtgtctgttcgaataaaactttatttacaaaaacaggcagcgggccagatttggcctacagatctgggtttgctcatccctgttctatagaatagccaaatgattaaggaccctttggactgtattgtgatagagaatgaataattattaaaggccgggggccatatcatgaatgtatactgactcttccaagggaatagtttctgaaaagaacaaatttgccagataaatagtataccaattgtcagaggctttgtaggtctgttctagtaaaggtgcaacatctgggcctagcagctgtttgattggagctaccacttaattaagattataatagatcactatcaaccaccatgacctaactggatttgcaggggtcagactgatgaattaaaaagaaatgttaaggggattgacacccctgcatcctttagtcctggagaatggtgctaatctctgccactgtgacatggccttgcacagggggcacacaatgtcctataacctggacactatatgaccctactctaaaagcagtcatggtggcatcaggagtcccatggcattatcagttcagatgttatatctaacagccctcaaaagagctatggactcccttcttcccagcacaaaattattctggtaaatgaccacgtgtctctttggagaaggattgaaggaaattgctactgtctaaagttgccatggtgctgcagagtcactccttaaaaggaactacctgtcttcaatccacagactctgggtcttagaatatttcagatttagaaactgagcaaaaaatgtaatttttcatcgtgccagctgacgtcagccttcaactcacccattcttgatcatattttgtataaggcaaagcagtgacctccttggctgccagtctcatccataggaatgccgtggtctattggccattaccacagatcgctgtggaaaaggttcccctggtcaccattccagctttgcttcccattacaggaattatgtctacctttccactgaagattaattgttgccatctgtcctctgctattctgaaattctatcctcaccattgacactatggagcccggttcaatagagccacttcccctacaacgaactccagcctacaaaggtcaccaccactgagcttcccaacaaggccagtgccacctcactagcacatttcttattgctattatgatgggaagacctctggacactccggagaacaacagaagctggtccatataatgaattcatgcaatcatacccacctccacgtgccttttgactcattcttcaatactctgccgaggaagttctggcatccccacttcatttactaaagaccatcatttttccaagcatcagctccagatgtccttgccaggacgctaaattctgagtcatgggacagtgtctccaaatcattgctcctcctttcccaatcttttccccacaagtccgaatgctccctcaagatccattcccagacatgttctccttggacatattagccaagtcctgaagctgctgtgaacaattccttggggaactacagcaggaaccatgttgagatttgattctatttatattcattgtcatagaatccttgagaggtggtggcagtaaatcctaggaggacaggtactatcttgtgaagactcaacctcaagagtgacatcaagaagacagcagagtaggaagtgacaggaatctgtctctctacctttaccggagcacatgaattcagtcactggtacctagaatgcaatgagagatatggcaaatgtgttaaaaatttattttctcaaggatcatgagaaatagtttgcttttccctagcaggaccgagtctactttcacagttttgccccagggctatgtc

SEQ ID NO: 1883458 - DNA, 4001 bp, Homo sapiens
gaagaaactggatcagtcatacattgctgtatgaattgtatgagtggctgtatgtaaaaggtacagccactctggaaaaaagagtagggtagtttcttacaaagatatacgtgtttaccacacaacccagcaattgcccttttgggcatttatcccagaaaatgaaaatgtgtgttcacataaaaacctgtacatgaatgttcacagcagctttattagtaagggcaaaaaactgaaaacaactcttttgtcctttagtaggtgaatggttaagcaaactgtggtacatccataccatgggatacgactcaacaatcaaaaggaactgcccagacttcaccacgatgcaatatatgcatgtaagaaatctgcacttataccccctaaatatataaaacatttttaaaagaaaaaaaggaagaagatacatgcaacaacttggatggatttcaagggaattatgctgaatgaaaaaaagtcaacctcataagattacattctatatgattccattcatatgacattcttgaaatgacaaaattacaaagatggaagacagaacagtggtagccacaggttggggtgaggggataagaaagggatgtggctgtggctgtaaaagcgcagcacaagggatccatgtgatagaactgttctgtctcttgtgatggtggtcacatgaatctacacatgataatactgcatataattgtctaaaatgacattttcttcaagagttatctacagtttaaagctcacttttatgaagtgtcacatccatcaccattttaagagacataaaatcatgaaaagatatcaccagaagctacgtaaacatttcagctaagggtaaagagaaagttaagagtgttttcacaaggaaattgaaagaaggcaatccgaatgaagtcaacttggtcacacaaaaatcttggtaaaagaactagaatggaagcccaaactgctgagcaagtgggagaagaaaagaaaacttggttcaaacagatcacacaagggaacccaggacaaatgctgactttggcattatctaggtaacccttttttttgtcataggtgactctaataatagacctgttgttgcaaaaccagtcaaaatcctaccaaattaaaaagaagtccctcattgacttgttgggtgtaggtggtaccccatgtcctcgcacaccaaaagagatcatttctggcaagaaagctcctacatgccttgatggtgctgctggtaggatgccttaggccaggcccatcccagcgatgttctgctggctgtggtaaaaggtgggaggagaatatgccttattcattactcaatcaacttcttagccttgaagaagcatcacaggtagaagacctgccaggtggctagtccagtgaggcagaacattgaaaagatgctgaagtgtaggacccaagtgtttgttgactcactggtatcaccatctcctcttctctcttcttcatgtaggcaaaatcattaacaatagattctgaaaggtcttctaggtgtcgcagcttcacctctaatggtttgagcttctcaacttttgcaatctctctgtaatttttcacctccactccatgcttcatgtctaggatcacaagttggtcaggtatctgccctgtttccttgctctcaaaacacacttcaaacatgtcataatcttcagtggtaaaggcaaatttccccttggttgtattctttttggagtagaaaatatggccagcagaatctgtgatcttgaggtggctgcacaggccaccagtgcccccagactggtcagagatctcgtatgtgccagtcactagtaggtccttgtggatctcctcatggaagcagttgtgagaattaatggacagatggaaggagatggcgaggaccaagctggggcccagcaggaacaaaagcagcaacgccgatggacaagggccatgccgggctggtgggccagacaaaccagacatggtgctggagactcattccccctttagcccttctgctggggatcaacacccactactatgagtcctctaccatgatgtgttcaggccccaacactgtcctatctatgctccccgtcctcctgaaaagctagttttgacctttcctcagcttaggcagaggcctgtgtctttctccacggttagagaccaggtggcagggaaggacacaaccagcacaaagactcagaccacaggtccatcctgccctctacctgggatgacttttcaggtcttgcttcctttctctggagcaggacttcaagcttccaaacctgatgtcatctccaggctggagcggggggacgaaccatagacccctcacatcctgagaactcaggggagctggagctggaggcacaagagagaaggtgagtctgcccccactctctgcttctgtggtaggtgctgcagcttcactcacgaatcccttctctacaagccccagacaaatctcttgttaccctcaggcctttgctttcctcctcctttttctatcttgtcctctttccttgctgttatttgcccctgttatctgcccataagtaggtttgtgttttatttaccctagaaaaatgctatttcagccacaaaaaatagttcaagtgtccttcccaggcagctggctcccagtcccttcacttctatgtcatccactccttaggctgtttgggaaaaatgctaattacatttttcctctgctctgacaccacaacaacaatcaacaaagacttcgtgaccaaatgtatggagggtttttcccatgttccaagcagctctaattcaattcaattctggtgctctcttggagatagcctcagatcccacaggctgagggctcagtctctgagactgtccactcaaggcactagttgtaagttcggggtttccaaacttgagaccaaaaggattcaagttggggttcccatgaccctcactttgggttctattaatttgctggagcatctcacagaactcagggaaacacttagatttacaagtttaggctgggcgcagtggctcatgcctgtaatcccagcaatttgggaggccgaggtgggcagatcacttgaggtcaggagttcgagaccaacgtggccaatatagtgaaaccccgtctctacaaaagatacaaaaattagccaggcatggtggtgtgcatctgtagtctcagttacttgggaggatgaggcatgagaatcacttgaacccaggaggcagaggttgcagtgagctgagatcatgccactgcactccagcctgggtggcagagtgagaccctgtctcagaaaagaaaaagaaagatttaccaatttattataaaggataaagatgaagaaatgtgtaagctgaggtatgggggaaggggtgcagagttttcatgcccttcctgggtgcatcaccctctaggatcctgtccacttagctatccagcagctctctgaaccctgccctcttaggtttgtatagaggctttattatgtaggtatgattgattaaaccattggccattggtgataaacttaacctttagctcctttcccctctcttgagtttggggcattggagctgagaatcccaaccctgtaatcgtgccttggcctttccagtgaccagcttcatcctaaagctgtcagtcaacataagtctatgaaaaggcagcactttggagattacaaggattttaggagttgtatgccaggttatggggatgaagaccaaatatgtatttcacactatcccacagggtttgctggccagctctgttttggctgctgggaaataccaattagagagacgttctcttctaagtctctcattcctgctgttactcactcagagcatcccaggctgattctcggtcttaaggaaacagatgagctagaaagggtttcttcctgtgtagtgggggacctgggcatgtaaacagtaagcagagcagagtcctagggctccgtgctaccacacagctaacattggtcatt

SEQ ID NO: 1883459 - DNA, 4001 bp, Homo sapiens; identical to SEQ ID NO: 587966

SEQ ID NO: 1883460 - DNA, 4001 bp, Homo sapiens; identical to SEQ ID NO: 587971

SEQ ID NO: 1883461 - DNA, 4001 bp, Homo sapiens; identical to SEQ ID NO: 587974

SEQ ID NO: 1883462 - DNA, 4001 bp, Homo sapiens
aaagtttgggaacaatgcctttctttaatttgaaagtatctgttgttggtgtcacttgttggaattcctagaatcccagaaaagtaagtttaagttttcttctgccagcatcggtcagcctacctttgacccaaggtcacgactccctccctcctcccttcccttccctgctctgacattcttaccttgtttttgagttccttattccctagcttcctccaagcagcaggctctgggaacagtcccgttcatttatataacaaatatttattgaaatgcagacttgttgttttcataatacctgtgtacaagttaaacccgtggtcacttgttcatgtgcctcttgtttatgacaagaggtggtcccttgttgaaagcctgtcacatggcaggtactcagtcttttctttccttctaataagtaggtgagtattttccttggtttgcacacgaggaaatggaggctcagagagcttaggtagcttactcaaagccacacagctgggttaaatgggttcagcaccatgaaaatctgacctttaatgtctgcactcttattctctggcttattgggaaagaattggacagggatggtaaatggagttgatggaggcaaagagataattactgttgctcaaaggtggatcgagagagtttgggcaaaaacggaaccacgaacaagccgttgaaagtcccctcatcctggacctgtggtctgtcctttgtaactgctctttttttggcattccctctgtctcctctgcccatcccaatgccaggcacactgagcctgtagggatttacaaggtgggcctcaggtttctcccctcccaggtgggcataggaatcactgcttagcttagatttggcagaatgaaagagtcaggcagagtctcacccggccctgtttcttagctgctttgacacctggggcaggtttttggacctctctggacatggccagctgtgttgtgactgcccaccagaggctgggtctgtgaatggaagactgaagaaaaggcgatgatcacagtccagggacaaggtttctgaatcttgtgaaatagttacaaatactatgaaacaggaatacaaagaaaagctcacatttattaagcacttactttgtgctataccctcttgtaagagccttgtacaaattaggcagacagacaatattattatccccattttacctataaggaaactgagtgcaaagtgacagcttttctgcagagcctgtgcacaggggtcaaagtttgggaacacattgcctttctttaatctgaaactatctgctgttggtctcatttgttgaaattcctagaatcccagagaagtaagttttagctttcttctgccagccccggtcagcctgcctttgacccaaggccatagtaagttccagagtgacttcccgtctgttttattatccctgacaaagggatacagtattgtgcggtggctgtggatggcgtgtagtagtgttttccttctcttgaaaagcagctgctgagtggtggagcacagaggtattccctgagccccagcttgtgcccatggtaggtccagggcgtttgggggaaggagaccgactctaggtggtcccgtctggtttctcaggggagaaaattcatagatccatctcctagctgtcatccaattctgtgtagaaggggaaagccaaggttgccctcagattttgatcttggttcactctgatttctctatgccagactagtagagcttcagggaagcttggtgactatgactggatgaattctgtcccccttaaaaccataggttgaagtcctactcacccatacctcagaacgtgactgtgttcggaaatagggtctctagagaggtacagttaactgagctcacgtggcggggctccaatatggtcagactggtgggtgtccttatcagaagaagagattaagatgacaaaggaggagtgaagaccacgtgtagacacagggaggaggtggccatctacaagcccaggagagaggcctcagaagaaacaactctgaccacaccttgatcctggacttctggctttcagaattgtgaggaaataaacctctgttgtctgagcaacccagcctgtgaaaatttgttgtagcagccctggcggatcaatacagtgaccatgagcaagtcactcaccctctctgaacccccttggtctcagctctaaaaagaagcctgagaatttctgcctcacaggctgtggtaagaggcatcagaaatagccgactttcatcggaggctcactgcgagccagggcctgtttaagccttttccatgtctgaacacacttcatcttcatgtgtagcctttggctggggaggggagatactattgttcccattttacaggtgaggagagtggagcacagagctgttaattaacctgtcccatgttagtcagcaaggaaggggctggtccatatgtggaacttcgtagttgtactctggtgcccacacaccagatcactatgccgtcccagctgttgttacaataagactatgtaggtgaagggcccacccagtagtgcctggcctatgggacacattgaagaccagccccctgtgaccagaacctcccatttgctgcattgagtttggaatgtttgaactccaggagctgtgtgtgtgtgtgtgtgtgtgtgtgtgtgtgtgtgtgtgtgtgtatctgtctgtctccctctctctcctctctcccctaccttccttttcttccctcctgtttttgggagggagctcagcctcccttcactgccactgcccatcagcatcctctccctattcagccacccccaccccccatccctggtattaattgactttggctcctgtcctggagctcagcctggcacccagacctgccgtgctatactaacacctctcacatggttaaaccaatgggggtggcatttagcagatgacgctgaaacccgtgaatctgccctttctcactgggccctcactgctctagagtccccgcctcttttacgaagcggctgtcatggttgatgggtgagtgtcaggccccacccagggacagggaggcccagtgccggctgtggagttacccagaccttacggtaaaaacgcatcaccctgaatgggggccaggccaggcatcggcccaagccggccctgcccagcggctggattctgactcgctgtgccttagtcacaggccagagactcttctgcttccagctgaggctgtcccctgccttccctggcggcccgggttcctggaaaagctgtgtgccagaggacgggagtttccctccaacttaagccattagaaagctcatttattgagcacttactaagtgtcagagactgtgctaggcactttacatgaatcttctcatttaatccttttaataaacttccggggcacatgctcttctaatctcccttttactgatgatgcaggcttgacagtgggaatgctaaccgcagaaagcagctcacctcacttgggtgctactgtgtgccaagtcctggggttagcacccaatagccccgtggcggcatgctgttattactctccctgcataggagtgggaggctgagacctgggtgtttctgggtgtcccagctcctgtatgccatctgcctgtccagcccttagccacaaagctgttgtgccatgtggggagatgcggccagtttcccaggtgaggctggtcctgcttcaagcgtgggagctccaaccactgctccacgctgcctccactcctgaacctgaaggtggaggagtttcccactgtctcaaataagcaccggggcccaggggtcaccaggctcagatggaatttgcttaaaggactcttgggagaaaagctgattgggggatgggaagagacagctggcagtcacttaggagacagatgtgtcaccagaactaaagactgacctgggaggactgactttcacccaaaagggcctgggctgggaattctcctttatgtc

SEQ ID NO: 1883463 - DNA, 4001 bp, Homo sapiens; identical to SEQ ID NO: 587978

SEQ ID NO: 1883464 - DNA, 4001 bp, Homo sapiens; identical to SEQ ID NO: 587988

SEQ ID NO: 1883465 - DNA, 4001 bp, Homo sapiens
aaactcctggcctcaagtgatctgcctgcctcagcttcccaaagtgctgggattacaggtgtgagccaccgcacccagccttggccacgttgttctaacacagcaaagctttggagtaaatgaactgaccctcccaaggcagtgcctcttctttcattcggagcagagtcctccacctcacccaaagaacatatgggaaaattatagacacgaaaagactcatcttacaagataaagatttgaaaaaaatatgtcttagaattagacacttaaactagtcctataaaaactacacaagaagttggaatactgcagtgctaccaatgactgttgattcttaccacccaagctagaacacaaacactactaaaactagttactccactcacgtaagtaaaacacagccgtttaatttactttgacaagtaccaaacatagttattctaaaaacatcattatgtcaaacgacagtgtgtaacagattagtatacaaatacacatgggcacgtttgtcgtcatgtctcccccgtcctgcgtcgcccccattgaaagccagacagacataatgctgacttacatggtggcccctaagccggctaacaatatatacaagacatgtgacaagctttctaactcaaacatttgcatgtctactatgtacaagtcatcatgttatcccactcaggacaaccaaagatgaaatgtttctaacctcaagaagcttaaaatttagataataatatgtatgtgtatatatacgttatacaggtaatgtataatatatatatacacataggtaacacatataaagcatattgtatgtaatgtttgtaagcacttgtgttaagtctgaaattaatctgaaggggagcgaggaaagagctgaaagactccaaagagtctatcttacaagtaaatgaaagtaaagtacaggcctggcccagtggctcacacctgtaatcccagcactttgggaggctgaggcgggtggatcacctgaggtcaggacttggagaccagcctggtcaacatggagaaacctctgtctctactaaaaatacaaaattagccgggctgtggtggcgcacacctgtaatcccagctacttgggaggctgaggcaggagaatcacttgaaccagggaggcagaggttgcagtgagctgagatcccgccactgcactccagcctgggctacaggtggagactcaaaaaaacaaacaaaaaaaacaccagagtctgaaaaaaataaagtacaagatagtatatttggaatatggtttgatttacataaaaatgcacacatgacggcacatactggaggaaaataagcaatacatgaaaacttgtgtcagggctcaaaacaggagtgattcctatcctcacttcccaagattacctaccttgttttcttttttcagcatttatgtatctttttaaaagcgtgccacacacatctgcgtacagtcacaggcttatgatcagcagagatctctaggatgaaactatttaaatctgaaaaccatggcctactattgctctatttgggggtaatttcacttgagctgttttcagaagcaagtgcacccaacgctatggtaaattagactgaaggttttgtgttgtgggatttcacccttcctacgaaaagctctcttccctcaaacccacagacaccactccacaatctgggggtttctagtatgataaatatctgcctcccaaaccccccatgggtcatacgccaccaaaaatcctaaccacctgaacttagaagaaggcagaaagtcttaatttatgagggagagaggggtttcccacctggagggacgagagcgactcactgtcctctgttcctggttccagtcacttacaggagctggctgcgccgtgctcccttcacgcggctttccacccaaagcgcatcacggccgccagcccctgacgctagccccttcgccacctcccagaaccttctctccctctcccccacacacgcacactcacactcacacatgcagtcccatctgcccccgccagagccgctccttccagggccccaggatgccagatccggatccgggagatgcaacttgcggcgccggcccaggaggctcggcacctgctcgagccgccgggccgcgctcagccccgcgccgagccaaagcccgagtccaagcccgagtccaagcccgagcccaagcccgctgggtccgcgccctcaccttgctcgccgcggtccatgtctccagcccgccgcctcgtgtcctctgcagcacccccgcctgcagcccgtcccggctcggatcgcccgccgcgccgcgcagagctcctcctcgcctccgccggcgactcccgcgaagtccccacccccagaggcgtcgggcgcggcggcgccgcccgccctcggcctggagcgctttcctggggcgtcacccaaccacctgacccggtcgacctgtgcgctccgccacgtcggcgcgggcggcgcagcgctaggagggccgggcgcaccccgactcccgcaccggctggaagtcggccgggaggagggaagaggacggcgaggagatggactcggccatggaggctgcgtggagcctgcttgggaaccgggatggcgtttgccttccaccatcaagttatttataaaatcaaaagtttcctccgaggccttggagatgccctttctctgcatctgcgaacacctactttcctatacttacagtaggaaacacaggaacgttatttagaaatgccagtggctcttttctctctgtattttattacctaaataatgccctatgatgtcttctctaactaggtcataaaccagcataggtgaaaattgcaaagaatctcttgaaaaattatatagtcttttccatagaatgcggattttttaggtgactaggaagattttcatataataaaaatctgttttgagtgcgggactgaggacaacactaaaatgaattaaatcaaatgaaattaattaaattaaccgaaggtcagaattatcagcagagatctttggaaaatgcgtgttgaggcgtcatgtccgttgatcaaaggacagtttgaggttcccgtaacaatccagttcttttcattagtagcgttaacaatctgttttcacagggttttgcagttactcgtcttccatgaagtcactttgattgtatgggtcatggtcttcaggtggtgtctcaatttcgtaagctatctgaggctgcaaatgaagtggggcttcttttctgtgttgcttgacgtttaggccgaagcattgtgtagcactccacagacaacaaagaagcacttattcagatgttttaaaattacttgtagttacctgaagtgactgtatgctattaatatctctatactgtcgtgctgtatgtaaagtgtagctctctccagcctgcatcttccagtgtcttctggggacgtttactgtttgactcaaccagatgtgatctcttctatttgagtccttctactctgactgcacttggctcctctcctgtggcactcaccccagcactggtgccaggatgctaccagtgtatgtttcacagtcctattaggttacaagctccaggtggtaaagtccttaaaatggcctattaaaaaaatcaaaaaacaggcctggcacggtggctcacgcctgtaatcccagcactccgggaggccaaggcgggtggatcacttgaggtcaggagtttgagaccagcctggccaacatggtgaaaccttgtgtctactaaaaatacaaaaattgtcgggcgcggtggctcacgcctgtaatcccagcactttgggaggccgaggcgggcggatcacgaggtcaggagatcgagaccatcctggctaacacggtgaaaccccatctctactaaaaataccaaaaattagccaggtgtggtggcgggcgcctgtagtcccagctactcggcaggctgaggcaggagaatggcatgaacccgggaggcagaggttgca

SEQ ID NO: 1883466 - DNA, 4001 bp, Homo sapiens; identical to SEQ ID NO: 587989

SEQ ID NO: 1883467 - DNA, 4001 bp, Homo sapiens; identical to SEQ ID NO: 588012

SEQ ID NO: 1883468 - DNA, 4001 bp, Homo sapiens
tagccttgattagcagggtccaaacaaacgcaggcaaaaaaggcattgaattgtagtcaacaacaaagcccttgtctagtcaggacttgttacagctgatggccaccaagtgcagaggaaagaagactagactgagagcttgcatagcagccccagtgggatgggacatgaagcaaaaccactgtaactaccagcctcaatctcctcatctgaaaacggggcaaatggaattgctgaggtccttttcaatgctaaaactgtactgtatagagaaaatgccacatcgtattagacatattatttcttttagctttcactccccaaaataataatttaccatttattgtttaaagaaatgggccatgtggcacattttagcaacgtgattatttagaaaagggtacactcgactgttgaagtttgattgtggatgtgtgtgtacataaataagtcacccaatcttgtttaaatcatcagtgacagctgccagatttgcaaacactaggtattaggagaatataacacttttcagctacttcatgggatattgcttaataagtagaacctggaagatgactctgtttctgtttcactgtctctgtctccttgtctctgtttctgtttctctctctctttcacacacacacacccagcctaggaagaatatgcaataaaatataattacagattcccaggcaagatggccgaataggaacagctgtctgcagctcccagcaagaccaacacagaaagtgggtgatttctgcatttccaactgaggtactcggttcatctcactgggactggttagacagtgggtgcagcccacggagggcaagcagaagcagggtggggcattgcctcacctgggaagtgcaaggggttggggaactccctcccctagccaagggaagccatgagggaccatgccgtgagtgggggtgcactccggtccagatactacgcttttcccatggtcttcgcaatccacagacaaggagatcccttgggtgcctacaccacaagggccctggatttcaagcacaaaactgagtggccatttgggcagacactgagctagctgtaggagtttttttcgtaccccagagttgtctggaatgccagagagacagaaccattcactcccctggaaagggggctgaaaccagggagccaagtggtcttgatcagtagatcccacccccatggagcccagaaagctaagatccactggattgaaattcttacttccagcacagcagtctgaagtagacctgggatgctcaagcttggttgggggagaggtatctgccattactgaggcttgagtaggcagttttcccctcacagtgtaaacaaagctgccaggaagttcagtctgagtggagcccactgcagcgctgcaaagccactgaagccagactgcctctctagattcctcctctctgggcagggcatctctgaaagaaagccagtagccctagtcaggggcttatagataaaactcccatctcctggggacagagcacctgggggaaggggcagctgtgagcgcagcttcagcagacttaaacattcccacctgccagctctgaagagagcagcagatctcctagcacagcactggagctccgctaagggacagactgcttccacaagtgggtccctgacccccatgcctcctgatggggagacatctcccaacaggggtcgacagacacttcatacaggagagctctggctagcatctggcaggtgcccctctgggacacagcttccagaagtaggaggaggcagcaatctttgctgttctgcagcctctgctggtgatacccatgcaaacagggtatggagtggacccccagaaaactccagcagaccagcagaagaagggcctgactgttagaaagaaaattaacaaacagaaagcaatagcatcaacatcaacaaagagcatgaccatgtaaacactccttccaaaggtcaccaatgccaaagaccaaaggtagataaagccacaaagatgaggaaaaaccagtccaataaggctgaaaattcccaaaaccagaacgcctcttctcctccaaaggatcacaactccttaccagcaagggaacaatactgaatggagaatgtgtttgacaaattgacagaagtaagcttcagaagatgggtaataacgaactcctcagagcgaatggaacatatagtaacccaatacgaggaagctaagaaccttgataaaaggttagaggaattgctaactagaataaccagtttagagaataaccagtttagagaagaacacaaatgacctgatggagctgaaaaacacagcacgagaacttcatgaagcatacacaagtatcaatagctgaatcgatcaagcagaagaaaggatatcagagactgaagatcaacttaaggaaataaagcatgaagacaagattagaagaaaaaaatggaaaaggaatgaacagaacctctcagaaatatgggactatgtgaaaagaccaagccaacgtttgattggtgtacctaaaagtgatggggagaatggaatcaagttggaaagcacaatttaggatataatccaggagaacttccccaacctcgcaaggcaggcttaggaaatacagaatacaaattcaggaaatacagagaacaccacaaagatactctttgagaagagcaaccccaagacacataatcgtcagattcaccaaggttgaactgaaagaaaaaatgttaagggcagccagagagaaaagttgggttacctacaaagggaagcccatcatactaacagcagatctctctgcagaaaccctaaaagccacaagagattgggggctaatattcaacattcttaaagaaaagaattttcaacccagaatttcatatccagccaaactgagcttcacaagtgaaggagaaataaaatcctttacagacaagcaaatgctgaggaattttgtcacaccaagcctgcctttacaagagcttctgaaagaagtactaaatatggaaaggaacaaccagtaccagccactgcaaaaacattccaaaatgtaaagaccatcgacactatgaagaagctgcatcaactaatgggcaaaataaccagctatcatcataatgacagaatcaaattcacacataacaatattaaccttaaatgtaaatgggctaaatgccccaattaaaaggcacagactggcaaattggataaagagtcaaaacccattggtgtgttgtattcgagacccatctcatgtgcaaagacacacataggctcaaaataaaaggatggagagatatttaccaggcaaatggaaagcaaaaaaaagcaggggttgcaatcttagcctctggtaaaacagactttaagccaacaaaaatcaaaacagacacagaaggccattacataatagtaaaaggatcaatgcaacaggaagagctaactatcctaaatatgtatgcacctaatagtggagcacccagattcataaagcaagttcttagagacctacaaagagacttagactaccacacaataatagtgggagactttaacactccattgtgtgtattagacagatcaccgagatagaaaattaacaaggatattcaggacttgaactcacctcttgaccaagcagacctaatagatatctacagaactctccaccccaaatcaacagaatatacattctcctcagcatcacatagcacattttcctaaaatcgaccacataactggaagtaaaacactcatcagcaaatgcaaaagaatgaaaaccataacaaacagtctctcagaccacagtgcaatcaagttagaactcaggattaagaaactcactcaaaaccacacaactacatggaaactgaacaacctgcttctgaatgactcctgggaaaataatgagatcacagcagaaataaataagttctttgaaaccaacaagaacaaagacacaatgtaccagaatctctgg

SEQ ID NO: 1883469 - DNA, 4001 bp, Homo sapiens; identical to SEQ ID NO: 588017

SEQ ID NO: 1883470 - DNA, 4001 bp, Homo sapiens; identical to SEQ ID NO: 588027

SEQ ID NO: 1883471 - DNA, 4001 bp, Homo sapiens; identical to SEQ ID NO: 588032

SEQ ID NO: 1883472 - DNA, 4001 bp, Homo sapiens; identical to SEQ ID NO: 588041

SEQ ID NO: 1883473 - DNA, 4001 bp, Homo sapiens
agtgaattaagtctcatgagatctgataggtttatcggggtttcccacttttgcttcttcctcattttctcctgctgccctccatgtaagaagtggcttttgcctcctgccgtgattctgaggcctccccagccatgtggaactttaaacacaatttaacccctctttctcttctcagtctcgggtatgtctttatcagcagcatgaaaacggactaatacactcctggaggcattggagatggtttcaggtagtccccagatgtacttcaaaagtctgttaatattaaattaagtaggtttatatctgagggtaggtattattgctaggaagaaaagccataaagaaagaagtttgttgagcaaaaatgaaagagaatagaagctcataatattatgtcattaggcagtattatatggtagttattagagtgggaacttgggagtcacactgcttgagttcaaatcctggctctcatagtgactagctgtgttgtttgtggcgtgtttcctaacctcactgtgtcagtttttataatggcacttctgcaaggatgctgtgggaattaacatgacatataatgtgttctcaataaatgtaagcgattactatttccgggaatcttttagcgaaggaacaattcattacctgtatatagccacaatttgctgaaagcttacttttgtgtcaggaactgtacacgaaggacctaattttactcatgaggaagctaaagcttagaaagtttcagtgcctttaccaagattataacactaattcttgctccactagaatttaaattcgaattgattgggttccaaagccatgatactaaggatcaaagacaaggcttgcaagatttaagcctcctcttgtatattctctctcaagttcctggctcatagcatgtaccagcaaactcattaaaactaaaacggtctgtttgggagtgaaggatgggagacattgagagcaacagcagaaagggttgggggagtcttgggaaatgcaagggtgcttaggttgggacccgtggcaatgaatggaagggcaagggaaactgtctaaccagaacttaaaaatgcctcttggtgatttacatgaaaagtggcctctcaagtttttctattattcagtgcttctaagatactgttgcactgtaaaccacaaaattaatcttatgattctacaattttactttctaaatgatcacttatttgatggtttttgaagtacagaaagtatttggtcatttaaattatttccttccatggactctgtatcactgagacaaggaatctttgcctttattgtagatatttcaatgaaaatgtcaacacgttgcaaattggcatactttgggtttgccaatatgtgataaagaactttttcaatggaaactttccctcttttcagggccgaaaagacgctctgcaactatacttaagtatcctaggcaactttattcattcaaaaacatcagagcggagtcaaaagcacaaatccatgaattgggcggcgaagtctgactccagagattacggctgaactgggtttggaaagactgaacccgcgccggtgctcctcctgtttgcttggacttaagtttgagtaccacaactctaacctgccacttcagctgcacgggcaggcttgtggggacccagcaactccgtccagagagcggctgagtcagccagccgtccccacggctttgggcagccgccgaaggctcctgctaggcccggctggctcaccgggaagttccctgcctccgtcccgtcagcctccaggagggcgccgccggccgccgtgacttcagcaaggcactactatctccgtcagccgccgcctcggccatcttcctgcccggagtgcaacaaaatccggctctggccagccttccagctgacgccactctgccagggccctgcagcctcggagcgggatagaaggaagccgcagaaaagacgctgaaagttggcgctcgctgacgccccgacgcgctccctccatgacgcatgcgcccaccggccgtgagcgcgggtccggtctccggtgacgtggcggtgaggaggcggagccaagatcagcggcgggagggtgggggaggaagagcgaggtgagcgcggacgtcagagtggagagcggaaggtcagggaggctcggagcggaagtgagactagggagtctgtccgccattgtggacccgagaagcagagagcgagagggggaagaggagcgtgcaagcggaaaagacgggcctcttcctccgactcccgagcgcgaggccctcattttgggttctcagcgaacggcggcagcggcggcggctggaacaatcactcggccaagggcgacagccaactgctgtgagtgcacggggagaggcccaggcagcggcggcggcggcggctctcgggttgcggtgaagaatgtcagccactagcgtggatcaggtgagggagcagaggccccaggcttggcgaaggcccgagccccggagctccaccctcgcgcggggcttcggctcctccccgtcgccgccgctgccggccccataacggtgccccgggcgcaagttgctgcggtgtagctacccgggccggggcgtgcgccctggccccgtagcttgcgggcgggcgggcgcggtgccgcggcgggtgggggcaaggaccggtcttaggggccttaggacagatcctgagggcggcagacatggggcggagaccgggcgagctctgggagacggattccgagtggcgggtgggaggtttaaaggctgggggtggttgggaaattggtggctgtggaggatatggtgggtttttactcctacgcggatagtctaaaataacttgtctttgataatgcctttgattaacacactttttcttttcttcctttttctcctctttaccgcatctttcgtcttgcaacacagagacctaaagggcaaggaaataaaggtgagtttggatttttttttttcttattgctcaatgttgccttaatgttacttttaaactctgtgagggtattttgtttgtttttgctccctcttgggaaaaaatgtaggattagggaaaatattcatcatggctaaggtagccaagttctatccagaacttcggtagttcgttgctttgaagccactttatagaaaccaaagtagtacgagaaacagtttccttgtcagttaagcaggtattggtgtgaacctggtggtatttctttggttttccagtttttctgtgttatgtaacttatgccacaaaaaatttctacatgtgtatatagacaagtatattcttaaagtggacattttgtttgacatgtctggattacactggaaaatggaagtctacatagtattccatcacattaatgaaaattgtactgttaatcactgattctattgaagtcagttgtaatgaggcaacaacatgagagaggttagaactgagtaggcatgccatcttgctctattgttctgattgcaaggtgtgactctatctggtattttataaagggctgagaagaaaatagtttgtgacattttttccaggattttataattttctctttagtaaaagtaccattgaaagtaaagtgtttttttaaaaagtgtgttttgtattaatatggaacagtgcagtcagctgactgaaacattatgacattagtcatgtgacatttagttaagtatagaacaataactgctttcttgggatagtgccaattaaataacatcagagcaaattatatataacattttgtagtgcttgaaattacactaaaattatgctttctgttgatttcagtaacacagtgttagaaattaagatctataatagccttttagatatagattgtctttggtgccctttaaattcttgttagggtatttatttgctattgcaaatttggtgaatttaataggttttggatatgtagattagtttcctctgaattatggaatttgtacataccagttacat

SEQ ID NO: 1883474 - DNA, 4001 bp, Homo sapiens; identical to SEQ ID NO: 588054

SEQ ID NO: 1883475 - DNA, 4001 bp, Homo sapiens; identical to SEQ ID NO: 588056

SEQ ID NO: 1883476 - DNA, 4001 bp, Homo sapiens
agaggttgaattagataatgctgtacagtgatgagaacagtatttggttcagagtaagagcatagtagatgttgatgaccactgttgtcacagttttgtgttatttattttagtctctgggagagaatgtctttgaagcacgtttattttaaaaaagtgaaatgttaattcaatatgctgttaatattcacaaaggtaaatttctttaggtctttggtggaggatcttgtaacacaatgaatgaatgcttatttttgcaaattctaatctaactcaagaggctgacacctgagagtgatttgagacttcttcaagttataaaggaagcacatctggccccaggtgtggttctgttttaattgaatgcctttttatgctacagacagcaaaaagtgaagcttcagacatttgatgtgctaccatggtttcctggcataaaaatcataacagtttgtcactaagggtaaagtcaggtgtttgggtgtggtgagtaggtcagagcatgggctttggggttggatacctggattcaaacactgtctccaacactctcacaggccctgtggccttgggcaagtcacttgtcttccctgagacctgtatgaaatagccttctgtataagatacatatttttaaaaaatctattttatatacatccacacacatatgcatatacacacatatacagatgtgtatatacatgtatttatacacgtgcttatacacacctacacacatacacttatatgcatgcgcgcgcacacacacacacatatgtacagtactctaaagaacttggcacagtccttgtcatgtaattgactgtgtaccggctatcgcatgtcatttggcacttctcattacacattctctgtccttccttttctttctgtctctctctctttgagtagcatgtgaaggcatgttgtttgtaattcttcatggaaccgctgttacatagatactgattccagtacgctattatggccgggaaaagtgaggtggcagaattcattaaagtgattttgctggaaactcatatgaagtcgggagggagtgaagccaatatgagaacaagttcttgggagaagcctttgaatatggcaataaaaactaggaagcagactgctgggttttcaccctggctccctatttaccacgtgtttagccttgggaaaagtcatgtgacctatttgcctcagtttacccatccttggatgaggatgaagtgagagaatagatgtaaatgtcttagaacagtgcctggcatggagcaagcactgtgtgtcatggactattatcattattgattctacttctccttttggaacttgctgctctggatttagagattttgaaacataggctgaaaaaatgacaagaaaagggaagttgtaattgagctttaccacctgggactgtatgtatttttccatgcccaaatcttgcctgcctgttgtgagggacccatggttcagcccagtgattttcttaccccagctgctgatgctcggcctcctggccacatccttgggcctcatgatcagtgggggagtgtcaggaatgtgcactgagatctttggccccagtcacatctgccttcattcttcttaataaaccagcatctaaagaggtttctcttttcaactttctatggttatcttccttctgagaggcttatctcttcaatgtgaacatgtaggatggcatctggggaaatacatgttgggggaaagggaaggaacagctgctgtctttatcctgtgggtcagctccttgtgcagtcttaattctcatattacttctaggagttggagtatttcctccactgggcagattaggggcctggcattacagagtcgtttggtaacttgctcatggttgtgccattggtaagggacagagacagaattcaagcccacattctcaccactgcctggggttgcccattttgttgtagttggtcattaacagcaaccacatggttcttggtaggtctcttggacacttgtccgtcatctgaaggaatgtggttgaggcagatgttgtgccgtgagggcagggattgtgctgattctttctgtgctgttaagtggcagttgtgctttatgctacgataataaaatttctgtgcaactaactgcaggagaagagcagtgtgctgaataagggggtgtgactcagttgaccttacaaaagagatatgctagcctgcttctcattagctctcacgttttcttagaagttgtaagtttaacttcaatcttttcccttactgatatttgcagttcttccagcagaaacgcttttaaaggtgaatgtgttgccgctgcttccaaagccagccagcgctggctggaggccccctcctctacgtgtcgggcattgagattttcaagtaggatctggtccctgccttcagggtgctcttggttttgtgaagggggagctaaacaataaacagtaatggcaaaatggcaacgtgagagggacagtgacgtcaatacaacaatgtactctccgcccaaaaaaaattttcctggaaagggcctgggaggaagggttctgagggctgtctggaggaaggggttctgaggttatgagtagatttgggccaggaaagagagtgaggaggaaattcccagcagagtcaacagcacaaaccaaggggaagctatttgtatttactccaggttattgaattactgaacattttccatgaagcaggtggaccatattgccaacatagtaagatagcatgatttatgaaaacaggctccaggatttttagtttagacatttgtcttttgagcctgcaaattatttttgtaatgaagccaagggtaccaagaaaatgttgacgcagtacaaaaaaaaaaaagatctgctttcccttaatgaagactcttttgatctgataataaagttgctattgcaaagtgttttaaatagaattccgtattttcaaggacagttaacgtggattttttttggtaacagctttactttatcaagatatattttacatagcatacaatttgctcattaaagtgtgaaatcaaatttttttttttttttagtatatccacggagttgtgcaattatcatcaccacagctaatttcagagctttttcatcatcccataaaggaacctggtacccatcagctgccatccctcgttcccctccctgagccctaggcagccactaatctactctctatatctgtggatttgcctgttctttctttcatatgaaatttctttcatttcatatgaaagaaatcataaaatgtgtatattcaatacagtcttttgtgactcatttctgtcacttaattcatccatggtttcctttttacagctgaataatattccattgcatggatacactgcatttcatcagttgatggcatttttttagtggtaatttcaccaagacagtacctcccaactacagagtgttttaaatccacaggattcaatctaattctttgtgaaatcacctaagaaagcatggaggttaattctaggaggttaagtattaacctttccttaaagggttttcaaaaattatgaagcatctaagaaaaattctgaagcatctaagaaaaattattttattcaccacccaccagtatttagctgtgtcattgtcactgttttgacacttgtaccattattgctgccatgaaatggataaaactgggaatttgaagttacaggacagggttctggctctacgtctgtggactgtgcagactgcttggtctttatttccctttacctgaaagtggagtgaaaaatacttccctgctttctctggatggtggcaatgctccagtgggatagcgtgattgtgctttgtgatgtgaaagtgccttatggatgtccatgtggttgatcttaggactgtgatcatggcagggtctagctaggtcaggagaatggtgctgttctgatcaggaaaggcatgggacctggggcgagaccttgcacca

SEQ ID NO: 1883477 - DNA, 4001 bp, Homo sapiens
agccatttttttaaacagggctaaaacgataataattagcagaataaagacatatcggattttcatttcctttcctccttttcccaaccccttcacaaccaaacagcgagaccgcggtcggcacatgctttaactcctcccggacccccgaggaccgctccatgccccccactttctgctccagcgtttttattttcacccaataaagttcgaggattattttttattttttttgtttttttaatgaaccctctcgttttacttggatgtgatcagctgtaagtaaaataaaagcaaaacaaaaaagaggcgaagatcgagtaggaactgcaggggaaatggaaagtaagttttttctttaacttttattgagtagtttctgttaaatttaggtcgagtatcgattatctttccagcctgatcttgcacaatctttgatatttcgctccctctctctccctctccgcctctcttcctctctacccctacctcgctcgctcctgctcgctgtcgcacacatcccctcatcccgaccatctcttccgctctgccccccttttctatctctttccccttttttttggctcaaggttttgctccgctgagggagggagggggcactgagggacctgattttccactttctttaggggggctgcgtttttccggatttaacttttggattaagtggcggaggatcatctacgtttgcttgggcagttttctctccttttccctgtcttttcgggttttgccttccccgcgagccccgggcattctagtggctgggggaagctgtcagctccgcaacggcgcgggcactgccaggggtctccgctcgccccgcgcccctgcaccccgatcgggatgactggtcctccgcactcatcctctgaaagtttggacgttggtcggtggggctgggagcccctctctccctgctctttccctgctttaccctccaccccccaccccaccttattcagcctcgtttttcttcctccttttaccacccgcccctcttccccttctcaagttccccgaaggtcgcttagtgtgcggggctggcggaggcccgggggttcgtgagctctggggaggggattccaagaggctggggtgaacgctggggctggggctgcaggtagacacccgcccaccggagcgggcgcggcaggcactaccgagggctgctctcggcggcgcgggcgcgggcgccgcggaggaaaggcaggtccgttaggaggcgggatcgcccggcctctgggccagggacccgcgaggcggcggctgcttgctccgaacggaacgccgccgggtgtgcgttagaccagcggatagacgcccgcggcttggggtcaagaatcttttcctttttagcaaagggcaaggggtgtgtgcgtgtgcgtgtgcgtgtgtgtgtgtgtattgagtggctgtgttcggctgtgagaaccgattcattcttcggcccccctaaaagggttccatgcctacaaatgaacttcacctccttcgtttctccaagcatcaagtgcgccttctggctgggagcagctaagggaaaagggactggaatgcgccgggtctctccttccttctacttctatccacccccaacccccttctcgctcctcttttctatcagaaaaaaataataaaatctctcatggaattgtataaagtttctctgccgatgtccaagttacagaaggttccctattctaatccccttcccctagaagacggtgcactggtttctatttcttttgttacctgtgatccgggcggggggctcctttcggccgctcgggctggggtccggcccagagaggaggcttctgcgggcgcctttggccgcgacttctcacttccgcgcggttctggtgaggttttagctaccgttcggtgagacaccctccttgtaggtaccaaaggttcagatcgcaaacacggaccccccccacctcgacccctacacacacagagacacactcacactcaacacacactcacagacacacattctccctactcttccccccacctccggcccccactttgtctttcccctccccccttccaaaaaaagcacacacacacatacacacacacacaacaacatccccccccacacacacaccaaacaaaaacccaaagacaagttcactggcagaagatggtggattgacactgactcagacagaggcaggttcaccaggaaatctggccgtcctgatttctgacagttgcatttcctctccttgagtctcccccccaccctttttattaactctgttccatgtttaatcaaggatcatgtagatggcaaaaagagagacagagaggagagaggaagagagagagggggggagagagggagagagagagagagagagggagagaagagacaagagacagaggagggtttttttttttttattgtgttctcctggattttcagtggcttgatccctataaacgtggagtggttaaagctcatatgtagtattatatttttagttgggtggatggatggaagagtgagagagaggctgcggctgccgctgccttttcgggtgttgcttagattaaggctgagacttggctgcgattgggacgcgacagtgacacgggcatcgatcgcttccattgagagcaatgcaaaaacacagcccgggtatgtaacactctcggtgccatcaacacttgttttactttgtatttactggcaaaactgacagagcaagctcagactttctttctgttttggtttttttttttctgtttctttactaactgaagactaaaaacaattgtgtatagaaattgctgaaaagggtggtttaaataaaacagaaaggagatattcggaattatttcactacctctgtgactgactgtgttttggagttttccttttccactgaagagcatattaaagagaatgaaggttttcttttttccttcctcatcttaaaaaaaaaaatccttaagggaatatttgatagttttcaaggtttgtggtttcagtcagcaggaaggcacacaaaaataaaagatggctagccagctgttttaacctcttgcacctggcttcagtgtggggatcataaggtttatacagttctttttttgaatggttttaatatttatggcataaactggggagagcaccactgtgtttttattcagttgctggttgattttggatttttaaaaaagtaaactcatatttaggtgttttcatgtttatggcaatgaagatagggtcaatgaaatatgggggaaatatcataaatctgaaaagtgaaatgtacccaaggaacaaagaaaggtcaggtaaaccagctgtgtaagtcaaagcaatagcaccaactgtggggttagacagggatagtggactctggttctatgaagtgaaagttgccacttaaagttaaaaatgaggcaaacatgttcagtgcttttgtaatcttttgcagtttttagcagatgagcccaaatctgttcattaattttgagctagttggattattttaaaagattcttcatgagcaaaggaaaacataaaggaggctgagaaaatcactgtttaatattgcagaatttactgcttccattctgaccatgagcctaaatttacacaatgaaatttgattatctctaataacaatattagatcctgcactggatggatgagaattgaggtggttttgttgattgcaagggtttaatgttgcatttcagaatctgatgtggtttggcctcccctccattaactggaaaacccctgaggttttacaattatttcttaaagataatacatttaagattgcattggtaggctgaagaaaagtcataaaggcaagaagggaagcccttaataactcttgagattcagacatgttcagcagttagattggctctgacttcaccaagggtcgacaatgtgtcatttccacgaagccaaattgccctctgcctatatgatattaatg

SEQ ID NO: 1883478 - DNA, 4001 bp, Homo sapiens
agtttaagccagtgcttcccatcattttaaaatcacggtgtacacagaaaactgtgatagattatatagctcaccgagggtaaatagagcaggttgtatggagcagaagtaaccagcccagaaacctcagctgctccagttggagccaagcttcccagggcaaaaggtcagcatcaaggcccacgggtaacccattccttcctgctcaaagatggaggcattatgcctgaaattatactaaagtgtagagtcaacaaacaacagaaggaagacgtaagtatacatgaaaactaattgcattgatttttctctctttttttatgaggctcctgggtttcaggccggtttaaaaaaggattttcacagactagaatgagcctgtgagtacataggcaatctcagagtacttcaggaggcacacgtgacacaaactcatccttcattctgaattaatggccaaagaaacgcaaattttgcttaaatctagagtcattccagctcaagttccaccaatattattctgaccctcttcctcaaggctagacaaggttgggaattgtcatttcctttatcttaccttaagctccactatgagagaagtgtgaagaacttaataatcaccagcaccagaacctaattaagaatggatttgaaagctataaaatcatagcaatataagaaaggaagaaagatccatttttattaaaagtacatctttttaatagaaataaagaacatatagcatatggaatgagaatacaaaataagacagaaaaagctgattttaattgtgcttaattaagaactgtacatgtgggattatgaaaaagaaaagaatagttggcttcaattactttttgccaaaaaacagataggatgaaatgtagcttttaaagtataaaattaaatcattcaagaggggttgtactgaggtaaatttcatattttaaacttttgcagctggtaaataacaatgttcaaaggttttacttaagttatttcaaactcaaatttcggagatcaggaggagtaatgtgtaagaactttttcccccaaaatatttatgaagcatcaactgtgagcagtgccgtatttcctgtctatactgacagtctaattcaaaaccaagatatagttaccatgagtgaaactgctcctgtaaactttataaattcaatcagggaagaagggacggggagaaatgaaaataaagcaagcttgcagcacacccagcattaatcattatgttagatgctctgtgatccattcctcatagttgtttgcctattgcctccgaattacatagaccctgttacaagattaccgttccccttcactgctctacagataaaaacttaaaatacctcaaagggaaaacataagttctattctttcaagtcctgcaagccctgtaaaagaatgaaactactgacatcagctagtctgaaggaccccacaagaagctgactcaccaaagaatgcagtttctacatcctcatgatgtcatcccccttaccccaaatatcaacaatctcaatgctccaacctctcaccctccatgatcccattaaaaaccccagccaagtgctccttggggagacgaacttgagggtctcctcccatctcctcacttggtatccggtgagcattaaactctttctctgctgtaaactctgttgtctcagtgtaactgatctgttactgtacagtggtcctgtgtacttgctagtcctataacaggaagaggaggaaaaaagaaggaaagaagtaggagaaagaggagcaggaaaagaaaacatgttgagaagtatttacttgcctcacttcaaagaatatcacagacattaacaatcttacactctggagaaagtacttactctttgaggttcaaattctttgttgataagatgtgtacaggaatttctgctggtggattcattgtaggaaaaggtagaatgcgtactacatactgtaaggaaaacggatgtgctgcggtcaagaataggtcgaagcagacatccggtccagcatgactcagtgagtttggagctcactcacacaactcagctcattaggtaaccacgccacgtgaggcgcattagtaaccagtcacgtgagcgcgtgcttgattcagagccactgtcgtctgtaaaagttataactacactgctgatgctgtacatatggcttatgcgcagagagagagaaaagccatgtcaaaactgtctacgattcccccagtgtttttccggctacccaccactcacccactgactcccctcggacctcagttagaacctgacacataccttgaacaatcctgggcacatagaatgtaggtttgtggttgaataccctcaccacctccatcttagtatatttaaagctaaagtcacagcttttctccttacattaaagcatccttctcttttgaattgttgcattctattttatctgcccaatatttcttagaggcgatgttttcacttcttaccatcacctcatgagttaaaattttgatacttaactctttagttattgtagtatctacctaattgatgtttttcctttctacctttgcaaattgcctgttccaaatataagtagaaacaagcaagaaagaactctgaaggataattcatctcagctggaacccatggcctcataggggcttccttacaatcaactaactgaaggggaaaagcctgagcttggtccatgggatcagttggctgataggttagtaaaagtataaaatggtatgccatcactccagccccacccagggactgcctgaagactgggggtaaaggaacatcctctcaatgagcagaactgcaagcaaacctggttattcatcttggctgcaaagaagagtaatatgaggtaaagatatatggaactgctgggcttgtcttcatgggcagaagcctggtagtggcaagactagaagagagtaaaaatgaaatttgtgttgaggcaagtttatgaacctattggagtagtacaaagggtgtggaggattgctggcacattaatgcctgtaggagaacatctgctacataagaagcactcaacagctagggaggaaggatgacttattctgtggatatcagccaacctcctcaaccacctagattatgcacagtggatatatgagcacaaagtcaggaatagagtctatgcacagacccaaagcatggacctcctaatgttgatctagctactgcttctactgattattctataaagaaaattacatgtatcccagatgtagagttgcattcctgccccctgccagggtaaagacttacagagcttctgctctatccagtggaagttactctaccacacaaataacttagatgcaatgacatattggctgagtatgaggaaagtctagaatgggtggtggagaaaagggatgagaagtatcagctatagcatcaggaccatttgcagcagtgggacctctacctttttccactaactcttatggattaaattgcatcctccaaaaacatatgtcaaaatcctaatctccagtgtcttagaatgtgaccttacttggaaatacagtttttgcagatttaattagttatgatgaaataatactggagtagggtgggcccttgatccaatataactggtgtccttataaggaaagggaaatgtagacacagagacagagacgcatggagaggagaatgccacgtgaagacagacacagatggaagacagccatgtgaagatggagacagaaattggagttatgctacccaagccaaggaatgcctaggagcgggaaaaggaaggaaggatcattctctggaggcttccagagacagcactttgattttaagatttctagcctccagaatggagagagagtaagcttctgtttttttgtgtgtggggtgtgtgtgtgtgtgtgtgtgtgtgtctgtgtgtctgtgtggctggggaggattgagggttttttgttttttgtttgtttgttt

SEQ ID NO: 1883479 - DNA, 4001 bp, Homo sapiens; identical to SEQ ID NO: 588061

SEQ ID NO: 1883480 - DNA, 4001 bp, Homo sapiens
ctttcccaaagttgggacatggcctggccccgaaacgggtgcgcatagccttccttgaactggaggtaaagacttctcctgaagggtttgctggggctccaacctcagtcagtgcgctcagctccagcaagagaatctctccttactctcagggagactgggtcccccacgaggcagccacacgcccccggaggacagcgctcctgacctcctctaggactcccaacattactggggtgctccctccggcggcgccctccgctgggaatacgcagtcttcactcctctcaacaatcctaagttgctgggtcctcaccaaggcagggggctgagatgttccctccagagagccccccgcccccaagctctttcggtggcggagacacccaaaaagagcgagggaggctgtgggtctgtctgtccctctgcggcgactacccagccgcgaggcaggccccgtccctccccctcggacgccccacgccgggtccaccccgccacccgccgccgcgagcgggctcagccccaggggtctctgctgtgaggctgccctcctcccgccaggccccgcgctactcgcctttcccgtgccggccgcggactctgcgctccagttcccacccgcagcccagagtctccgggcccgctggtcgcggagccggctcgcgccactacctgcaggggccgccgcgcctctcagcgccacgccgccgccatcttgcatttcaaaccggctgcacttttcagggagtcaactctgacctgtgaaccctaaacccggaaccgctcggcgggcccgcaaaggggcctcagcagctcggtggccccgcggagtgtggggactcagggtgggggtgcgaggagaggcgcgcgccccagcggccgtccgggggcggagggggaagggagagagccggccaaggcggggccctcccgcgcgcgcgtcctccgcgcgcccccaccccgtgcggcgccgagctctccacgcccagaccctgctactccactggggtccgaccccggcccctagtccggggattggcgcaccgcgggaggtagggaggcgccccgcccccctgtcaacagaagccccgccccagactgcggaagctccgccccctgtcaggagacgccccgccttcccagggctcgaaatggccccgccctttgcctgcgaccgctccgcccgctgtggactgaagcctggtcttctctcgggtcagcacagaaggcagccccgccttccttgcgctccgccttcctaatgtcactgctggatcgtgagaggtaagcatgctggcttctactgaaacgccccttgtcatcacacgcccatcccctggggcgacacgacccaggccccgcccctcggggggctgctgcgagtccggccgggagcccagcgccctgacagaagtcgccgcgccccttgtcagcggcagctccacctctcctcgcttcggaccccgctcctccgcgggccgcagctccacccgctgacaccgaaagttcagttcagctgcactcagaaccgccgggcaaggcggagccgccctctgcccctcagccgccctcctccctgcgaaccgccactcgctcttccagaggcttctgtccgagtcgagggcttcacatcccgtcggctttcagggaaccagccccgcagcggggccagcgagggccaggggtttcgggaacactgcccggcgtctccgcccctccctactcactttccctttcccccgcaccgcggtcagaacgtggaggaacagaaccaaagcggagagcggcgactcaccctccagctgctccacacgccgggccttggacgctcgagcgctcctgggccccttgacgttcactccccacccccatcccagtcgcggaccctttgtgcagagctccgctgagccacagtaatcctaaaagcacagcagagctccgctgagccacattaatcctaaaagatgcaattgcttcaagtggaagtctgattttttttttttttttgagacggagtctcgcgttgtcgcttaggctgaagtgaaatggcgcgatctctgctcactgcaacctctgcctcccgggttcaagcgattctcctgcctcagcctcccgagtagttgggattacaggggcccgtcacctaacgccggggtaatttttgtatttttggtagagacagggtttcgccatgttggccaggctggtcttgaacccctgaactcaagtgatccgccagcctcggcctcccaaagtattgggattacaggagtgagccaccgcgcctggccgtggaatctgatcgttgaaatcagtgttctacaatattctttttatttgtaggtttcatcctggaatcctaaaacttgtgtaggataaggcttaattttataagcaaaggtattcaaccctgccacattcaatgccctgtatttacaacaaaaaatataacactgctttactcttctggagttaaattcctaatgcaaactatctctacaaataatttcaagaaaccaatgtaatgttctaataaaggtgaaaaaggagaaagtagttcataataaaatactgtatgtactaatatcaagaaaaattttaaaataacagagttttcacaatgtaaatactctgccaccaatagaatgcaaaacaaaaactgtcccggcaaaatttcagtatgcccctgaggggcagtactgccctcgctgggaacctctttagaccgaggaagaggtctggaaatgcttcaaatagagaaattcattcttttgtctacacagttaatgacaagttttcttttgttgttgttgttgttgttgtttttgagacggagtctcgctctgttgcccaggctggagtgaaatggtgcgatttcggctcactgcaacctctgcctcctgggttcaagtcattcttctgcctcagcctcttgagtaggtgggattacaggcgcgtgccaccacacccggctaatttttgtatttttagtacaaacggggtttcaccatgttggtcaggctggttgcgaactcctaacctcgtgatccgccctccttggcctcccaaagttctggcattacaggtgtgagccaccacacccggccgatgactaggttttgtgtgtgccagtatatgccaggcactgtgggagatgtacagctgagttagtcaactttcctgtcttccaggaacttacaatcaagtagccaagcaaaaaacaggagcataaagatgtgtcaagtgaaagatgagaagagacccctttagggatgtggagctgttgactgtaacttcacattttacccccacttcctccctcactttattcttccttctcctcttctactttagcactagtttatagagtcacctcctcctccctataagctgtctccctggttcactgcccaatgccagccatccagaattctcccagtttagggtcatgcccacagggcaattctgtccaagaaaacacagtgctgagaacaatgtccttagctgaattgctgccaattacttggtatccttctacaaagcaagactgttatcatcaccactcaaaaaaaaaaactggttgcagacttaagcaatatgaatatatgtttagcatagcagattgtgccagcccacataaatctgcttagagatcaggctcacagagtaacttgtttttattaaaataaattcatttataaaaattgtaaatatgatggattttaacagctgcgtggctccaggagtttttttttttaaccatggattggcacaattagaagtctagattttttttatgcatatgttttgcagtttgtcatactcaaactggtatggcaaaacttcagtactcttagagatagaagttgttcagcaggttttaaaaagcacagcacttttgctattcagagcctcttccacctttggaacagtgaaaaaaaaatattggtaggaaatgaagagctttggataaaaagttctaagctctggtgtcatct

SEQ ID NO: 1883481 - DNA, 4001 bp, Homo sapiens
ggtaccctctggggtgggtaccttgtaagccttagggcaatgggttttattctgaatggatgggaagtgcctggaatgtctgggaagagtcatatgacctcagatgtggtctctacagctgctgctttgagggtgctttgaatagactatggggtgggggtaaggaacaaaaacaggaaaccagtcagaaggttctagcaacaatccagctagagatgaatgtcctggaccagactggtggtggcagaagtgacaaaaagcagccagattatggatacatttcaaaggtaccatcaataggatttgcagatgaatttcatgtaggacgagacaccaagatttttggcctgagcaactgaaattatgaaatttccatatactcaaaagagtaagactgcaaaaagattaaatgtaaaagttgtcttgtatacagtaatgtttaagatacctattagatttataaatggaaaattagggcatttggatatacaagttgaaaattcaggagtgaggttgggctggctgggtatatactgaaaactgtcagtacacagatgacatctaaaaccacaaatctggttttattttagcagtgatatgtgtcactcccacaaaagccttcccaattggcctcagcatacacaacaagtcacctccccacagccctctacacataaacaaattccttagtttagttcaggaggaaatgcgcccttttccttccgctctaggtgaccgcaaggcccagttctcgtcaccaagatgttaagggaagtttgccaagaggcatctgaaaggaaataaggggaatggagtgaccacaaaggaaagccaagagaacgttggagacacgttctagagccctggcatttcacaacaaactctggaacaaaccctgtctcatcatcatttaagccttcgttggacagactttctgactggcagctgaacataagctcattgatgtcttcacagtctccagctgaggcacaccttggccagagggaatcttccagtcctcagacagggcttgcctttgactggcccctgctgcttatgccctttgtgaatcacaagcggtacctcttagtgtactctgccttcactcctaaacgcatgtggcaggcatgtaatgctgctattaggcgcatgggctctggactcgaataggactgagttctaaccttggatccaccacttactcatgcagaggtctcaggtaagtgacttgagtttttccacagaccataaaatgagattgacactactccttaagtgactatattgcgttaaatgagaatatgtataaaatgctcagcacagtattagcaaaccgcaaacaatactaagtctcaattgtcctaatcagtaagtcagcatttaccgagtgcctactaaatgaatgagtgttgagcttgttccagcgcatctgtgagatatcacctcctgcctattcctttccttccccaaaacagaagctccttcacaccacagctctcacagctttaccctttcaatcaatacattcctgctaaatgaaatgcacttttctctcttctgaaaaaaaaaaagcacaattcagctcatcccctgacattgcccaaactcccttcctctgcgagatctttttacccatctggcttccctgcctcagtgttgctcgggagcgtggatgacagcccgtagacctgcacgccccgctgcctccgctcgtgcctcacgccaccctcgccctgcccgcgcctcggccaacacaaagcgggcgctcagcaccccgcagccgccctcgacgcgtcctctacgggtcactgaggccgcggggcccgacctgcggcctctcagaaccacggcaccgcccctgcccgccccagcgccactccggcacctccgcaccaggcgccctagctcgggactcactcggctcgaccacgggaagggaaggagcgcgaacgctaaatcccgtgccgcggggagccaagccccctgggccggaaatgcctaatctgaacttccgccctgcccttcagctcaccaaccaattgaattccaggtttcgtgggtccgctctaggcggctgatagtactcaatgctccggcagtcctgctccttcccggttacgtcccttccagcccttggcggagtctgcgggcgagagggcgcaggtgcagaggtgccgccggcggcgtgcggctgcgaaggaagggaccccgacaccgagcgttcctgcggacgctcctcaaccgggggttgttctccgtgctctggacccggcccttcctcacctaggacgtctcgcggtgcactgtccccctctctcgggcgacttttcccccacctccaagtagtgatcaagctcagaatccagctcgcgcccgctgtgcacctagcacttcccacctgtagtcttttgacctcatcgccccctctagaaggctgctgccatcgcttaaatgaggaagccgaggtgcagagaggtttcagacctattgcggtggagctggagttcgagaaccaaccactcggtgctgagacgcgcttgcggaacgggcggcgggcgggggtgaagcggagtgaggggagaggccaggtgcgacccgggcaggtgaggagcacgggcccggagggaggacttacgagaatggaaaggaaagcagcccgtcttcagtgggacagtgggagcattaagatgtcagagaatgagcagttgtgggaagagccatagggtattttattttttagagatggggttttgctctgtcgcccaggctgcaacctcgacctcccgggctcaagcgatcctcctgcctcagcctcccgagtaactgggactacaagcaacgcgccaccacactaaatctttaattttttggggggtggttgaaggtgggggcgggacagggtctctctccgtctcccaggccagagtgcagtggcgcaattacggcccgactcctgggctcaagcgatcctcccacctcagcctccggagtagctgggaccacaggcgcccaccaccacgcccagctagtttttgtatttttttgtagaggtggtgttttgccatgtttcccaggctggtcttgaactcctgagcgcaagtgatccacccgtctcagccttccaaagtgctgggattacaggtgtcagccaccacgcccggccctaaatatttttttaaaagttggatttttcatggtgcccaagggaagagacactcctttccttttactaagaccatttcttttagaaaactttgtaataggaaaatctttctttgccctcttgaaatgtatgtaaattttttaaaaagctgcataagcctcttgccagttttataaaccaggaatttctttcttaaggacctttcttaaggaccttggagtgatttctttgaaataaaaaggccaaggaagatagcttccctccttgtctctgtgggagtttagcagatggctggctccaagttgcaattacctgcttgtcatagagacatgaggtttattttaactttggataaaggcagttagctaacacagatggccgccccaagtaccacgtacctgccttctcgtttagaaacactgtgggcattaggggcaactcatgcagaagacccaggaatcttccaggtatactccatgggatgcctgttccactctggcccattggcacaagctagccttttcttttaaggatagtggggtccgttctgagagcggcctttgcaacatctcacttcccctgttgactgttatttcttttcttcctgctttcctactcccttgatcccaaactcactaggggtatttagtgagcacttactgttgcagtaagactctagccaaggaagacgaagagacagttggagaccaaagagaacttcaattcgggcacccgagcctagagcaggctcatgcccaaaatggctaccgacccagacaaagaaagcaggcttgcttatatgtcgtttcaggcgtgaaaaacaaggcaggatacaagt

SEQ ID NO: 1883482 - DNA, 4001 bp, Homo sapiens
gcctgctctaggctcgggtgcccgaattgaagttctctttggtctccaactgtctcttcgtcttccttggctagagtcttactgcaacagtaagtgctcactaaatacccctagtgagtttgggatcaagggagtaggaaagcaggaagaaaagaaataacagtcaacaggggaagtgagatgttgcaaaggccgctctcagaacggaccccactatccttaaaagaaaaggctagcttgtgccaatgggccagagtggaacaggcatcccatggagtatacctggaagattcctgggtcttctgcatgagttgcccctaatgcccacagtgtttctaaacgagaaggcaggtacgtggtacttggggcggccatctgtgttagctaactgcctttatccaaagttaaaataaacctcatgtctctatgacaagcaggtaattgcaacttggagccagccatctgctaaactcccacagagacaaggagggaagctatcttccttggcctttttatttcaaagaaatcactccaaggtccttaagaaaggtccttaagaaagaaattcctggtttataaaactggcaagaggcttatgcagctttttaaaaaatttacatacatttcaagagggcaaagaaagattttcctattacaaagttttctaaaagaaatggtcttagtaaaaggaaaggagtgtctcttcccttgggcaccatgaaaaatccaacttttaaaaaaatatttagggccgggcgtggtggctgacacctgtaatcccagcactttggaaggctgagacgggtggatcacttgcgctcaggagttcaagaccagcctgggaaacatggcaaaacaccacctctacaaaaaaatacaaaaactagctgggcgtggtggtgggcgcctgtggtcccagctactccggaggctgaggtgggaggatcgcttgagcccaggagtcgggccgtaattgcgccactgcactctggcctgggagacggagagagaccctgtcccgcccccaccttcaaccaccccccaaaaaattaaagatttagtgtggtggcgcgttgcttgtagtcccagttactcgggaggctgaggcaggaggatcgcttgagcccgggaggtcgaggttgcagcctgggcgacagagcaaaaccccatctctaaaaaataaaataccctatggctcttcccacaactgctcattctctgacatcttaatgctcccactgtcccactgaagacgggctgctttcctttccattctcgtaagtcctccctccgggcccgtgctcctcacctgcccgggtcgcacctggcctctcccctcactccgcttcacccccgcccgccgcccgttccgcaagcgcgtctcagcaccgagtggttggttctcgaactccagctccaccgcaataggtctgaaacctctctgcacctcggcttcctcatttaagcgatggcagcagccttctagagggggcgatgaggtcaaaagactacaggtgggaagtgctaggtgcacagcgggcgcgagctggattctgagcttgatcactacttggaggtgggggaaaagtcgcccgagagagggggacagtgcaccgcgagacgtcctaggtgaggaagggccgggtccagagcacggagaacaacccccggttgaggagcgtccgcaggaacgctcggtgtcggggtcccttccttcgcagccgcacgccgccggcggcacctctgcacctgcgccctctcgcccgcagactccgccaagggctggaagggacgtaaccgggaaggagcaggactgccggagcattgagtactatcagccgcctagagcggacccacgaaacctggaattcaattggttggtgagctgaagggcagggcggaagttcagattaggcatttccggcccagggggcttggctccccgcggcacgggatttagcgttcgcgctccttcccttcccgtggtcgagccgagtgagtcccgagctagggcgcctggtgcggaggtgccggagtggcgctggggcgggcaggggcggtgccgtggttctgagaggccgcaggtcgggccccgcggcctcagtgacccgtagaggacgcgtcgagggcggctgcggggtgctgagcgcccgctttgtgttggccgaggcgcgggcagggcgagggtggcgtgaggcacgagcggaggcagcggggcgtgcaggtctacgggctgtcatccacgctcccgagcaacactgaggcagggaagccagatgggtaaaaagatctcgcagaggaagggagtttgggcaatgtcaggggatgagctgaattgtgctttttttttttcagaagagagaaaagtgcatttcatttagcaggaatgtattgattgaaagggtaaagctgtgagagctgtggtgtgaaggagcttctgttttggggaaggaaaggaataggcaggaggtgatatctcacagatgcgctggaacaagctcaacactcattcatttagtaggcactcggtaaatgctgacttactgattaggacaattgagacttagtattgtttgcggtttgctaatactgtgctgagcattttatacatattctcatttaacgcaatatagtcacttaaggagtagtgtcaatctcattttatggtctgtggaaaaactcaagtcacttacctgagacctctgcatgagtaagtggtggatccaaggttagaactcagtcctattcgagtccagagcccatgcgcctaatagcagcattacatgcctgccacatgcgtttaggagtgaaggcagagtacactaagaggtaccgcttgtgattcacaaagggcataagcagcaggggccagtcaaaggcaagccctgtctgaggactggaagattccctctggccaaggtgtgcctcagctggagactgtgaagacatcaatgagcttatgttcagctgccagtcagaaagtctgtccaacgaaggcttaaatgatgatgagacagggtttgttccagagtttgttgtgaaatgccagggctctagaacgtgtctccaacgttctcttggctttcctttgtggtcactccattccccttatttcctttcagatgcctcttggcaaacttcccttaacatcttggtgacgagaactgggccttgcggtcacctagagcggaaggaaaagggcgcatttcctcctgaactaaactaaggaatttgtttatgtgtagagggctgtggggaggtgacttgttgtgtatgctgaggccaattgggaaggcttttgtgggagtgacacatatcactgctaaaataaaaccagatttgtggttttagatgtcatctgtgtactgacagttttcagtatatacccagccagcccaacctcactcctgaattttcaacttgtatatccaaatgccctaattttccatttataaatctaataggtatcttaaacattactgtatacaagacaacttttacatttaatctttttgcagtcttactcttttgagtatatggaaatttcataatttcagttgctcaggccaaaaatcttggtgtctcgtcctacatgaaattcatctgcaaatcctattgatggtacctttgaaatgtatccataatctggctgctttttgtcacttctgccaccaccagtctggtccaggacattcatctctagctggattgttgctagaaccttctgactggtttcctgtttttgttccttacccccaccccatagtctattcaaagcaccctcaaagcagcagctgtagagaccacatctgaggtcatatgactcttcccagacattccaggcacttcccatccattcagaataaaacccattgccctaaggcttacaaggtacccaccccagagggtacccacctcttttaccctcccctagtctgtttgagcccctctggcttctttgcccgttcttgaacacaggtgtgcttgcatctcagagcctt

SEQ ID NO: 1883483 - DNA, 4001 bp, Homo sapiens; identical to SEQ ID NO: 588089

SEQ ID NO: 1883484 - DNA, 4001 bp, Homo sapiens
atggggcccataggaggtattgggtcatgggggtagatccctcatgaatgacttggtgccctcccctcagtaacgagtaagttctcactctgctggttcatttgagagctggttgtttaaaaagagcctagcaccttttttgcttgctctctcaccacgcaacacacctgctcccccttcaccttacaccatgatgggaagcttccttcggcctcaccagaagcagatgctggcaccatgcttcttgtacaacctgcaaaaccatgagctacataaacgttttttctttataaattaccaaacacaggtattcctttatagcagtgcacaatgaactaatacagatggggtttcactttgttgcccaggctggtcttcaactcctgacctcaagcaatcctcccacctcagcctccccgagcgcttcttgaacctcctaatactctgcacagtatctcagtgcagacattcctgtcttaacacacaggaccagtcaaattcccgtgggcagccccagggttctgtgggatttcttgaacaccaactcttcttccttctcccaagaaagaaaagcaaaataagtgaatggaagggatgtgtgctatagggaaactttggagtgttttctaattcatccaagaaagtcagcccttcagttctttacctatcacagaacaggtaagtagcacccgcctcatcatcgcactgtggtggcgcccactcccactggggatttgaacacagggaggaagctgggctctaagactacaggagcctctgcttgggtgacagccaaggtgtgtggctgctagcagttcttcagccactccagtttgacagaagcttttcttttcatttatgacaccccccaccttcctgagatcttcacagcagtagcaaaccagggaatcttgtaaaaaaaaaaaaagcgatttctgtgtagcaggatgttggcccaagctgtgagggaagttaactccaaaattctttctagataagctgaaaagggaagtggtctgtggtgtccagccactcaacaggtacccaaggtgtagaatgagtttgacattttgtatgcatgaaggagcaggtgcaaaatgcattataataagataagcaaagaaacagcatttcaccacaagtgacccatgagaatgaaaaagagctttttccaaaccgtttgaaaatgaatttcagtgatgcggatgggaattgtatagatgtgtttggtgtatatgtgtgtatatacatacacacgtaagttttttcaatctgctgtgtgtaatttccaaattcaaatgcagcatgtattttattttgggtcccagtggctgctgaaacaaaaatctcaggccccagaaaagcctcttgtcatctctcagatgggttccaaaaagaagcccaaaattatccagcaaaacaaaaaagagacctcgcctcaagtgaagggagaggagatgccggcaggaaaagaccaggaggccagcaggggctctgttccttcaggttccaagatggacaggagggcgccagtacctcgcaccaaggccagtggaacagagcacaataagaaaggaaccaaggaaaggacaaatggtgatattgttccagaacgaggggacatcgagcataagaagcggaaagctaaggaggcagccccagccccacccaccgagtaagtatgggccacctcaccactgagaaccgaggcacagcgacttcaccaaggcctgtctccttatggaggctggtggcctcaccgcagtctctccatcactttaccctgatgtcgtctgttcctttgtttactcgctgttacttgttttcccctagagtgtgcgcatgataaggcagggcctgcttcttccgagcgttgagcagagctcagcatttagtgggtgccagtacacgtgtgtggaaggaaagcgtgctgaagccagaaagacccaagtatgaggcctgtccctgcttctcgccagttgggtggtttggggcaagtttctgacgtcctctgtgccttgtggtagtcatggtggcatcataaggagattgtgaggttggcactcttggctcagtgcctggtgattacttcaaccctgtgatggagccaggtgtggtggctgttgcctgtgatcccagctccttgggaggccaaggtgggaggatcacttgatcccaggaggttgaggctgcagtgagctgtgattgcactactgcctccagcctgggtgacggagcaagactctcaaaaaaacaagtgaaaagaataaaccctgtgctggccacccacgtggggtggaccgggagtcagtggccttctctgaatggttcagctggaggtgacgtgttcataagttacagctggcttcatgttgcctgggtgttcaggacacagtcgctgatggctgaggaatgagccatttgggggcctccctgtgttgtgctaggcaggctgtctgggatagagttcagtgaggtgggcctgctcctccctcttgaggcttattgtcaagtgcagtagacagactgtaaactgcagctgttgattaagtgtggtcaggataaatctagtgaggagaaggtattgggcgcctggaacaagagggacgtgtccattcagtggggccaggaatggcttttctaaggaaatgacatttaaccttagcccaagagacagattccccaggcaggtgttacgtgcctgtgtgagcttcctagtacggagggcaaggggttctgtgtttccatcttacaggcattctgtctgtctgtttcctaagtgttcaataatgaacgtgttaccttcataattaaaatgttagcactcattacacttgggtggtgggttatgtgtttctgttttatattctttgtgtttgtctgtgttcctaaatcttgaataatgagtgtattttctaattaaaaagaaaagagatgaggccaggtgctgtgactcacacctgtaatcccagctctttgggaggccgaggcaggtggatcacttgaggtcaggagttcaagaccagcctggccaacatgacgaaaccccgtatctactgaaaatacaaaaaattagccaggcgtggcagtgggcgcctgtaaaatcccagctactagggaggctgagacaagagaatcacttgaacctgggaggcaaaggttgcagtgagccaagatcatgccactgcactccaggttgggtgacccagtgagactccatctcaaaaaaaaaaggaaaatgccaagatgatcaaaatagcagaagcagcagggccagcagtcggggtgtctggggccagcctgtgggagaggcaggctgtgccatcgctccactcacctgcacagtcagccccacagccccaccccaccagttgcactagggtcttctggtgatcagcctgttatctttgccttttagggaagacatctggtttgacgacgtggacccagcggatatcgaagctgccataggtccagaggcggccaagatagcgaggaaacagttgggtcagagcgagggcagcgtcagcctcagcctcgtgaaagagcaggccttcggcgggtacgctggtctcagggagtggggtctgctggggatgcttagccgtggagggcggggcttcttcaaggaagaggatgctttcctctccctgaggtgaatgaggcaagcacctcccagggtcctgctaagaaccaggaccacacagagcttgtcacgtgggtgcaaatgagtgaggggcagagagcttttctctgctgacacttagtccatggatccctggggctctgacctggagccctgtggcctgccgtgtttattaaactacagcctttggttacccttcagcctgacaagagccttagccttggactgtgagatggtgggcgtgggccctaagggggaggagagcatggccgcccgtgtgtccatcgtgaaccagtatgggaagtgcgtttatgacaagtacgtcaaaccaaccgagcccgtgacggactatagg

SEQ ID NO: 1883485 - DNA, 4001 bp, Homo sapiens; identical to SEQ ID NO: 588108

SEQ ID NO: 1883486 - DNA, 4001 bp, Homo sapiens; identical to SEQ ID NO: 588122

SEQ ID NO: 1883487 - DNA, 4001 bp, Homo sapiens
acaagaccacagtatgtttgtgtgtatgtgcaaacaaattgattttttttcctcactggctataacaatacatcctcacacaccaacatacttctccacctattgccaccttcaatggccacatatccattctatgggttcttgttaacataaatgctgagaaaaacaaagtgcatgtatctctattttctgaaggtattttaatacaatggaattggtgggtaaagggcatatgcatttttaaaatgtggtaattatctccaaattatctacttgaaaagtcatcagcaacttaaacgtcaagcagcagtgtaagtaccactgctcttcattctcacaaacactgtggatagaacacagtctcattcctcttttaacttaaattctcttatgagaaacactaaggattttttcatatgtacataagtaacttgtggatctgcaaaaaagtactttgctcacttttagagttcttttcttgtggatttgattggaaagaattccctgtaaaataaagatgtgctttttatctgtatatatataactgatatacatataacatattatattagtaatatatacaatttgttatatatataatcagtaatatatatcatattatatatgataaagaataacttccctgtaggatgaagatacacttttcatctgaatatatatttttatatattagtaaaaatatatattgtaaatatttttcaagtgtgttaccttttgttaatttttttctgatacacaggggattttaatttttagtttgctaaatcaactttcagaatgcctgcttgcgaggtcattcttaggaaggcctttattaacataaaatgtacctgtatatataagtctttgtattttcttctggtacttttctcattttgcatatgtaaaaatttcagtctaaattccatcaggaactcatttttgcgacataaaattccattagttttcttcacacagcaggcatgttattaataactcatcctttcctactcatctgaaatgttaccattatcaatccctatgtatatatcttacatatatttcagtgtttttggatttcctattctgttgcatttatttatctgtgttttcagctgttagtaaataattaattgtgagaattaatagcacattttgatatctagaggagcaagtcttttttcactccattatgaacatttttaaatatcatcacaatagtaagatagacagtgtcatgcaaaaatgataaaaccttgatatttttatttggtttatgtaaatctgataaacatagagctcacattttgagaaaaatgagtcttctcattcaaggaacccacgtcccatttccaagtgtccctctaagaagccccagtaaagaacctatctacctaggtggattcggatttaaaactgacacagggtttaatttgagaactcttcgcctactgaaaatggctcatggtatttttgacatgggaatgagttctcattaggcacctccctatcatgtatatggccccatgttttaaacgtgtatatgcttaactttgtgagttaaatcaaattatccaccaagtgctacagacggggaattgccagcgatggaaagcagtctgaggctccatttggctccgcggctccgagggtgcccggggccctccaaggcccccgccccaggggctgcagggaagccgggcctggggccccctcccaccgcaggctgagcccccgatacctgtcttttctgtcgcgggcgtccaagtcccggaacctgcgcgtcaggcagtgctccacctccgcggcgtcgcccttgatggcagccctgtggatcttccgcagttcccagtcccggatgtggtacccccgaccagcgtactcttggtccatggagtccaggagcgcctggcccaggcgtctcccgaagctgaagagcttcctcatggtggcgacttttcagacgcccaccacccgctcctgagccgccgcggctcctcgtggcctttccacccccacccagccccaaatccgccatcccccccacaacccgcgatccacccccaaatccaagatccacccccaaacccgcgatccacccccaaatccaagatccaccaccaaacccgcgatgtagctcagaatccgcgatccagcctggtccaccacagccttcagcagcgacactcgcagcctccgacctctcagaccgagtgagctccacgaagccgttaagcgcgtgcctgtagctgaacgctccgatctctcagacagcgtgggccccggctaagcctttaggctcgcgcctgcagctcagcgccagctcggactccggaaaccgctcccgagcccgcgtggcctgcagggggctgctgcagctcgggcgcaggcgctgctggcttgcgggttctcctgggctcgcgcgggacgtctcggaatcgcagacgtgcatcccttccggcctgagggccctcctggccgtgactcccgccccgctcctcctccaaagagagatcggggccgctgacaggggccctccgtagccatgggggatgggactggggggtcggttccagccacggtgcagccgccgccgggcagaccgccgggcttggccgcagccacggcgacatctagccccggttctgcgaggcttgggagcgccagccagcttgggagtggccaggcagctgttgccagcaggtagagggcgcctgcagcttgggcgcccaggtggtggagaatggcctgggctgcctctagatcgcgagtgcacctggcctgagagcccgccaggccctgcccccgcccagctcctcctctgctggagctggggacctctagccagtggccctctgcagccaccggggttgggtctgagggccggttcctgcccctgtgcagccgccgcagggcagaccgcctggcttggccgcagctacagggacctctagccccggttttgagatgcggggagtgcgggcgggctcggggattgcctggaggctgctgtctgcgcacagaaggcggctgcagcttgggtgcccaggcggactggaggtgcatgacctggtcggcctcgggatcgccagcgcgcccagcctgaggcccccaggccgtgtctccccccactcctccaccggagggagatcggggccgctggcataggcatttggcagtcaccccggatggggttgagcaggggttctcagttctcgtccctgtgcagccgccgcggggcagaatgcctggcgtggccgcagccactgggacaccacgcgggccgggcaggccagggggtgaaagcgctgggagacgggtgccttctcgccctgaggcgcctctgagccccacggcttgtcggcctccggcgcgcagggctccccagcatcctgggcgccggcccgctgcccgcacgaagtcaactcagagaggatgaacttcggttgccttgtctggctgggctgccaggcggggcagctgacctgttgatcgggtggcttttttcatcttcttgctcacaggacagcgcgctgggaagccaggggccgcggggacctggggctggaaaccacatctgcccacagccacagtctcctgcacctgtcatcctggcggcgccctggcgtcggagaagcagcagacgcggagctcctgcagctggcaccgctgcagcaaccggtcccggtgcaggcgtcagtggaaggcggcctcctcgcgcggctcccgtggcctcaggaccaggggtgcggccagcaccgccctcacgccccgcacctcgtctacattgtcctccctggaggcggctggacctgagtaaggctcacagcgatcggcccccgcaaggactggcatgcagggctcaggatcccgcactctggccctgcggcaccgcacctttcagcagcagctggaactcctgcagcagcgccttgggtgggatgctggggcccggggttcctggcaggccgaacttcagcttcttgtcttggcccctgatc

SEQ ID NO: 1883488 - DNA, 4001 bp, Homo sapiens
tagagacagggtttcactgtgttagccaggatggtctccatctcctgacctcctgatccacctgcctcggcctcccaaagtgctgggattacagacgtgagctaccgcgcccggccaatcacgcttctttcattatcctaagtgataacataatttgataattggtagagcaattcacgtcactttctgtccttcttaaataatgcttatttttgttcttctttttcacttagttgtagattatatgccaaatttcatgaaataaatattttgtagtttgattactgtcgtattgaatatatagataatactgcagaaattaaaataaacttactattggattattggattcactttttcatgatcatgttgtatatctttacttatttcaaacttttttttttttgtttgagacagagtttcaccctgtcgcccagctgcctggagtgcaatggtatgatctcagctcactgcactcccgggttccagcaattctcctgcctcagcctcccgagtagctgggattacaggcacccgccaccacgtccggctaattttttgtgtttttggtagagacggggtttcaccatgttggccaggctggtcttgaactcctgacctcaggtgatccgcccacctcggcctcccaaagtgctgggattacaggcgtgagccaccgcgccccttacatttatttatttatttagagacagagtctagctctgttgcccaggctggagtgcagtggcatgatctcggctcactgtaacctctgccttccgggttcaagccattctcctgcctcagcctccggactagctgggactacaggcgagcgccaccacgcccggctaaacttttgtatgtttagtagacctgttagctggaagcatggtgagcaccatttctggacgctcaggctgtgtcgggcttcagtcgtctccaccacacaggtacagcagcgctttctggtagtcgcccttagtgtcttgctggatgtaatagtacagggacttgccgtactttctcttgaattcagacctaattttcaacatgtccacttcactgcgggagaccatgattctgatcaggaccttatctcgcgtccccttgcccttcatggagtcgtacagctgatcagcaaaatacaagggcttgttctgaatgcgctggaccaggttcaggaaagcattttccaggtctcctttaacctctttcctgatgctttccaacatgtcataagggctgtaactcttgtacctatcaaatactttctggaggtggggcacgctccgctcggtcatgatgctgatccacttgggaacatcagttcctttcctcttcactccagcgtcatagagatcctgggcatcttggtcaatcagttcataatcaatgacagagccatcctctgctcttctaccctttgccagggcaaccatcagcttgcggaagtcaccagatgtgtccgaaataatgtccttctccagatcagtcttgtacatttccttgtagactctgttaatttcctgcagctcctggttggttctggagcagatgatctcaatgagagagtcctcgtcggttcctagccccttcatggaagcttttagctcagaagcgtcatactgagcaggtgtcttcaataggcccaaaatcaccgtctccaggtggccagataaggctgacttcagtgctgatgcaagttcctttttggtccttctctggtaggagaagacaatatcctgtctctgtgcattgtcgcggttggtcacaatgttgacaatggtgacctcatccacacctttggtcttgatggctgtttcaatgttcaaagcatcccgctcagcatcaaagttagtgtaggctttgacagacccatatgcacttgggggtgtagagtgatcaccctccaagctgagcttgcacaggatttcgtgaacagtagacattttgaaggaagctgggccgtgcgccgagagctgagagcgtccccaaatgctgaacacaggtgaagctcttgagtccgcacttgatgagcagcagatattttacagaaagatccacatcaccctctagtggtcaaaggggcgaattcatccgatgcccgctgagctctgcctcggcctgcctgggtggggagtggcccgccccgcagcgaggcagcagggaggcatcccaagtatcagagcggaattaagaaaaaagcagcacttggtgtggtaccaggcacgtactccacagcattattactagcaattacttacacaattactcagccattagtctaatgccgatggtggtttatcagtgcattttgcctccctcaaccttttatagtcccccaaggcaggtgtgctgcctaaatctctatcctatgttctctgcttttttcattgtaaactctatatcaagggattggaggcactttcattcttccagtgatgctaaatgtcccaaaggtgtacttcttatccagatccattttctgagtccatgacttgtacatccaactgctccctgcatattcttgtttagattactgtcccaaaggcactcccaatctcaaagtaaatcttgatcttcttcccacttggtcctccttatttgtctgtctgtcgcagtctcttaatcaccaccccccaccccctgcatattgctgctcatgtctaatcaattgccaagtcctttgattttcttccttttaaatgtctcattttccccatatttctaacaccatcatcattatcccagctaaactactgcttgcctgagctaacttttttctccgcatcaactctgtccacactgctggagggtggcagcataagcccccaaccctccgcccaaaatatgccactttggcataaggattattttgagctagagtcattaaagacaatagcaggtataagagtactctgacccttccccttttcttcttgaaaaatggaataagcctcccatataaaagatgtcttatctataccagaaagaaagaacattcttaacatgaagggtaggaggggatgatgttgaggccaaggaatctataccaaaaaagcttgttaaactaaccctcaccttcctagtcactttgccattcaaccagcaaccctagcccaagcccctttttcacctttccacaatgtatgactctttgcccaactgagtatatgagtattgaattctaactgcatattcaggtcttcctttaattatggggcctttcatgtgatgtaaaacttatattaaatacatgtgtatgctttcctcctgttaatctgttccattctcaggcccagccgaaaaaccctaagagggaagaggtaacattttgtcttccctgcacagtccattatttcttcactttgtgaccagggtgattaaatacacagatacacagccacgaatctgattactacagaagtcaaatgttgaaaacctcagtgtctcctgttaagctttatgttgaattctgtataatttaccttgaccagtaaggttctgagtggtctgatgccttcctgccttcttcaagtttgccctgtactcaccgacctccccccagctcctgccatgctgctgacttcttttctgtcattaaacacaccaatttctttcctgattaaaacattttgcattggttctttaatctttcttaaatgccctcgaattcattatccctcgtcccacttaattaactctagctcatctcgatgtaaggtatttaggaataatatttaaaatttcttcccataccttttattaaaaggaggataaccattaaatatacaatatcaggggcttcagactctccagggagtatttcatcaataattactttccagaaatgcaacatagttcatttttttaggataaaagagtcttaactggtttccaaaaatggcaccagataggggattacagatacaagacactcacatatttatgggtagttgaaattgactactggtcagttaataggagtcacactgctt

SEQ ID NO: 1883489 - DNA, 4001 bp, Homo sapiens; identical to SEQ ID NO: 588141

SEQ ID NO: 1883490 - DNA, 4001 bp, Homo sapiens; identical to SEQ ID NO: 588142

SEQ ID NO: 1883491 - DNA, 4001 bp, Homo sapiens; identical to SEQ ID NO: 588140

SEQ ID NO: 1883492 - DNA, 4001 bp, Homo sapiens
gagaatcgcttgaacccgggagaaggaggttgcagtgaaccaagatcttgccattgcactccagcctgggcaacagaactggattccatctcaaaaaaaaaaaaaaagaaaaaaaaaaccagaaaagaaactcagtgtggctggaggagggagagcagggggctggagtggggaggccagaaagctaacaaggactacataggcagggccttggccattgcaaggactggctctttttcaccccaaagacagctgagcctgagagggtgagaggtgctgagtgcagttgagttgaaggccacctgcatgccttgaccctcatccaagtatttctgagcctcccctcaccccaggacccagcccaggcaacaggtggaagatgcttttcttctgggacctcagaggtgagtgggtgggtggggaggaggaggtcgaggggggacagctgccccaagggagaggctgaggatggagcagggagggcactgaagtgggctgggtggaggacagggggctggagggtgagaagaaggtggggtacttaccgcctgtgcccagatgcttgaaccatgttttgtccttcagatttgtagatgctgaggagccaaagagaggtcactagggctggaggacacagaacttggccccacacttccatcagacctttgtccccaggggagaagccctggggcagctcctgctagtgccactcccttaacccagccaaggaacagggagggaggagcggtgctcagccaatgaggtgacgccctggagccccaccccacccatgctggccccaggaccccaaccccaggccagaccctccagtgctcctgctgaccttccctgtctgcagcccagctttggactgtggagatgccctcagcctctactcagtggctccagcctcatatttgcgtgctatacctttaacctcaagttctcttgctgctaacttaagctgtgactgtccaggacctgcacacacacatacatgcacgcatgcacacacacacacacacacacacacagaaggtgaacacacaggatgaggccctgaaaactcatttcacccgtgtacctcacccaaaaattcccctttgtactcctatctttatctctaactgacagcatgaaggtagcccgaagtcccctcaccctgtctgtcctcctgattctctagcccagttccctctagctccagcacagactcttatctccagccctgactgctgaaaccctccagccccagctccagcccctcaggaggggactgcgtgggaggaatgactccagcaagccggcagctgacccgtctctggcctgcatgcctccccctgtggtccactgccggtggtcttcagctctctcctcgtcccacccccatggtctgctgacagcccagcccagtgcatccctgccatctctgctctaccgctggtcctcccaacaaccaacttacaggtaaggaaactgaggcccagagagaaggtgtatgtgcctgtgtcacacagcaacacaggactgcaccataacaagaaagccgggacttccactcccagccggggctccttccccaaacaatccctcagtcacctcctcgctgtatggtacccagggaatggcccttccagatctgggcactgaggaggctgccccatccccaccctgcctggagccccactcactctgctgaaatgtcttctgattctcagcctctgccttgggggcttctcagttaaagcgcatcttgatcttgttcctctgtgactgtccctggctcagcttccacccccagctggggctcagctatccctgtgtccccagtccagagcctgcctctcagccctcccagggcggccttgagcactgctcctgctcctccaggggagaggtcagtaaggcagggatttggctggtgccacttgaaccaagtccagatgcactgcccaaaataacatccctcgtctggccagcagtgcagtggagaccgagttctgaagcaggcctttgtgaggtcagaggtggagttctgggtgggcactctgggcctcacagtcccagaggaaaggcctgtcctccaagccaatgtgcagcctgactctggggccagcgcctgaggaagccctccctgagccccagccctggggaaggctgaagaggcctctgagctcccagcgctggggagcgctgtgcagaataggactggaggtgaaagtgttggagattaacagccagatggaggggacggggggaggccctgggtcagtcctcagggaacccccattctgaagggggagagggaaactcaggcccagtcctcaggggcccccagtctgagaggaaggaggacacacgagccatatttgcagagaaacaccagcctgcgagaggaggtagaagcccaggcctggccctccgagggcccctagtctgaggagcagtccacctgccctcgggaaaacacctcccttaggaaaggccagcaaggcccccgtaaaggagccacagctggatcggggcatggggctcggggcccagcggtgtgggagctccgggaccgaggtgcagtcaggagagaccctgggggccagtggcagtccaagaggacttttggagccaaggcctgactgggtctcaaacaatggggcaggcagtttggggtttcagcaggtggcccagtgctgagacacaagggagttgtttctggtctgcagacactgaggacacttgctatgtggcgtggtggatggtgggtaagtcctgggaatttctggcaccaggttccctgggtgggaaggggcataggattcagttgtccaaagctcaggtgtgggaatggaactgtcctgtagagggtgccaaagaccaggtctggaaactgcatagccccagtccccacccccacacacaccatcccaccccttccagctttttctgcaggtctttctgcaggggtgaggcagggagaggaaggggtcggccgcagttctggggcttcctagtcagaagccctctgtaaggcactaacttccctcttccctctgcagattttttttttttttgagacggagtcctactccacccaggctggagtgcagtggcacaatcttgtctcaccacagtctctgcctcccagttcaagtgattctcctgcctcagcctcccaagtagctgggattacaggcatgcaccaccaagcccagctagtttttttggatttttagtaaagacggggtgtcaccatattgatcaggctggtttcgaactcctgacctcaggtaatccacccgcctcagcctcccaaagtactgggattataggtgtgagccactgtgcccggcctccctctgcagattctacgtgggctctaagcagcctctaaattgcctgaacacctaaggcttatttgctagttgacatctgatctattctgacactgaaaatttcagtgctttagggtgctaaaaggaaaaaagagggtttgcgaggaatcctgcagttgctgagggggtaccctgataagggaattttaagcaattacagtaagtgtcactaaactttttaaaaaatctttaaccagattaaacttacacaattttgttataatttgtgtttctgcagcttccaattgtggacaagataaggaccattgcccaggctgtctatggagccaaagatatcgaactctgtcctgaggcacaagtcaaaatagatcgttacactcagcaggtaaaagttgtacttttaggggaaaagaaaaaattcaccttaggctctcagaatactcagcttgacttgaggatttgtacatgtctcaccagctaacctttgcttaatctattttctggttaacaaagatgaaagcaatatcctcgggtagagtgtaaactatatttagaactttatggtgaggcatgtatcctctgatccatgcatgatttacttctgtgactataaatgtgtctgatatgggtggtatccctgtttgtaggtga

SEQ ID NO: 1883493 - DNA, 4001 bp, Homo sapiens
caggtgcagtggctcacacctgtaatcccaaccttttgggaggccgaggcgggtggatcacctgaggtcaggagttcaagaacagcctggcgaacatggcgaaaccccatttctactaaaaatacaaaaaaaaaaaaaaaaaaaaaaacaaaaaaaaaacaactaattagctgggcatggtagtgtgtgcctgtaatcctgtaatcccagctactcaggaggctgaggcaagagaatcgcttgaacccgggagaaggaggttgcagtgaaccaagatcttgccattgcactccagcctgggcaacagaactggattccatctcaaaaaaaaaaaaaaaaaaaaaaagaaaaaaaaaaccagaaaagaaactcagtgtggctggaggagggagagcagggggctggagtggggaggccagaaagctaacaaggactacataggcagggccttggccattgcaaggactggctctttttcaccccaaagacagctgagcctgagagggtgagaggtgctgagtgcagttgagttgaaggccacctgcatgccttgaccctcatccaagtatttctgagcctcccctcaccccaggacccagcccaggcaacaggtggaagatgcttttcttctgggacctcagaggcgagtgggtgggtggggaggaggaggtcgaggggggacagctgccccaagggagaggctgaggatggagcagggagggcactgaagtgggctgggtggaggacagggggctggagggtgagaagagggtggggtacttaccgcctgtgcccagatgcttgaaccatgttttgtccttcagatttgtagatgctgaagagccaaagagaggtcactagggctggaggacacagaacttggccccacacttccatcagacctttgtccccaggggagaagccctggggcagctcctgctagtgccactcccttaacccagccaaggaacagggagggaggagcggtgctcagccaatgaggcgacgccctggagccccaccccacccatgctggccccaggaccccaaccccaggccagaccctccagtgctcctgctgaccttccctgtctgcagcccagctttggactgtggagatgccctcagcctctactcagtggctccagcctcatatttgcgtgctatacctttaacctcaagttctcttgctgctaacttaagctgtgactgtccaggacctgcacacacacatatatgcacgcatgcacacacacacacacacacacacacgcagaaggtgaacacacaggatgaggccctgaaaactcatttcacccgtgtacctcacccaaaaattcccctttgtactcctatctttatctctaacagacagcatgaaggtagcccgaagtcccctcaccctgtctgtcctcctgattctctagcccagttccctctagctccagcacagactcttatctccagccctgactgctgaaaccctccagccccagctccagcccctcaggaggggactgcgtgggaggaatgactccagcaagccggcagctgacccgtctctggcctgcatgcctccccctgtggtccactgccggtggtcttcagctctctcctcgtcccacccccatggtctgctgacagcccagcccagtgcatccctgccatctctgctctaccgctggtcctcccaacaaccaacttacaggtaaggaaactgaggcccagagagaaggtgtatgtgcctgtgtcacacagcaacacaggactgcaccataacaagaaagccgggacttccactcccagccggggctccttccccaaacaatccctcagtcacctcctcgctgtatggtacccagggaatgacccttccagatctgggcactgaggaggctgccccatccccaccctgcctggagccccactcactctgctgaaatgtcttctgattctcagcctctgccttgggggcttctcagttaaagcgcatcttgatcttgttcctctgtgactgtctctggctcagcttccacccccagctggggctcagctatccctgtgtccccagtccagagcctgcctctcagccctcccaaggcggccttgagcgctgctcctgctcctccaggggagaggtcagtaaggcagggatttggctggtgccacttgaaccaagtccagatgcactgcccaaaataacatccctcgtctggccagcagtgcagtggagactgagttctgaagcaggcctttgtgaggtcagaggtggagttctgggtgggcactctgggcctcacagtcccagaggaaaggcctgtcctccaagccaatgtgcagcctgactctggggccagcgcctgaggaagccctccctgagccccagccctggggaaggctgaagaggcctctgagctcccagcgctggggagcgctgtgcagaataggactggaggtggaagtgttggagattaacagccagatggaggggacggggggaggccctgggtcagtcctcagggaacccccattctgaagggggagagggaaactcaggcccagtcctcaggggcccccagtctgagaggaaggaggacacacgagccatatttgcagagaaacaccagcctgcgagaggaggtagaagcccaggcctggccctccgagggcccctagtctgaggagcagtccacctgccctcgggaaaacacctcccttaggaaaggccagcaaggcccccgtaaaggagccacagctggatcggggcatggggctcggggcccagcggtgtgggagctccgggaccgaggtgcagtcaggagagaccctgggggccagtggcagtccaagaggacttttggagccaaggcctgactgggtctcaaacaatggggcaggcagtttggggtttcagcaggtggcccggtgctgagacacaagggagttgtttctggtctgcagacactgaggacacttgctatgtggcgtggtggatggtgggtaagtcctgggaatttctggcaccaggttccctgggtgggaaggggcataggattcagttgtccaaagctcaggtgtgggaatggaactgtcctgtagagggtgccaaagaccaggtctggaaactgcatagccccagtccccacccccacacacaccatcccaccccttccagctttttctgcagatctttctgcaggggtgaggcagggagaggaaggggtcggccgcagttctggggcttcctagtcagaagccctctgtaaggcactaacttccctcttccctctgcagatttttttttttttttgagacggagtcctactccacccaggctggagtgcagtggcacaatcttgtctcaccacagtctctgcctcccagttcaagtgattctcctgcctcagcctcccaagtagctcggattacaggcatgcaccaccaagcccagctagtttttttggatttttagtaaagacggggtgtcaccatattgatcaggctggtttcgaactcctgacctcaggtaatccacccgcctcggcctcccaaagtactgggattataggtgtgagccactgtgcccggcctccctctgcagattctacatgggctctaagcagcctctaaattgcctgaacacctaaggcttatttgctagttgacatctgatctattctgacactgaaaatttcagtgctttagggtgctaaaaggaaaaaagagggtttgcaaggaatcctgcagttgctgagggggtaccctgataagggaattttaagcaattacagtaagtgtcactaaactttttaaaaaatctttaaccagattaaacttacacaattttgttataatttgtgtttctgcagcttccaattgtggacaagataaggaccattgcccaggctgtctatggagccaaagatatcgaactctgtcctgaggcacaagtcaaaatagatcgttacactcagcaggtaaaagttgtacttttaggggaa

SEQ ID NO: 1883494 - DNA, 4001 bp, Homo sapiens
aaagtcagtgtgaggccaggtgcagtggctcacacctgtaatcccaaccttttgggaggccgaggcgggtggatcacctgaggtcaggagttcaagaacagcctggcgaacatggcgaaaccccatttctactaaaaatacaaaaaaaaaaaaaaaaaaaaaaaacaaacaactaattagctgggcatggtagtgtgtgcctgtaatcctgtaatcccagctactcaggaggctgaggcaagagaatcgcttgaacccgggagaaggaggttgcagtgaaccaagatcttgccattgcactccagcctgggcaacagaactggattccatctcaaaaaaaaaaaaaaagaaaaaaaaaaccagaaaagaaactcagtgtggctggaggagggagagcagggggctggagtggggaggccagaaagctaacaaggactacataggcagggccttggccattgcaaggactggctctttttcaccccaaagacagctgagcctgagagggtgagaggtgctgagtgcagttgagttgaaggccacctgcatgccttgaccctcatccaagtatttctgagcctcccctcaccccaggacccagcccaggcaacaggtggaagatgcttttcttctgggacctcagaggtgagtgggtgggtggggaggaggaggtcgaggggggacagctgccccaagggagaggctgaggatggagcagggagggcactgaagtgggctgggtggaggacagggggctggagggtgagaagaaggtggggtacttaccgcctgtgcccagatgcttgaaccatgttttgtccttcagatttgtagatgctgaggagccaaagagaggtcactagggctggaggacacagaacttggccccacacttccatcagacctttgtccccaggggagaagccctggggcagctcctgctagtgccactcccttaacccagccaaggaacagggagggaggagcggtgctcagccaatgaggtgacgccctggagccccaccccacccatgctggccccaggaccccaaccccaggccagaccctccagtgctcctgctgaccttccctgtctgcagcccagctttggactgtggagatgccctcagcctctactcagtggctccagcctcatatttgcgtgctatacctttaacctcaagttctcttgctgctaacttaagctgtgactgtccaggacctgcacacacacatacatgcacgcatgcacacacacacacacacacacacacagaaggtgaacacacaggatgaggccctgaaaactcatttcacccgtgtacctcacccaaaaattcccctttgtactcctatctttatctctaactgacagcatgaaggtagcccgaagtcccctcaccctgtctgtcctcctgattctctagcccagttccctctagctccagcacagactcttatctccagccctgactgctgaaaccctccagccccagctccagcccctcaggaggggactgcgtgggaggaatgactccagcaagccggcagctgacccgtctctggcctgcatgcctccccctgtggtccactgccggtggtcttcagctctctcctcgtcccacccccatggtctgctgacagcccagcccagtgcatccctgccatctctgctctaccgctggtcctcccaacaaccaacttacaggtaaggaaactgaggcccagagagaaggtgtatgtgcctgtgtcacacagcaacacaggactgcaccataacaagaaagccgggacttccactcccagccggggctccttccccaaacaatccctcagtcacctcctcgctgtatggtacccagggaatggcccttccagatctgggcactgaggaggctgccccatccccaccctgcctggagccccactcactctgctgaaatgtcttctgattctcagcctctgccttgggggcttctcagttaaagcgcatcttgatcttgttcctctgtgactgtccctggctcagcttccacccccagctggggctcagctatccctgtgtccccagtccagagcctgcctctcagccctcccagggcggccttgagcactgctcctgctcctccaggggagaggtcagtaaggcagggatttggctggtgccacttgaaccaagtccagatgcactgcccaaaataacatccctcgtctggccagcagtgcagtggagaccgagttctgaagcaggcctttgtgaggtcagaggtggagttctgggtgggcactctgggcctcacagtcccagaggaaaggcctgtcctccaagccaatgtgcagcctgactctggggccagcgcctgaggaagccctccctgagccccagccctggggaaggctgaagaggcctctgagctcccagcgctggggagcgctgtgcagaataggactggaggtgaaagtgttggagattaacagccagatggaggggacggggggaggccctgggtcagtcctcagggaacccccattctgaagggggagagggaaactcaggcccagtcctcaggggcccccagtctgagaggaaggaggacacacgagccatatttgcagagaaacaccagcctgcgagaggaggtagaagcccaggcctggccctccgagggcccctagtctgaggagcagtccacctgccctcgggaaaacacctcccttaggaaaggccagcaaggcccccgtaaaggagccacagctggatcggggcatggggctcggggcccagcggtgtgggagctccgggaccgaggtgcagtcaggagagaccctgggggccagtggcagtccaagaggacttttggagccaaggcctgactgggtctcaaacaatggggcaggcagtttggggtttcagcaggtggcccagtgctgagacacaagggagttgtttctggtctgcagacactgaggacacttgctatgtggcgtggtggatggtgggtaagtcctgggaatttctggcaccaggttccctgggtgggaaggggcataggattcagttgtccaaagctcaggtgtgggaatggaactgtcctgtagagggtgccaaagaccaggtctggaaactgcatagccccagtccccacccccacacacaccatcccaccccttccagctttttctgcaggtctttctgcaggggtgaggcagggagaggaaggggtcggccgcagttctggggcttcctagtcagaagccctctgtaaggcactaacttccctcttccctctgcagattttttttttttttgagacggagtcctactccacccaggctggagtgcagtggcacaatcttgtctcaccacagtctctgcctcccagttcaagtgattctcctgcctcagcctcccaagtagctgggattacaggcatgcaccaccaagcccagctagtttttttggatttttagtaaagacggggtgtcaccatattgatcaggctggtttcgaactcctgacctcaggtaatccacccgcctcagcctcccaaagtactgggattataggtgtgagccactgtgcccggcctccctctgcagattctacgtgggctctaagcagcctctaaattgcctgaacacctaaggcttatttgctagttgacatctgatctattctgacactgaaaatttcagtgctttagggtgctaaaaggaaaaaagagggtttgcgaggaatcctgcagttgctgagggggtaccctgataagggaattttaagcaattacagtaagtgtcactaaactttttaaaaaatctttaaccagattaaacttacacaattttgttataatttgtgtttctgcagcttccaattgtggacaagataaggaccattgcccaggctgtctatggagccaaagatatcgaactctgtcctgaggcacaagtcaaaatagatcgttacactcagcaggtaaaagttgtacttttaggggaaa

SEQ ID NO: 1883495 - DNA, 4001 bp, Homo sapiens
cagtgtgaggccaggtgcagtggctcacacctgtaatcccaatcttttgggaggccgaggtgggtggatcacctgaggtcaggagttcaagaacagcctggcgaacatggcgaaaccccatttctactaaaaatacaaaaaaaaaaaaaaaaaaaacaaacaactaattagctgggcatggtagtgtgtgcctgtaatcctgtaatcccagctactcaggaggctgaggcaagagaatcgcttgaacccgggagaaggaggttgcagtgaaccaagatcttgccattgcactccagcctgggcaacagaactggattccatctcaaaaaaaaaaaaaaagaaaagaaaaaaaaaaaccagaaaagaaactcagtgtggctggaggagggagagcagggggctggagtggggaggccagaaagctaacaaggactacataggcagggccttggccattgcaaggactggctctttttcaccccaaagacagctgagcctgagagggtgagaggtgctgagtgcagttgagttgaaggccacctgcatgccttgaccctcatccaagtatttctgagcctcccctcaccccaggacccagcccaggcaacaggtggaagatgcttttcttctgggacctcagaggcgagtgggtgggtggggaggaggaggtcgaggggggacagctgccccaagggagaggctgaggatggagcagggagggcactgaagtgggctgggtggaggacagggggctggagggtgagaagagggtggggtacttaccgcctgtgcccagatgcttgaaccatgttttgtccttcagatttgtagatgctgaggagccaaagagaggtcactagggctggaggacacagaacttggccccacacttccatcagatctttgtccccaggggagaagccctggggcagctcctgctagtgccactcccttaacccagccaaggaacagggagggaggagcggtgctcagccaatgaggcgacgccctggagccccaccccacccatgctggccccaggaccccaaccccaggccagaccctccagtgctcctgctgaccttccctgtctgcagcccagctttggactgtggagatgccctcagcctctactcagtggctccagcctcatatttgcgtgctatacctttaacctcaagttctcttgctgctaacttaagctgtgactgtccaggaccggcacacacacatacatgcacgcatgcacacacacacacacacacacacacacacagaaggtgaacacacaggatgaggccctgaaaactcatttcacccgtgtacctcacccaaaaattcccctttgtactcctatctttatctctaacagacagcatgaaggtagcccgaagtcccctcaccctgtctgtcctcctgattctctagcccagttccctctagctccagcacagactcttatctccagccctgactgctgaaaccctccagccccagctccagcccctcaggaggggactgcgtgggaggaatgactccagcaagccggcagctgacccgtctctggcctgcatgcctccccctgtggtccactgccggtggtcttcagctctctcctcgtcccacccccatggtctgctgacagcccagcccagtgcatccctgccatctctgctctaccgctggtcctcccaacaaccaacttacaggtaaggaaactgaggcccagagagaaggtgtatgtgcctgtgtcacacagcaacacaggactgcaccataacaagaaagccgggacttccactcccagccggggctccttccccaaacaatccctcagtcacctcctcgctgtatggtacccagggaatgacccttccagatctgggcactgaggaggctgccccatccccaccctgcctggagccccactcactctgctgaaatgtcttctgattctcagcctctgccttgggggcttctcagttaaagcgcatcttgatcttgttcctctgtgactgtctctggctcagcttccacccccagctggggctcagctatccctgtgtccccagtccagagcctgcctctcagccctcccaaggcggccttgagcgctgctcctgctcctccaggggagaggtcagtaaggcagggatttggctggtgccacttgaaccaagtccagatgcactgcccaaaataacttccctcgtctggccagcagtgcagtggagactgagttctgaagcaggcctttgtgaggtcagaggtggagttctgggtgggcactctgggcctcacagtcccagaggaaaggcctgtcctccaagccaatgtgcagcctgactctggggccagcgcctgaggaagccctccctgagccccagccctggggaaggctgaagaggcctctgagctcccagcgctggggagcgctgtgcagaataggactggaggtggaagtgttggagattaacagccagatggaggggacggggggaggccctgggtcagtcctcagggaacccccattctgaagggggagagggaaactcaggcccagtcctcaggggcccccagtctgagaggaaggaggacacacgagccatatttgcagagaaacaccagcctgcgagaggaggtagaagcccaggcctggccctccgagggcccctagtctgaggagcagtccacctgccctcgggaaaacacctcccttaggaaaggccagcaaggcccccgtaaaggagccacagctggatcggggcatggggctcggggcccagcggtgtgggagctccgggaccgaggtgcagtcaggagagaccctgggggccagtggcagtccaagaggacttttggagccaaggcctgactgggtctcaaacaatggggcaggcagtttggggtttcagcaggtggcccagtgctgagacacaagggagttgtttctggtctgcagacactgaggacacttgctatgtggcgtggtggatggtgggtaagtcctgggaatttctggcaccaggttccctgggtgggaaggggcataggattcagttgtccaaagctcaggtgtgggaatggaactgtcctgtagagggtgccaaagaccaggtctggaaactgcatagccccagtccccacccccacacacaccatcccaccccttccagctttttctgcagatctttctgcaggggtgaggcagggagaggaaggggtcggccgcagttctggggcttcctagtcagaagccctctgtaaggcactaacttccctcttccctctgcagattttttttttttttttttttgagacggagtcctactccacccaggctggagtgcagtggcacaatcttgtctcaccacagtctctgcctcccagttcaagtgattctcctgcctcagcctcccaagtagctcggattacaggcatgcaccaccaagcccagctagtttttttggatttttagtaaagacggggtgtcaccatattgatcaggctggtttcgaactcctgacctcaggtaatccacccgcctcggcctcccaaagtactgggattataggtgtgagccactgtgcccggcctccctctgcagattctacatgggctctaggcagcctctaaattgcctgaacacctaaggcttatttgctagttgacatccgatctattctgacactgaaaatttcagtgctttagggtgctaaaaggaaaaaagagggtttgcaaggaatcctgcagttgctgagggggtaccctgataagggaattttaagcaattacagtaagtgtcactaaacttttaaaaaaatctttaaccagattaaacttacacaatttttttataatttgtgtttctgcagcttccaattgtggacaagataaggaccattgcccaggctgtctatggagccaaagatatcgaactctgtcctgaggcacaagtcaaaatagatcgttacactcagcaggtaaaagttgtactttta

SEQ ID NO: 1883496 - DNA, 4001 bp, Homo sapiens
ctggctcccagatggctgttgacagctttcaccactgcccagcctaatggtgggacttttgagggacagactgggaaatggattgtcactttttgtctctgacctgtccccttcctgttggaaatgtggtctttagccaggcagtcctgtacttggctaaaattttactaattgtgggacaggcagcatgaatattggagaacagcagaaagtgtaccacaggtggggtcatctgtgaagcgcctcctggaagcagtgcagtatatggttgaaaggaaggcctcctgggctgaatcccatcactgcctctcaccactcccttgcttcagttcagtcacttataaaatgtgggtaagaacagtgcctgcctctcaggactgacctgaagtctgcagtgttagcatgtcacgtgctgagagcagcatcttgacataagtgctgaggggcacacaagggtagcagctgatggaaaaatggagtgaaaaagctgcctgcagctgcttcccacaccttcacttagggtggatgtttgcttggtgaaggatttttcttcacattctaactccctttattcagtcaacaatttttttgttgttgttgttgagacagagtcttgctctgttgcccaggctggagtgcagtggcacaatctcagctcattgcaagctctgcctcccgggttcatgccattctcctgcctcagcctcccgagtagctgggactacaggcgcccagcaccactcccggctattttttgtatttttagtagagatggggtttcaccatgttagccaggctggtctccatctcctgacctcatgatctgcccacctcggcctcccaaagtgctgggattacaggcgtgagccaccgcacccggcccagtcaacaaatattttgtctcctgtacaccaggtattgttctaggcaccatggacttacattctagtagggagacaatattccaaatcaggatgtgggagagtcacatgacacacactgtgatggagccaagtaagtcaacgaagacaggtatgggggggcagtatcattttaactagggaggagagggaaggcttcccttaagaggtgatatttcaactcaaggatggtaaagagggaagccacaaagacactcgaaataaaggtttcagggaagggacagacagcaggggtggcggagaggtgggtgcggggcaggagggccatgaaggcgctcgtgtctcctgcgagggctcagggtgctcggcctgtcataaatggacttaggctttgacagagcagtttagctgccctaaagaaacctgggaaggttcccttggcacttgggattgtccgtttccttttctgtctatgtgcgctgtctatgctggacttgagataattctccggagtccgactcaccaggagactcgggtgtcacccagattgaccttcaaggctcatttcttgtcagtccagtacccgtcccctcggttcacacgaccatccagaaacctcaaattcagtccatgcttcttgttttgggtctcggggctgggataaggcgggctgaccaccgcggggcatgtaggtagtttccgtggtgctgggggcgctctccagggaaggctacttggtctgcagaaaaggccttgacttgtgcatacctgggcagcgggcctatgagtggcagcgagagcggggtaaccagagagggcacaccccccaaccggagcgccccccaggttggcatctccacaactgtagaacctcccccatcagggcaaccctcccgattgggacaccgcccccagccagacacatcctcctagcagaacacccatgcttagccggagccgctcccccgccagacacctccccaccgggaaaccctccccagtgggacaccccagccagtccaggtattcccgccgttagggacaccccctccagccggagcataccctcggcaggggcattcctcccaaccgagggaaccccgccgcaacgggaacctgcctgaaccagagcaccctcccgcgccggggacaccccacaggcggctcccgcgccaggccgcggcccagggagtcagccttccgcgcaagccggcgaaatcaaagtgcgtccggggttagaggtcagaggtcggagccgcgggtctttctccttcttcggccagcccaccaaaacgtcaatttagaatgagacatgtgttgaaaatgggacggctactccccatccactactacgactctggcgggcgggttctccagctccaggtctcctaccccgcgggcgcgcgttccggttccggccgccgcaggcccggcgcctggggcgccgcacgcctggttccagtgcgcaggcgccgcaccggtcgagctccaacgcgcaggcgcgggcgcaggcgcaggcgcagacgtaggcgatcggccccgccccgactctgggccgcgaggcgcgggcggggcgatggcgcgcgggaggggcggggccacgctgcgggcccgggccatggccgccgccgatgccgaggtgagcagcggggccggcggggggcggcgcgggggcggcgggcagcggcggaggcggcgcgggggcgaagaaccgggcggggcggcggcaggcggccggcgggcgggcggggccccgggtccccccgccgccgccgccgccgctgccgccgcctcaggccgaggccgggccgaggccgccgggcgtccggcccgcgctcccgccgggcgcgctttgtgcgcggcgcgggccgggcggcggctgggggagcgggcgggggcgcaggtgagggaggcgaccgcgtacctgtgcccgcgccccccacggaccccgtgccgccgccgccgcccgcaagccggatctgcggggagggcctcggccagggtgccggggaggtgcggaggacaaaaggaaaagtagcggggccggccaactttggagcgccggccgaggcgaggctgtccctcctctcggagctcttccttcgcttcgttgacctttcactttgttctgagtaggatggcaccatctttaacgaaaagttggccagtcccggcgtgtttctccccagacaatgctgctccagccctgctggctgtcagaagcaggaaagcacgctcggtgggaagcttgcggactcaagtttatttccaaaccagcagctttaaagggctctcgatgtaaaaagttcacattcttttgttaatggtctcggccttccccgtgctcattctcaaggatagtttgtttccttgcttaggaaaggaagcagcgtagagattaaagtcttgcgagtggaccactggcgtccctctgaaggaaaagcaagcaggaggtggtgtgtccgtggagatgcagaaatagtgtggtcctagggctgagataagggaccggtttggagaaaactgtcagcgtagaagtatttctttgaaattaactgtctagtaacagttgagacttctaaagcttagaaagttaaggtgtagtaagaagccgtacagtatcctggtgcatagacttaacactgtattttaactcaggtaatgtatggcctttttgtttatttttttcctgcatttttggggggtgttgaaataagtaaactgggaaggtgcaggggaattcttaaattcaatgcaaggagtttttgctgagtatctgcagcattcaaggaattaatattagtcactgagaacaaaaagcgaaattagaaaatttcaagtcacttctaggcttgtaggggagaagacgtgtagtgatgaattctatcatttatgaagtacccactggatcccacacactgtgcaagacctttagatcaggcgcctccctcggttttcttcaccctgtgcagcaggtgctgttatttccttttttaaattattatttattattattattttttgagacaggatctccctttgtcactcaggctggaatgcagaggcatgatcactgctcactgcagcttcgaccacccaggctcaaaggagtctcccacc

SEQ ID NO: 1883497 - DNA, 4001 bp, Homo sapiens
gcctctcaggactgacctgaagtctgcagtgttagcatgtcacgtgctgagagcagcatcttgacataagtgctgaggggcacacaagggtagcagctgatggaaaaatggagtgaaaaagctgcctgcagctgcttcccacaccttcacttagggtggatgtttgcttggtgaaggatttttcttcacattctaactccctttattcagtcaacaatttttttgttgttgttgttgagacagagtcttgctctgttgcccaggctggagtgcagtggcacaatctcagctcattgcaagctctgcctcccgggttcatgccattctcctgcctcagcctcccgagtagctgggactacaggcgcccagcaccactcccggctattttttgtatttttagtagagatggggtttcaccatgttagccaggctggtctccatctcctgacctcatgatctgcccacctcggcctcccaaagtgctgggattacaggcgtgagccaccgcacccggcccagtcaacaaatattttgtctcctgtacaccaggtattgttctaggcaccatggacttacattctagtagggagacaatattccaaatcaggatgtgggagagtcacatgacacacactgtgatggagccaagtaagtcaacgaagacaggtatgggggggcagtatcattttaactagggaggagagggaaggcttcccttaagaggtgatatttcaactcaaggatggtaaagagggaagccacaaagacactcgaaataaaggtttcagggaagggacagacagcaggggtggcggagaggtgggtgcggggcaggagggccatgaaggcgctcgtgtctcctgcgagggctcagggtgctcggcctgtcataaatggacttaggctttgacagagcagtttagctgccctaaagaaacctgggaaggttcccttggcacttgggattgtccgtttccttttctgtctatgtgcgctgtctatgctggacttgagataattctccggagtccgactcaccaggagactcgggtgtcacccagattgaccttcaaggctcatttcttgtcagtccagtacccgtcccctcggttcacacgaccatccagaaacctcaaattcagtccatgcttcttgttttgggtctcggggctgggataaggcgggctgaccaccgcggggcatgtaggtagtttccgtggtgctgggggcgctctccagggaaggctacttggtctgcagaaaaggccttgacttgtgcatacctgggcagcgggcctatgagtggcagcgagagcggggtaaccagagagggcacaccccccaaccggagcgccccccaggttggcatctccacaactgtagaacctcccccatcagggcaaccctcccgattgggacaccgcccccagccagacacatcctcctagcagaacacccatgcttagccggagccgctcccccgccagacacctccccaccgggaaaccctccccagtgggacaccccagccagtccaggtattcccgccgttagggacaccccctccagccggagcataccctcggcaggggcattcctcccaaccgagggaaccccgccgcaacgggaacctgcctgaaccagagcaccctcccgcgccggggacaccccacaggcggctcccgcgccaggccgcggcccagggagtcagccttccgcgcaagccggcgaaatcaaagtgcgtccggggttagaggtcagaggtcggagccgcgggtctttctccttcttcggccagcccaccaaaacgtcaatttagaatgagacatgtgttgaaaatgggacggctactccccatccactactacgactctggcgggcgggttctccagctccaggtctcctaccccgcgggcgcgcgttccggttccggccgccgcaggcccggcgcctggggcgccgcacgcctggttccagtgcgcaggcgccgcaccggtcgagctccaacgcgcaggcgcgggcgcaggcgcaggcgcagacgtaggcgatcggccccgccccgactctgggccgcgaggcgcgggcggggcgatggcgcgcgggaggggcggggccacgctgcgggcccgggccatggccgccgccgatgccgaggtgagcagcggggccggcggggggcggcgcgggggcggcgggcagcggcggaggcggcgcgggggcgaagaaccgggcggggcggcggcaggcggccggcgggcgggcggggccccgggtccccccgccgccgccgccgccgctgccgccgcctcaggccgaggccgggccgaggccgccgggcgtccggcccgcgctcccgccgggcgcgctttgtgcgcggcgcgggccgggcggcggctgggggagcgggcgggggcgcaggtgagggaggcgaccgcgtacctgtgcccgcgccccccacggaccccgtgccgccgccgccgcccgcaagccggatctgcggggagggcctcggccagggtgccggggaggtgcggaggacaaaaggaaaagtagcggggccggccaactttggagcgccggccgaggcgaggctgtccctcctctcggagctcttccttcgcttcgttgacctttcactttgttctgagtaggatggcaccatctttaacgaaaagttggccagtcccggcgtgtttctccccagacaatgctgctccagccctgctggctgtcagaagcaggaaagcacgctcggtgggaagcttgcggactcaagtttatttccaaaccagcagctttaaagggctctcgatgtaaaaagttcacattcttttgttaatggtctcggccttccccgtgctcattctcaaggatagtttgtttccttgcttaggaaaggaagcagcgtagagattaaagtcttgcgagtggaccactggcgtccctctgaaggaaaagcaagcaggaggtggtgtgtccgtggagatgcagaaatagtgtggtcctagggctgagataagggaccggtttggagaaaactgtcagcgtagaagtatttctttgaaattaactgtctagtaacagttgagacttctaaagcttagaaagttaaggtgtagtaagaagccgtacagtatcctggtgcatagacttaacactgtattttaactcaggtaatgtatggcctttttgtttatttttttcctgcatttttggggggtgttgaaataagtaaactgggaaggtgcaggggaattcttaaattcaatgcaaggagtttttgctgagtatctgcagcattcaaggaattaatattagtcactgagaacaaaaagcgaaattagaaaatttcaagtcacttctaggcttgtaggggagaagacgtgtagtgatgaattctatcatttatgaagtacccactggatcccacacactgtgcaagacctttagatcaggcgcctccctcggttttcttcaccctgtgcagcaggtgctgttatttccttttttaaattattatttattattattattttttgagacaggatctccctttgtcactcaggctggaatgcagaggcatgatcactgctcactgcagcttcgaccacccaggctcaaaggagtctcccacctcgggtgctgccacacctggccaatttttttgtatttttttggtagagaccggggtttcaccatgttgcccaggctggtcttgaacttttggactccagcgatctgcctgcctccgcctccctaagtgctaggattacagacatgagccattgtgcccgtcctgttgtttcctgtttagctgaggaggaagggttagataacttggccagtcggttgtaggaccagcactagtacagtgttgggcacgtagtaggtgtttaatacatgaccgatgagcaaatggctccagatgtctctggttccataggcagccttgaatagggctttacacacctgatgagaatgacagcctgtgttgactgagc

SEQ ID NO: 1883498 - DNA, 4001 bp, Homo sapiens
ctccttgggcctcagtttattcacatgtaaagtgtgcatcagaatgccagccttgccagcctctcagagtttcatgaacaactatgagttaagtcattcagtaaccacttattgaacacctactacataccgaacactattccagaagctgaggagaaggcactgaacaagctcctatcatggagcttatgttcccggtacagagggttgggaggcaatgatggtaaagtaatagatgtgcaatacagagtcaaagtgtactatgtgtttgaaagaaaaatagggtatgaggatagaggttgggggcataccatttagttacagtgatcaggacaaacctctttgagggtgtgatgtttgagcagagaccggaaagtgggaggaagtgaaccatgtggctagctgaatgtagactgctccagactgaggatgtagcaatagcaaagcccctggagcatcctcaggagcaccaaggagggcacagtcattgaagtgtagtcagcaaagggagagggaaggcgctctagctggagcagtagtgaggctttggattgcctaggagttgatggatatgaaaataccaggtacactgtaaagttctagtgcaacatgagtgcccccgacccatcgccacttcttgttttggaatacattttatacattaaggagaagcactgggtcagatattttacacattgaatccttgaaacattctattaaaatggtaatacttcttattcctgtcttacacaagaggatgctaaaggtaggaagcccagttttattggaatccaaaggtggttctttgcatattgtggcagacttctggttttggtttggttttgccttgcttttcttaaaaaataaattctaatgactactcagatccatttgcattgattgggtatccagtaagggagaggtggaaacagggaggcgagctgggcaccagggaaaagctgagcgggaaccaacattgtttccacagagcagagactccctggattcatgatctagatggttccattcatcagtagcctcaaagcgattaaaggaatgagtagactatcagatactaaaagcacacgagatgagaagtcagagatattgatgccccatatgcaaagtagggttctctgatgtgctagcatagttagtaattattgagaatgtaaagcatttcagtcacttttagaggatgtgaaagtgtgtctgacctttactcttccctcataatagtcaaatctcagttgcgcaatttaaccaagtgaccttaggcaagttagtggatctctctgaatcttgatatactcatttgtaaatttggggaaataagctaacttgtgttttttgttgttgttgttttgggtttttttttttttttttttgagacaggatttcacttggtcatccaggctagagggcagtggtactatcttggctcactgcagccttgacttcccaggctcaagtgatcctcccacctcagcttcctgagtagctggagctacagatgcacgatacaacacccagttaatttttgtacttttgtagagatgaggtcttactatgtcgcccaggctggcatattgttattaagctgaaatgagatgcagtacatgaaatactaggcatagtatctaacattgtgaatgcttaagttatatcaattgtcactgttattctgaataatattattattacttgagagtgtaagatagaaatacaagcagtagttagcaatatgaaacactctcacagggttactgtaagtatcagaaaagattaagagcttaataaacactagttattattattatctcaatgtcctttaagtaaaatgggttttcttcttagacctcagaaagtaggtgctgtctctcccatcttaccttcccttctttctttctttctcccttaccgtcctctttgccctcaccttggttgggcccccatcctggcgatgtcagatgcagtcgcacaggttttgctgctcacaatgctaccacattccaaagctcaccattccaattgtagacatcataaacatgtattaatcattgatcaagtgtcttgttctaacaaatcagaatattggaacaagggagggaagtatcttaagaaagagatgatttttatttttctattgtttttccaatttgcacagaggcaccctataggctagcagtaatagtctgagctttagttttcctgtctgtacaatgaagccctgaaacagatgatgcctcaggatccccatggttttgggtccttgcaggtccagaagtgggcactgcactacccaagttcatgaagtcagctttgggactatggagagcagaactgtgatatggactgtgatgccttagagacctgtgggttcttggtctctctaccttaaccacaggtacctgtaaactggggatgataatcctaaactgcctacctcacaggattatcgtgaggattaaatgaggaaagagcgtgctttgtaagccctaatgagctgcacaaattggaaagattacttacaccacacgaacacactcatatatatattaagtatgtatgtgtgtttatattttacattgcagtatgtatgtgtgcatgtgtgtatatatagtatatgtgtgtgtatatattatgtaaagctgtgaactcatagggttaggtatgaattagaagcttgtaaaacatgtttactcattcagtgtaacccaaggcagttattaaacagtaggaaaaactgaccagctaaattttccaagcctaaaaacgcttttatagttttcattgtggattgaagggtgaccttgtttccttttctttatttcaaggaaaattttaacataaatgaggaagcaagggagtcattttaatagagtgaaaacctctatatgtgggtgggagggatagatgaggggagctgaatggaaatgccagtcaccctctcactctccccccctcctcctcccagatcatctgccccgagtagcggtgagaccagaagtaaagcttccctggtcactcaagggcatccatctccagaagatgcccttctagctggtcctgccgtgcccttccttccttccttcctccctccttcttccttcttccttcctttctcctttcttctttccttacttccttcccttctttcctttctccttccttttttcttttcttccatcttccttcccttcctccctccttccttccttcctttcttccttcccttcttctttccttcctccttttttctttcctttcatcttccttccttccctctctccctccctctctccttccttcccttcttttcttcctccttcctttttttctttccttccatctttcttccctccctccctcctttcctccttccttcccttcttctttccttcctctcttttttctttcctttcatcttccttccttccctctctccctccctccttcattctcttcttcttttctacctccttccttttttctttccttccatcttccttccttccttctctccttccttccctcattcattcattcattccttccttccttccttccttccttccttccttccttccttccttccttctttcctttcttccttctgtttttcttgtttgccttggtcttggtctttctgaccccgattttctctgtttctctctctctctcctcaccaactcctgtctatgtctctctatttctatctgtctttctaggtctctgaccttctatccacttctctctgattgtcttttttctgcatttttatttctggttctctgtctttggccctatgtgttcttatctatgtctctctctttctctctccatttctcctctgtctctcactgtggctctcagtttctgcttcagtctttctgagtattttctggctgtagttctctcttggtctctttctctatttctctctctctctcctctctctgtgtgtgagtgtgtgtctttgtgtctgtgtgttgtgtgtc

SEQ ID NO: 1883499 - DNA, 4001 bp, Homo sapiens
agtttcaaagcttgggaaacagatttcatttcctgacaactaagttgaagttgatgactacaattgtcagaaaagtcatctgaaacctagaaacaggtgaaataaattattggatgatcttttagtacagttttgtgtttatatctttgattagttttctattgactggactattttataactcgttagggcagaggttaacttatagattttcatctagtagtgataaaaatgttttatgtctggtggaaaagatgactccaaaatttatgacttattgcactttaggaccttaattagttttgtatatcattcagaaatcgtattttaacattcctttattaaattgcctataaatatttagctcttaatttttcatttgaactgatcttaatatcttactggttccctcattaattaataaataaaatattggagacctattaatttcgtatttatataaaagtcaaattttttaatacttggaaaaattatactttatcaaaccccacgatttgctatacagacatatccttctttgcttcctatttttctctccattcttaacccaactcagaaaaggccaataaagtatatgtattttaatcaatttctttcaggtcccctaaagtacagatgagtcaagactagaaaactagaggttaccttgcttaacttccttattttacagatgaggaagttcaggctcacacagggaaaaaatctttctcacacagctatatagtggcagagttaaatctagaatacagattcttcctactacttcaccatgctttgacgctgcactgggtaatgagtaggcacttaatatgctgacgactcattcttaaatttataaggggtttttgtctcttttggttcaatgctaggcctcatgtctagatgaatacctggcacatagtaagcgctcaaaaaatatctgttgcatttgaacctagtaccaagcaagacaaattccttggaagttaattagaactcagaggatcatttataataatcccctatacacttagagaaaatgtatagttttcaaagtgctttcatatatatgagcccatttgatccctctgaggtagacatggcaggagttattagtcctagataacagattcaagttattgaggctctgagaagttaaaggtcatctcctgactagaatgtagcagaactgggcccaatcttctgactcctacttcaataccatctccactatttgttgcttcttcaactttgcctgtctgcttctgggcttgggaggatcattcagggagttagtccgaatattcacaatgaatacgacagcgacaacttacgctgaaagatgtgatttttctttcttaaaagtccattgttaaaggtacttctgttctaattctgattagatatagcctacagaaattagcggctaattcaaatctgaaagcttgctgaagccatgggtagccagccagagtttgattcttccctctagagtaggtatcctatgccaaagagtgggagggaatgatagcaaacgtgccacttcagatcaagtatgggacaaggattatgacttcttcgagaatctgcacagtgctggaaaagtggaaaactccctgagttaacaagaatgtgcaattgctggagctttgggggtatctcttcatgaaataactggaaaaatgtgtgccctttaggagttacatgggggataaagctccccttccttagataatctcgacaaatatgtcctctgtgggagtgtctggaaaaccagtatactcgaatatggggagttgtctcaagaaagtataaggatagacagctactggaaatactgagaggggacagtctctcttcaaggaatattgggagggagaaggcgataacttctactcgggcacccactttgggagcctcttgctcaccgtcgccgcccggcctccaactccggcaactgccatctcaacgcaccttcctgcgcagacgccctagagacccaggttccggcgtagagcagagccccgcccacaaaccacgcccatctcccatgagcccgcctctggccacacccctaccctcaggtgccagacccaccgtttctccatggagagggcccctaggggccgatctggctttgaagtacccgaactatgctggccgctggggaaatggagatacaacactcagatcctgcctttgggtagatcacaggctgatgaggggaaagagacaagtaaattataacaatgtagagtgctgtggggaggcgtccagatagcagagcctagaaagcagtggaaaaggctggcagattttccagcaaggggagcagcatgtgcaggcacggaggggtaggagcacacagtgcttgtcggggacctgccggggcagtactttagaacagctgcaggataggggcaaggggggcggtgccggctgcgctatcttggagggtcttggagtttcagcctggaggctatgggtgaccactgaatagtttaataggagaaggactttatattggagtgcgtgaagagagcagggtaagaacggaagcaggggattatcacagtaactcaggcatgaggacctaaaagctgccacgactcttgtggtggtgggaacttgaggcgacccaatggattcaagaggtaattttgaggcagaaatgttaagtggctggcttgggagaggagcggggaggaggaagtttttaaatgagcaactgaactctaaggatttatttagcaagcagtggaaacggagctagttccctgtctggtgccccattagtccctgccccacaagtagtgttagtgcaggttgagagtaggtgagcactctctttcttgtttcagcttttcccatttccacgccatgaggccttttaccttatttcttcccctttgggagtgggctttctactgcagctcttcttcctcgaatagagcctgaatgaaagtccaaggtacagtcctaagcctaatcttctgtcctgtctgtggcagcctcagtcctctgccaagacgggcaggcacacctctccccagtgggcccctgccttgtcctcacaacccaggctgtgatctgtcctagtgattctagacaaagggaagagaagcatggactagttttcaccagaatacctctcctgctactcttttggaccttttgtaggaagctggtgccgtaggtcccatgactctgttaattagattggtggtctcaggtctaggacaggatgttagcccagtggtgtttatccagaaccactttaggcttcacccactggctgtcaggtatgggggtggaggagtgtgaagcagcaaaggaccattaggccaaaatctaccattataaaggacagtcatttccatggctttccacacattagcagaattaccaaaccccaaaggctgctataagataatttattacagactagcctataatctcctgtaacaatggcacatataataattaacaacagcaaagatgcttggtttcttgtttcatgtaatggccagtacatctgtggacaatgtcgagtcctcaggaagtccaggaggctgctacagaggaaatccaagaaccatgtcacatctctcaacaagtcttgggaagtccatctgactctctgaaacagtttgtctctgacctcccaggaagtgtggagggccccttccatccagcctgtacagagggatcagagtccaggctccttctatagggttgaatatcagaggggaatagcaaatgaccccgatgagagagagagagaccaaaggctagattctttctgcaaggtggaggacggctagaaggcagtggccacagatgagcaggactttttctagactggtttctacaatttttggctttgttcagggcccacccaagaagaaaatactcctggatccttcaactagccctcaggtagacacatgttagaacagcctgtcacgtcctgaagcatcactcccctgcctagaggagtg

SEQ ID NO: 1883500 - DNA, 4001 bp, Homo sapiens
tagattctggggaactgaataaacaatagtatcactctctgagggaggtaagaacgggagtggtgtgtaaggagtaggttgctgagggcaagatgtattgtgtttgagatgccagtaaaataagcagttgaatctggaggtcagggaagagatctgggctggagacaaatcagtgatcagcatttggatattataaatcattccgaggcagtaagtgtagacacaaaagaacatcatggactatggctggggccttcagcaactggggaagaagtccagagaggagacagaaatggccagtgaagtgaggaagatcagaaggacctggtgtccaggaagtcaagtgaggaaagttgattctgtatgatcacaaccaaagtgtcaactcataagccttattttctcatctgtgaaatggacaccgtaacaccacctacttcatggcagatagtactggcacacagcaaactctcaaaataaggtagctactgttattccctgatggttggctgccagagccctcaacttccctatccacattactgacagcacctccatgagtctttctctggggtgaggtgtctctgctcactcagggcctgaggcctctgggtcaaatcgaggtcaagtggcttcagtgcctaagtctctcacccacacagccttcagcccttacttgcaaatcaacaaagggtaaacctgtagaaaacatgggtttcggagccagaattctgcctcttgccagctgtgggctcttaggaaagtttcttaatctgccggggccccactctacgacatggggagaactgctacttcatgggacagtgggtagcccagtgtagactgtaacgccggctgatctcctgcacgctggcctgggagttagaggcttcttgctgctctcctcttcaaagtatacaggactcccgccacacacacatctggaaccaagctggtctgagagccccttatagcccaggctacctgatggggaggcacagaagtggcaacccgtccactttctttgccgcaggaccccccgttaagcagcggggtccagccgggctgagttagggagggggtttcgaacgtgccactcctcgcccggcgtcgaagcccgtttcctgggtaacctttttctgcctctcttcctagcccaccaaggcccactggccagaacgccgccgcggccccaaaccactccagataaccacccgccagctgtcctctccgttctctccgccgccgcgctgcaggcccaggctcgcacccgagtcccttcgcaccccaggaagtggcgcggcctgtcgagggcagcgtggaggaggaagaggaggcgcggctcaacgcgaccgaagctccgccgcaaaggctcgggaggaagagggcggtgcgcggccaagcgtcggagctgcagtcatactccggggaccccacgacggcgccccgcccgctgcccaccctcccgaggccccgcccagcgcgcccatcccgccacgggctgccccgccttcccgccctcgtccagaaaaccccgcgcccggccccgcccccgccttcgccggggccccgcccctcccctctccgccggcgcctcgggcggcttctcgccgctcccaggtctggctggctggaggagtctcagctctcagccgctcgcccgcccccgctccgggccctcccctagtcgccgctgtggggcagcgcctggcgggcggcccgcgggcgggtcgcctcccctcctgtagcccacacccttcttaaagcggcggcgggaagatgaggcttcgggagccgctcctgagcggcagcgccgcgatgccaggcgcgtccctacagcgggcctgccgcctgctcgtggccgtctgcgctctgcaccttggcgtcaccctcgtttactacctggctggccgcgacctgagccgcctgccccaactggtcggagtctccacaccgctgcagggcggctcgaacagtgccgccgccatcgggcagtcctccggggagctccggaccggaggggcccggccgccgcctcctctaggcgcctcctcccagccgcgcccgggtggcgactccagcccagtcgtggattctggccctggccccgctagcaacttgacctcggtcccagtgccccacaccaccgcactgtcgctgcccgcctgccctgaggagtccccgctgcttggtaaggactcgggtcggcgccagtcggaggattgggacccccccggatttccccgacagggtcccccagacattccctcaggctggctcttctacgacagccagcctccctcttctggatcagagttttaaatcccagacagaggcttgggactggatgggagagaaggtttgcgaggtgggtccctggggagtcctgttggaggcgtggggccgggaccgcacagggaagtcccgaggcccctctagccccagaaccagagaaggccttggagacttccctgctgtggcccgaggctcaggaagttttggagtttgggtctgcttagggcttcgagcagccttgcactgagaactctggtagggacctcgagtaatccactcccttttggggactgacgtgaggctcccggtggggaaggagactgacctctcggttcacgtgtcttgccatagagccactctcctgagtgggtttttctcctgatcgtttgggccaagtgacttctctctgaacctcatatttctcttctgggataataaatggtcaccctttcaaggggttgttttggaagatattgtgaacaatggtaaataagggcttaattaatgagggtaagccctcagtaaattgtcactgtgtgttcatttcttcctctgtgtggatcgtgaccgagagcccttccccctagcctcctcctggtatgggtacccaaaacctaggtgagcagggatctctcccaggggcagagagcttgtgtactctgggtgttagagggctaaaatataaccagtcaacaccacgttgcccatttctggtacttccggtagcagcctgagtctcaattatcttgcccagatgatctgaactctgacctctagcctgtttcagcataggcagagagcttgagtaggtgagtttgcattcctcatagcagctggctgagcctagtctggacttctctttgacctgtaacctacaggcccacaggcccaaggcaaccacaggttgcttccagggttaccacacaggtggtttctcatttctaatgctaggttttagataattgttgtaagtgaggggccctggcaggcaggatgacatcctgccaataggagttttctgtcactttcccacagagccctggctactacatactcttgctcaatttcgccagtaattgcgtcaatgtgttcatatcaagtttgggaagaacatcttggaattggtcagacgtgaactgtggtaataatgggggcttgtttttttaagcagataattaaattcctttgcatttgatgattattctgggaagcagactagtcccataaaatgaaatggactctgccttgctgctaagtgtctgacttgagacatgctatcgagtttctcaaaatctcttccttgtgtaaaatgtggttgtcgatgattaccttacaggggtttttttaagactaaatgagatcgtgtacattaaatacaggcactcaggctgggcatggtggctcacgcctgtaatcctagcactttgggaggctgaggggagtggatcacttgaggttaggagtttgagaccagcctggccaatatggtgaaacaccatcccatctctacaaaaatacaaaaaagttagccaggggtggtggcatcgcagctactcaggaggccgaggcaggagaattgcttgaacctgggaggcagaggttgcagtgagtcaagattgtgccagtacactccagcctgggcgacgaagcaagactgtctaaaaaaaaaaaaaaaaaaaaaaatacgggcactcaatacaccgtat

SEQ ID NO: 1883501 - DNA, 4001 bp, Homo sapiens
gtagttgatatccactctgaaaaaaatcaagcaggttaaggccgggcgcggtggctcacgcctgtaatcccagcactttgggaggccgaggcgggcggatcacctgaggtcaggagtttgaaaccagcctggccaacatggtgaaatccgtctctactaaaaacacaaaaaattagcccggcgtgatggcaggcacctgtaatcccagctactcaagaggctgaggcaggagaatcgcttgaacccgggaggcagaggttgcagtgaggtgagattgcaccattgcactccaacctgggggacaaaagcaagactttgtctcaaaaaaaaaaaaaaaaaaattcaagcagtttaagcagatttgggcaggaggccattctgcataaggtagtctgaaaaggtctctgtcataaggtgacatttaagagacctgaattgaatgaaatattggggacaagtgtttcaggctaaatgaacagcaagtacaaaggccctgaggcaggaagaaatatggcaagttcaaggaatagctatcaggctagtgtggctaaggcaggtccagcatggtagagtgacagatgtgggtggggagggaaataggaaccagattgaacagggtttctgtggatttggttctgaacaaaatggcatgatctgatttatgcttacaaagatttcctggatgctctgtggaaaacagactagggaggaggaatggaggaggtggaagcagggtgaccaattagtagctgccatataacccagggcaagatgatggtggcttgatcgaggatggttacatcagagttggctggtggtgaattttgatgttttgaaggtagcactgacaaagctggctgagggcttgcaaatggcattgagagcaagagaagcacatcaaggacaccttttagattctggggaactgaataaacaatagtatcactctctgagggaggtaagaacgggagtggtgtgtaaggagtaggttgctgagggcaagatgtattgtgtttgagatgccagtaaaataagcagttgaatctggaggtcagggaagagatctgggctggagacaaatcagtgatcagcatttggatattataaatcattccgaggcagtaagtgtagacacaaaagaacatcatggactatggctggggccttcagcaactggggaagaagtccagagaggagacagaaatggccagtgaagtgaggaagatcagaaggacctggtgtccaggaagtcaagtgaggaaagttgattctgtatgatcacaaccaaagtgtcaactcataagccttattttctcatctgtgaaatggacaccgtaacaccacctacttcatggcagatagtactggcacacagcaaactctcaaaataaggtagctactgttattccctgatggttggctgccagagccctcaacttccctatccacattactgacagcacctccatgagtctttctctggggtgaggtgtctctgctcactcagggcctgaggcctctgggtcaaatcgaggtcaagtggcttcagtgcctaagtctctcacccacacagccttcagcccttacttgcaaatcaacaaagggtaaacctgtagaaaacatgggtttcggagccagaattctgcctcttgccagctgtgggctcttaggaaagtttcttaatctgccggggccccactctacgacatggggagaactgctacttcatgggacagtgggtagcccagtgtagactgtaacgccggctgatctcctgcacgctggcctgggagttagaggcttcttgctgctctcctcttcaaagtatacaggactcccgccacacacacatctggaaccaagctggtctgagagccccttatagcccaggctacctgatggggaggcacagaagtggcaacccgtccactttctttgccgcaggaccccccgttaagcagcggggtccagccgggctgagttagggagggggtttcgaacgtgccactcctcgcccggcgtcgaagcccgtttcctgggtaacctttttctgcctctcttcctagcccaccaaggcccactggccagaacgccgccgcggccccaaaccactccagataaccacccgccagctgtcctctccgttctctccgccgccgcgctgcaggcccaggctcgcacccgagtcccttcgcaccccaggaagtggcgcggcctgtcgagggcagcgtggaggaggaagaggaggcgcggctcaacgcgaccgaagctccgccgcaaaggctcgggaggaagagggcggtgcgcggccaagcgtcggagctgcagtcatactccggggaccccacgacggcgccccgcccgctgcccaccctcccgaggccccgcccagcgcgcccatcccgccacgggctgccccgccttcccgccctcgtccagaaaaccccgcgcccggccccgcccccgccttcgccggggccccgcccctcccctctccgccggcgcctcgggcggcttctcgccgctcccaggtctggctggctggaggagtctcagctctcagccgctcgcccgcccccgctccgggccctcccctagtcgccgctgtggggcagcgcctggcgggcggcccgcgggcgggtcgcctcccctcctgtagcccacacccttcttaaagcggcggcgggaagatgaggcttcgggagccgctcctgagcggcagcgccgcgatgccaggcgcgtccctacagcgggcctgccgcctgctcgtggccgtctgcgctctgcaccttggcgtcaccctcgtttactacctggctggccgcgacctgagccgcctgccccaactggtcggagtctccacaccgctgcagggcggctcgaacagtgccgccgccatcgggcagtcctccggggagctccggaccggaggggcccggccgccgcctcctctaggcgcctcctcccagccgcgcccgggtggcgactccagcccagtcgtggattctggccctggccccgctagcaacttgacctcggtcccagtgccccacaccaccgcactgtcgctgcccgcctgccctgaggagtccccgctgcttggtaaggactcgggtcggcgccagtcggaggattgggacccccccggatttccccgacagggtcccccagacattccctcaggctggctcttctacgacagccagcctccctcttctggatcagagttttaaatcccagacagaggcttgggactggatgggagagaaggtttgcgaggtgggtccctggggagtcctgttggaggcgtggggccgggaccgcacagggaagtcccgaggcccctctagccccagaaccagagaaggccttggagacttccctgctgtggcccgaggctcaggaagttttggagtttgggtctgcttagggcttcgagcagccttgcactgagaactctggtagggacctcgagtaatccactcccttttggggactgacgtgaggctcccggtggggaaggagactgacctctcggttcacgtgtcttgccatagagccactctcctgagtgggtttttctcctgatcgtttgggccaagtgacttctctctgaacctcatatttctcttctgggataataaatggtcaccctttcaaggggttgttttggaagatattgtgaacaatggtaaataagggcttaattaatgagggtaagccctcagtaaattgtcactgtgtgttcatttcttcctctgtgtggatcgtgaccgagagcccttccccctagcctcctcctggtatgggtacccaaaacctaggtgagcagggatctctcccaggggcagagagcttgtgtactctgggtgttagagggctaaaatataaccagtcaacaccacgttgcccatttctggtacttccggtagcagcctgagtctcaattatcttgcccagatgatctgaactctgacctctagcctgtttcagcataggca

SEQ ID NO: 1883502 - DNA, 4001 bp, Homo sapiens
ctgagcagcagccagagatcactggttggttcacaggaataggcagagttagtctcaattgcagaaataaacctaaaaacaactgatgagactagaatctaataggttcttgaaacaatttttttctctctctactttcccatttttactaaagacaaatcataacaggactgatttgtttgcaaaaataagctatccccaaaagtatatttcctacctagttattacacaccaaatttctctcataatatgaagcaatttctgaaatccccaaaagtcaaaaccatcagataatgcaatgcaaaatagagcagagccttagactttgagaggggtctatctgctttccattcctagggttccatgagaaaaacagagatttcccccaaaatgaggtctatggagcttcctctgtttttcccaaggagatccagctgttacagcttgaatatccacttttaattaaactgacttttaagcatagcactctaaaaaaaaattcttttaaatctcttattacctgactttatccaagccaaatggccaatatttctgggttttgaactttaccaaaggtaacctcctaggtgctcagaaaaggaaaattccagacagtttgtggatgggaagagaatcaacaaatggtaaaggtcacacagatatcaaaccagaaagaactcatcccctaagccaggaattgaaccctggactcaggctgtcattgtgaaaagacaaagccttagtcactaagctacagcattgggcagtttccattgctcttcctagaagaagtctagagcttgcaaaggcttttaactgctcaagataatttttagggctaactatgacatgaactccatgtttcttgtctgctggatgatggagaccaagagaaaataccaccatgtggttaaaaggtcaagctcccaaggacatgaaacaagacgagagggaaacttcatccagctttttctgtttcagggacctgcagcaaagtttgttactgaggtcctaagcccatgttctatcctaaggtactcctctttatgacagaccgatacagaaacacaaatttatagcacaaagtataccaggtttgctatagtcgccactccactcagcacccaaaatggaactggcaaggctcaaacttgctcctggatggaccctgtcagctttcatccaacctctgaccaagagtttcaacatgatgtttctgggcaagatgatcgccctgaataacagaaaagataagaaagagaaaggagagaaaggaagaaaagcattgccggtagcagggtggggaggcaaagaggtcagggaggccagaaaaagacccattgcagcgacactgaatcaaaagtttaggtggccgcttgtcagttgtgaagggatcttttccagcagctccatcagctctcaagtttccccttttggggaggaaaagactcttatgtgtcatgatcctgtacatgtctaatcctgttacgcacagccatcagcaaagagtgcaaggcaaattaatccaaagagaataatggttaacatcctgtaatgccaaatccatttttagccaagtgggactttactgacaggggcctctaaccccctaaatcttaggaagaactctaaccttcctaagttgcgtctcaaacccaagtccggtcaaccatccttaccttttattaagagggtcctttaacccacactgtcttaggactgagactctaactcctctaagttgggcctctaacccaatcccatctttacccgggtaaaatgtaccccaacacttacccaaagttggcccattggtgctgcagtctatttccttagggtcaggggtctcttcagtattgtcccttcatggtcaccaggaagatgttaccagaaaagggtcccaatccagaccctacaagaaggttcttggatctcacacaagaaagaattacagttgaatccataaagtgaaagcgagtttattaagaaagtaagggaataaagaatggctactccataggcagagcagcagcatgggctgttccactgttgatacttatggttatttcttgattatgtgttaaacaaagggtggattattcacgagttttccaggaaaggggtgggcaattcctggaactgagggttcctcccccttttagaccatatagggtaacttcctgacattgccatggcacttgtaaactgtcatggcactggtgggagtgtcttttagcatgctaatacattataattagcgtataatgagcagtgaggacggccagaggtcactttcatcaccatcttggtgttggtgggtttaggctggcttctttacctggtgctattttatcagcaaggcctttgtgacctatatcttgtgccgaccttctatctcatcctgtgacttagaatgcctaacctcctggaaatgcagcccagtaggtctcagccttattttacccagttcttattcgagatggagttgctctggttcaaacatctctgacagaaagactacggtaggaaagggaatggaaaaaattgatgtgcatacttgccactaggtgaagtaacaatgttgggctgtcatgtgattctgcagagtgagggtggtcaggagtaaaacagtgttcaggtgggtgtttggggaagttgtaggcagctggtgattagatttctcggaagacgtggtctcccttcaggtagcctcacagactacagcggtaccaacacctcttgtggggcaccctaacttctccaggacatgaccaaacttggcatttcatggaagagaaataccaggcctgcctcaagtactctccttactgcatttgcccctcttcagcttccctgtgaagctggaatgtaactacttaagtactcaagaggccttccacaagaaacacaaaagctttgcattccagctcttggttctctgccacatgactgtctctaagaatttctatgttatttttggaatggaaaaaccagacacagtatggcttctttgaaaagacaaggtgattgctctccagaaggttttcagaaaataaacactctaatgcttctgttcaacaggcatttaaaattcaagaagaatgagggcatgaggaaagaactgtttggacacagttaattctctgtatgtgccttatattagtggttgtagtggaatttggagcagaatataatcaaacacattagcacttatgtggaaggagcaaacaatgagatgggcgatatggcccactttgagatcttttgtttaaaacaacaacaaaaaaagagccacctggctacttttttagctctggaattttccccaggtgggctattaacatgacagagtggaggaagggaatatctagctggtgatggtttattttctgtcttctttatagatcatttcggtggggcctgtaacatatattaagccatgcgcttcttttacagctttttaacatgatcttcacacatactttcctgactgaatggtgccccaccctcaccaaaatatgtgttcacatctgaatccctaaaacctgtgaatgtaaccttatttggaaaaggatctttgcagaggtaattaagttaaggttcttgagataagatcatcctggattacctgtgtggaccataaatccaacaggtatccttacaagagacagaagagaagacacaggcacacagaggagaaggtcatgtggagataaaggcagagattggagtgatgcagctacaagccgaggaacacctagcaccaccagaagctggaagaggcaagaatgggttcacccctacagccttgggggggagcatggcctcgccaacaccttgatttcatatttctggcctacagaactgtgagaaaatatatttctgttcttggaagtcacgaagtttgtagtaatttattataaaggccctaggaaatagatgtacatattaacttctatgctgttgtcaagaaaatttaggagagatgaggatagtgttta

SEQ ID NO: 1883503 - DNA, 4001 bp, Homo sapiens
tggtacttatgcactgtggaaagagcttggccttgggcagcttccatctttgagagaaattgtctgcagagatctgacatattggtttcacatatattatgttaccgccactctaaacgtaagtaaaatgaacacatgaacagatgacagcaatgatgataatatttttggaacaacagcaatattctgtgctttgattggacagaattgagcttgacatggatcatatttccccttttaaagttaacttatgtttttcttttcattctgcctagaagaaagcagctaaaatagcagtcagcactctcctagcatttggctggtgatggtggactgtttatttggttttaagaaatatattttaactgtggctgtcagtaaaatagagaccttagcataccacaggcacccacactatgaaccacagaccacggaaaagcacttagtagttatatgtaatcaaatttgtgccatctgatacagaagagtgcctcactatttatgggagcactataacacatcttttataaaccgagaatctatttgtagtgtgaatggtctcttactctgttttaaagtttgatttttttgtgtagatgtggtcttcctcaagtaagacacttttggaaagtaaacctaaggtaatcaaacataatgaacattcattcattcattcaacaatgaagatatctgtattaaggactatgctgggtaagtgattgcaaggaggaagtgctttaatgcccctcaggtactcgactaaggccagggaggagagaagaattctgatgtgttacatattcttttcctgcaaagtcaaaaatgaaacaaacgtcttttcttctgtaacatatctatccaataacttcttgaaggcaatgttttcttctgtaacacagctatccaataacttcaaaaggcaatctttttaaaatctccttcccacatataacacacagcacaaaaatgtgatgaatttgtgttgtcacgaaatatcaaaaatgtcaatgaggagaacttgacaagtcccggggatctgaatgcccggagtcctaaactgtacctagagtcttgcagcgtcatagccagaagggacttgcgattcttgtgcccactccactctacggtcccgttccctctttcgtttttcagaggaagaaactagtgttcagaaaggtaggggaaggatctgaaactggagctaggctttttgatcttcaaactttttaggtgatttgctggatgagtctgctcctcctcttttgcaggcaggaaagctgtatagaatgacaaactttgggtttcaggggatgttctctcgttctcttttagttaaacttattataaataactcgtaagcagaaggtgtggtggcaatggatgatggacggtaaaaagaacttccccaaaggctgggcgcggtggctcacgcctgtaatcccagcagtttggaagaccgaggcggacggatcacttgagttctggagttcgagaccagcatggccaacatggtgaaaccctgtttctactaaaaatacaaaaaattagccgggtgtggtggcgagaccctgtaatcccagctacttgggaggctgaggcaggagaatcgcttgaacctgggaggcggaggttgcagtgagccaagatcgtgccactgcactccagcctgcctgggcgacagagtgagactcggacacacacacacacacacacacacacacacacacacacacaaaagaacttctctaaagacagcccgaacagacccactcggggttcagggaatttgctcttcccttggtccttaactgacctaccactccccaataactgcgctcagccactcttaggatttggcgggtggacaggcgaaactgcggatcccaggatgcagttccccccttcatcacctgtgtagcccggtcgctaccctcactgcattctgggaaatgtagtttcttatcagtaacgacaacgtctaggaaacgtttggccgtcaggttggagggatccgcccctccactggccccgccccaggttgcttaggagataagagacgccgaatcttggtacttacgttcctgccgggcaggacaggtgcatagggaactcctcagaggtctgtacctcgagggctcccatggatagccttgacagatcctgccaggactggtgcgacaggaagcaacactggttggagatcggaccaccggacttggtggagcgcaagggctccctgaccctccgctcccatcacaagaaatactcgaagccggtgttggtgtattcctggtgagcgaagtcccctcgcaagttcccgggtgctgcggggaggaaagagaggggaaaggatggaacaggaaaggaaaggagagtcagagagaggggacaggagtggagacgacagaggaaacggaaaaaagaatgagaaaagtgggggagaaatgtagagaaagaaggaaatgagaagaaaggtgagaaaaagatgagacgagagaggaatgggaaggaggaaaagagagaaaagaaagaaaagggaaagaaatattttcaaaggagaaatagagagagtgggagagagggttggagcagagaggaggaaataggagagcctttcaggggcagctcccagccacacactgggccacgcagcagccaaatccccgccacctgaggttttagctcattcacacagagcgggtgtgtataaatagggggtgaaaagggggtgctgtcagaggcctggaaatcacatttctgacacaggcacttactcataaaaggaattagaggccaggggcacagcaggagggagatgcctatttagaggaccagcctccagggctgccacttcctgggggtagggtgtacatggagtgatttgaacgaggcccctcatattttctaggctacatacaagaacttttctggccagagactgcaaactggcatctcccactggttaaggccaacagacattgtttggcatgagctctgtttactttttttttttttcattttaattagttggccacatttaaaactaggagattcacagtaaatccagggttgtatctttgaaaatttgaaagtcttggccagagaggattttatttctctggggaactatgaatgtaccagagctgagcactggctacaccttaagatgggtgttgttctgtctttaggaacttccctcgtgtaagttcttgcttggccccaagaagcatttggtttacttcttgtgctttagaacttgacctggaaattcactttctcttattaaatatcacagtgaccaatagcaacactgtgatgtataactggaagaaaagtggaaacttttaggacttttcaaattctttcccttgaattaactttcctggctctgctgttgatagtaattacatttggagtggttggaatatttgggaggggcgtgaagaaaaaaaagaaatgaaaagaagtcacaaatcttgtctactttatgtttttgcttttgaaagaaatgagtgattttgactctagccctaaggctaagcccgacttcatcccattcattcatgtaatatatgcgacccctgcagtttctgtcttgcaaactttctaaagcctattccctgctttccaacaagtttacctttctgcttttacttctcaaccctgaaactgtctctcttcctcctttgaactcagtatgagaagttatacagatttggaatccaaaactacactgggaaacagaacatcctcttttagcctcatatagggcttacctcatagctctcaagcaaaacacttagctcttctgtgactctgttaccccacagagatttgagtcataccataaatcaccactagaagttattgttaaagagaaagactttttgcaaagggacagtgcttctgctctctgctgcaccactattactttgaaaattgcattgtgaaagttacagacatcaatagcaaaaccacagaagaacacaaatgagaagaag

SEQ ID NO: 1883504 - DNA, 4001 bp, Homo sapiens; identical to SEQ ID NO: 588190

SEQ ID NO: 1883505 - DNA, 4001 bp, Homo sapiens
tgagggacagtgtggggacaggctgtggggcaggcggctgggagcggccaggggctgagggacagtagaggggacaggcggctgggagcggccaggggctgagggacagtgtggggacaggctgtggggcacgtggctgggagcagccgggggctgagggacaatagaggggacaggctgtggggcatgtggctgggagcggccgggggctgagacagtggctgctggtctcccttgcaggcccaaggcatctgtgctgttgttgggcccggagccggggatggcctgggatgagacacagcccccaaagatgaaggagatcccagttggcctcaggttacagacgggcaccccccaggagtccctgcccacctacacccagaccctgagggaactatgtgagtgagggtcctggccaccccacccccaagctggtctttggggggctgtgggaggggcccgctgaaaggagcccaggcccagagcttgcttcctgtggccagtgctggagcaacgccccctgatcacagctgacctggaagtccccagccccaccaggtaccaggtgccgagcccgtccgtacgagagtcctccccacacccccactacagcatcggctgcaagcaccagggccgaggtgtgtgtcccctccctgaggcccaaccaccgggcctgtccctcaccctgggaatgggggcctttgcctctgtgctgaaacccccacggcctgagggcccctccacccttccctgcgttcacctctaggctcagcacctgtaaggaggcctggagagaggagggctagggctggggcatgggtggacattgtgaagacaagggttcaggggccgagggtgggaaccgggagacaggttcgagtggggactgtcacctgggtggggctcccagccttctctctctccatcctccaactacagagggcggtggccgcagggcatggcagactttgtggttccagagcgaaagccccttcacgcagaaagctgacttcgaccaagagcaaaaggttgggggctgggcaggaagggggcggggagtccacgcaggcagggggctgggggttccagtggggccaaaggggggctggctgagggtccgtggggagcaccctgccctgcagcccgtctcctaccccctcgcagtggccctcgccagcccactaccagctgctcagccggcccgccttccccgccttcagcttcagaggctgccactccgcttccaagacacctgaaggccacacccacctagggctgcctggggctagggggctgggcctcagggtgcagccccagtccctgcttcaggcctctttgcaggcacctggcaagagatgccctggccccaacacctacaatatccttcctgggagccgcctgcagagcccccgctcgccggccttctcgatgagccgctcccctgcgttcacctcctggctcagcacctgtaaggaggcctggagagaagagggctagggatggggcatgggtgggcaatgtgaggacaagggttcaggggccgggggtgggaactgggagccaggtttgagttggggctgctacctgggtggggctcccagccttctctttcggcagcccgaacccctggcccagccgcctaccacgtggaggactgcaactcacgcttcccttcggcgcctggcgtggtcatccagggtgtacgcagacccaagcgccacgacacaggccccttctgcacgctctagagccagctgggcacaacctgcttggcccggccaccgagtggaaccatggcctcccccggggctttcccaggcctcccctgggacttggggccccagcctggccttctgaccctctgggcaccccgatgcacccttctggctggccaacccttctatgggctgtggacaaggctggcccagcctggatcccccatctgcccatctccccgctacactgagatgctgttggttttcccgagctctgtggtgtgcagttgtctgtccttcacccgggggcggtcctagagatatggctgccgctgggtcatttccggctttccctgttgaggggtctccattcagctgcccctgaaaggtgctctcttctctagggtggcagcctgtgactgaccctgagctctagcctggagcgagatgggaggtgggctctgtgggacacccccacccagccgtgtcactcaggggcctggtctagctgctgtccacctgagggtcagctgcttgccgagccagggaactgggaaggaggcgtcaaatgccctgagccgccacctccaggtggggtcggcctggccagacctcaggaagggcccagggatctgctcaccagggcccagccccacttcccctaggccttgagctgaagacctggctgggcttagtcacctgtgccctgaacactctggcccagggccctgcagactccactcccggggccttcacctgctgggaccctgcactgcccctgcctgcaacttcgcctggctggggcctcccttgtcatcactggcctgccctcctacccagggtcgggccccaaggctgccaccttgcaggagccttacctgcggtgccgtcacccgcacctccccaggtcctccccagacccaggacccagaccaggcccagagctcaaccccttcaaaaaggctctgggcagctgcttctgtggcctcagcaccaccccctttctcagagaggaatcccaggctcaggattgtgtgtgtgctgtgacccttgtcctcctctgccaccgaaccagctgggggttggatcaaggcactggaaccctcgccctagggctgaccaacttggccagcggcaagagagctgtggtagccatggccttgggagctcggcccggcttgtgggaacaggagctctgctcacggctgcaccaccaggcacccctggtgagacccaaagctaggagtgggagcggcaggaaagatggagcgatctcctccagctgggctgaggagggagggcttcctggaggaggtggtggaggaagaagccttcaaggaagagcaagagtttgctgggcagcgggaaagaaatttctagagaaaatttcagcagcggagaccgaaaagagagagggtgtgtgtagggggcttggcgcggcacagcctgcgggagggcggcgggctggagaggcggggaggcccggggagcccacccgcctgggataagaagggacactgtggaacctggactctccttcacggctccgcggagctcggtgggcgccacagcctcccggtgcctgggagggcggccgtcgctcgcgctcccgctgcgggcccggtctccgccaggccccggccccctgaaggcgctcagatctcagttttggcgacagcgccggggtgggcttcgtgcccgtttcacgcggaggaacccacgctcaggagggagtctgcgcctgtgtccggcccctgcggggcagaggggcggggagctcaacccccggcaaaacgtccccgctgcgcgtggctgccgcgagatctgcaagagcgttttccacgcttatgtacacgaaattcactcggctgcgacgacgtccgttcccggagcagacggaccctgagtccgccccccacgccctcacccgccctcttctgccagaaagcccgggcgcgggcgggaccgggtgggcgcatgcgcgctgggctggctgggcggggtctctcgcgccgggtgagggcgctgctcccaggaacctgcgcgcggccccggcggcgtttcccgggggccggttggcgggcggacctgggcggtgcggggcggaagtgggcggctgcgggacgcgcgcggagtcgcgcggcgggcgggacctggccgagctggagggcgccggggagcggggctcgggcggtccccgaggcccggcggagcgggcttctggggtgtctgcggcggcgccgggggaacgggctggggatggggcgcctagccgggcggtggccg

SEQ ID NO: 1883506 - DNA, 4001 bp, Homo sapiens
ttctgaaacagaatgctgtatgtcttactatcattcttttaactacatgtgtattttatacaaccttttgcatatatgataagtttcacaattttgaaaaaatgagcgtttgtaaagaggaacacaaaagaaccaaccattagctaaacttattattttgggggtactcaaaacctttcaaacagcacttgatgactacgattaagatctttcctgctgatttaaaaatggcaaaactcttcctctgtttgagacagacgggttttcaatttatttttttttttttggagacagggtctcacactgtcacccaggctggaagtacagtggtgcaatcttggcctctgcctccagggttcaagcgatcctcccacctcagcctccctgggactacaggtgcaaggcaccacctctggctaatttttgtattttctgtagagatggggtttcaccatgttggccaggctggtatggaactcctgggctcaggtgatctgtgcacctcatcttcccaaaagtgctgggattaaagacgtgagccaccgcacccggccggttaccaatttcaaacaagaaaagtaaaaaccaaacagaaaagctattgcttactaccctaacttggtacatttctgtgcttgttaataactaataattaacttgtcctctcacaaccaccttgagatgcaggggtacagggtaaattagtactgagatagtacctagcactaaaatagaattatctttcttgcacactttttctacagaggatgatagtttttcccttcaaagcactggtaatagtcttattttcttccttccatttctgcttacttggttactgtctttatcaaactattaaaatagtaaatacgaccagatgcggtggctcacacctataaaccaagcactttgggaggcccagacaggagatcgcttgagctcagtggggcccggctgcagtgagccgtgatggcaccactgcactcccgcctaggtggccgagagagaccctgtctcaaacaaaataaaaaataaaaataataaaatagtaaatatactgcaattgtctccacctcacttcacctgacaacactattttgctgtaatggccatagaatcttgatctgaccaccgcccatagtaagcagggaactcagccttccaacattaattaagagcccaacaattttaggtttcagttagaaaggacagctgcgcttcaggcttggttcttgccaactactcagctattttggatgagctgcacattttgtctgtaacttcctccataagtttttaatcaagagatcttccaggaatgtagggcctgcttcaccttccacagcagctgcgcaaaacatgcaaaacatacacttcgatttgtgttttctgttagctttagctacttccctcagcccagactcccttcagtcttttgttttgaataacaacctactgtgaagcttcttaaacactagttttatttaaagcttgtattatccttttccttttttttttttttttttttgagacggcatctcgctctgttgcccaggctgcagtgtagtggtgcgatctctggctcactacagcctccacctcccaggctcaagtgaatcttcctcctcagcctcccgagtagctgggaccacaggggcaggccaacaagcctggcctatttttgattttttgtagagacgaggtcttgctatgttgcccaggatagtctggaactctattataatctttgtcttaatctcatggagacgcccccgtggtcactgactggaggaaggaaatacacattttaaaggttttaaatttcctatagaagggtctagaacgtaccgcgctataacgaacatagtagtaagaccaccgccacactcctgaggaaacaaggtcacgcccctctgcgggccgcttgatcgggtctttaattaatcccgccgcggccttcccgcctacccccgagcgcgcacttccggtcgcgagggcgctcgggagcgcgccccgcgagcctccaccaaccagcggctccgcctggccagacagagtgcgcgcgcgcacgttgtgcgcaggttcgaatctccgccgcttcgcggttgcttctcaacgtccgggccgcatctcggcggcggcgagggctgagcgcgggagctgcctccgagccggagccccagccctaggccctgcgcgagctgccccgccctaccccctccagcgtcctgtcgcctcctcgcccgacttcggcctgtccctctctcacgcgctcagtcctcgctcttcgccccccgcagctatcggcactcggtctcccgcgcctggcgggctccgcccgagcctctgggcccatggccaagcggcgtgcggccgagccggtgacgttccacgtgccttggaagcggctcctgctttgcgacttcgctgagcagccgccgccaccgcctctctggatccggccgcccggggtcgcgcatgctgggcagctcctcggcgtcccagagcagcaccgaaagcgcaaaatcgacgcagggaccatggcagagccctcggcttcgcccagcaagcgccgtgacagcggggacaacagcgccccgagcggccaggagcgtgaggaccacggtctggagacaggcgatccgccgctgccgccgccgcccgtactgccggggccgggggaggagctcccgggcgcccggctcccggggggcggtggcgacgacggggcggggcgcgcaggacccccgcggggagactggggggtcgcatcgcgccaggtaggggctgggggcgggtgggctgaggggcgaaggggcttgccttttccccacacacacaaaacgccccggttcccactcatgacttgtgtaggttaagacgcctgagggggttgaaagaaggggtcaccgctccgggagaggacgccgaccgccagaagcacaccccgagagtccgatgggcagaaagcactgggctgggcgagggggaaacagaccgtggtcgggagcgatagaagtggccttgcggcgtcagcgccgcgctccgtaaaagggaaacgggaccgtgggtcgtggcgggctgtgagcatggcgagaacgcagaccgtcagggcataggttcagcccaaagacaaacgacagataaaggtgtagagggccttcctgggtttaacgatgattagtctagaattcgggatagagttctttttctagagggagaccagtgtggtagccattgattaattgaacgtcctaccggctggtacagcttctggagaaaaggatggaccaccgtaccttggtcaaagctttgttttaactcatagtgttaaatctgatcctaggcaaaagtatcattgaaaattaatttgggggcggggcgtggtgtctcacgcctggaatcccaggactttgggaggccacggcgggtggatcacctgaggtcgggagttcgagaccagcctggccaatagggtgaaactctgtctctattaaaacacaaaaactagctgggtgtggtggtgtatgcccgtaatcacagctactcgggaggctgaggcacaagaatcactttaacctgggagatggcggttgcagtgagctgagattgggccagtgcactccagcctgggccacagagtgagacgctgtctcaaaaaaaaagaaaagaaaagaaagaaaaaagaaaattaatttgggccttaaggcgtatatgagaatcattggcgggtttttattcaagacatgagcctgcctcatctctgcatgtaagaatcctgagaagatctaggtatgcctcggtttgcctagatctctgctgcccggccgctagccggtaagaacacttgaaacgtgactagtccaaatggaaatgtgctctaagtttaaaatatacacgaaatttcgtggatttaataaatgaagataaaatagctcaattttatattgattacacatgaaataacttggctatattgaagaaaatatattaaaattaat

SEQ ID NO: 1883507 - DNA, 4001 bp, Homo sapiens
agtagttgggactataggcgcccgccaacacgcccggctaattttttgtatatttagtagagacagggtttcaccgtgttagactggatggtctcgatctcctgaccttgtgatccgcccgtctcggtctcccagagtgctgggattacaggcgtgagccaccgcgcccggcctgtcactgatctttcaagcaaatattgattctagaacttccatttcttggtgttgcactttcagaaaaaactgattgtctcattctaaaagccattgcaaaaagttaacaacaaactcaactttactgactttacccattcagcttattgtcagcatttatattaacttttcttttcttgtgaagcctagtatttctatcactctcaccaattaccttaagaaataattacttttgtattgaagtcaaccactgaaattcatgctaaatatgtactacttaataagatgccatatgttatatacatgcttagaatcccgtttatcaagtttatttcattgtaatacagatatcgaatccatctaatagtggtgggtggaagcaaaaacgatacattgctcttatttctaaaaccaaagatatgaggaaatgaacaaaatcatggttagagagagggtaatttaaaattatcaagttttgaattgcagcaattctcgaattttttttttttttacctttttctaaagattttatttcttttgtgctacttcctaacaaacatctactggactactggaccaaaatggaaatgcacacgataatgaggtcaggcacaaggccaggaagtaagctttcccaagatgatgatgatgatgatgatgatttaattaattaatcaaataattttttgagacagagtctccctctgtccccaggctggagtgcaatggtgcgatcttggctcactgcaacctccagctcccgggttcaagcgattctcctgcctcagcctcccgagtagctgggattacaggcgggtgccaccatgcccggctaatttttgtatttttaatagagacggggtttcgccatgttggccaggctgatttcgaactcctgagctcaggcaatcctctcgcctcagcctcccgaagtgctgggattacaggcctgagccaccatatgccaggccccaagattatttaaaagcactcacaggtgagtgtgaatcttcgggctggcttcccacctctccccaccagcctaaggcatcaggagctttctgccttcttcactccctcgcataaaaacccacttaaaaaaaaaaaaataataagatccgccggaagtggtggctcacacctgtaatcccagcacttcgggaggccgaggcgggtggatcacttgaggtcaggagttcgagaccagccgggtcaacatggcaaaaccccgtctctattaaaaatataaaaattagccagacgtggtggaggacgcctgtagtcccaactactctggaggctgaggcaggagaatctcttgaactcgggaggcagaggttgcagtgaaccgagatcgtgccactgcacgccagcctgggcaacagagcgagaccctgtcttaaaacagacaaaaaaacgtaacatggcagagaaggcgaggtgcacctattttcccttattgtttagcccatacaacttctagttgatgggctgaaatcccaccagcatctctgagaccttcacaccttctattctcaggttaagtggacagtgggtctggggttttgtctctacagagccacatcggccgggcctcacagatgcgttttccagagattcctgagctgccatacttctttggtcccatacgaccttttcctcccctcagccctcaaaatcaccctctctcctgcctccagcctctcagggctcttacctgaggtaaaaatcgcctcctgcatctcttcctggggtaaaattcccgcccgctggacacgtgaccactgagcctgcactctgtgcttccattggccagaccaggccccgccccttgggctccgggcacttccgtccgcgagtgggcacagcctagggaggtaaggattgtggggattcgaggctgcagcctgggcagcgccgaggtcctcgggagtgagcagaaccctcataacactgggcggagtgtgacggtggagaagtcggcgtgaggctagaaagagctggttgtgaagggttgggaagacccggcaaagcagtccggacttctttgggagtggcggctcccatgttgttagcgaggccgggcaaaacgcggcagggttagccggagggcgagggcagaagcctttcagaggtaagggtgggaggatttagcaatcagacagattcagggaaagaggaaggcaagagagaggaggcaaacgtgcctcaggggtctggctaggtgtgggtcatggcttggtagcagaagaacttttgaggaggggcaggaagatactgcttttcaattggcacatgtggattctataccttaattaaagccactcccttacatacacacatttaggtatcgccagactcgcctgatgaggaataattattctttcctccatatttcttaactcctgtcttttccatgaaacggcttggcattaaactccttcccagaagattgcaagaagtaacatgcatttatttactttactaacacatgggtgtcttttgagttgattgttcaaatactaattgtgaaatgtcagtggataagtcactttattttcttaagttacttcctttattttgtacaggtgtgtgcagtttgcttcggttatatggatttaatgtttgacaataatcagttttaaagatattcacctaacattgaagtgcattaatcatcctgtgttcttggatgtctaccttttattaaaatcaattttaaattaaatatctttgtaaaagttacaaaaattggccgggcctggtggctcacgctgtaatcccagcattttgggaggctgaggtgggtggatcacctgaggtcaggagttcgagaccagcctggtcaacatggtgaaacctcatctctactaaaaatacaaaaaaaaaaaaaaaaaaaaaaatcagccgggtgtggtggcatgcccctgtaatcccagctacttgggaggctgaggcaggagaatcgcttgaacccggaggcggaggttgtagtgagccgagatcatgccactgcattccagcctgggggacagagcaagattccgtatcagaaacaaacaaacagaaaaaccaacaacaaaaaaaaccaaaaaacaaaaataacacatgcttatccttactataaacaggaaaaccatccaaagatgtatacagagaaagtaatcgccattcccaccccaactcccaggtaaccaatattaacaatctgggttgattcttttcacactttgttgtatgttcatacaaatttattcagatatgcatgtacaacgttgattggctaattatatttaaaaattattacttttaaaaatagctgcataatattttatagtaactacgtgccatgatttatctaaacattccactactgatggattaacagattgtttccaattttttggaaacaatgacaaataatgctgcagtaagaattcttggacatatgctcttgaatactttctgtggcatagatttgttttggcttgctggctgaaattgtaagagcatttcaaatttaataaatattgccaatttttccttccaaaaatgtatagcagtttacattaacaataccagaaaggggtcatcattctcctgaatacccaacagtactgaatatattgctctttagaaatttttgccaggctgatgcatgaaaaattctatcttgttttagtttgcatttctctgactactgctgagattaaacatgttttagatgtttatgaatcctttggatttcttcttccatgaattgtctaattatgcatgtggctgtgtatgtgtgtatatgtgtatgcatctgtatgtttgtgtgtgta

SEQ ID NO: 1883508 - DNA, 4001 bp, Homo sapiens
ataatttgttatgcagcaatagaaaataatatagtgttctattttttcactttacattacaacttgaactttgtctcctattaatgttaactaaaaatttaatgtctatgtctaatatatgtgtttggattataatcaatgtaatgagtctgaatgattgggcatttaaatgtagccattatttgtgttagggatttgttatttggaagttgtgttgttttgttatttgtgtttgttttgactcctgtggtcacatgaaagaaagatgaaacatctttctcaacaactgctgtgctataacccctgagagagagagaaaatgtacttctgaaaggttattttgcttatttaaaggagattatggtactttgtgagagagctttgtgtttcaaaaacagaggcccttgacacctatagactacatcgtccaaggaagaggatgaatgatgtgggctgcagacgtttaacagatgggctcctccctggctaaatgactccccaagactggggaaagaaataagacttgaactgtgacctatggtggagatatggccctatctgagcccgatgctctgggtgacctcagatgggcactgctacgtggctgtctatgtggctgacaccacacactatggctagagaggttctgccaacccagctggggtagaggaattcagagttcttctcaccacccttggctagtgtcaacttctatcagatttcatttcactttagaaaatatggaaatgtggcatttcatacattcctgggatgtggaacgttcctacctgtttcgtaagtagtactatgatatataattctacagaaatatgtcaccatttttatcattattttaatagatttctagcaataggtcaaaagatatacacattttaaggttctttatataaatgataaaattagcagattcctagacctgtaagcaaaagtatatataagacgctagattcatcataaagtctccctttggcctctgcccccaaaccatcccaacataccaactcctaaacatccaaggcccacgggagcacatccaggcactggctgggccctcatcaaggaaaccagcagtgtgcaggctacactgcataactgcggggacaggcagggcctggacacatacacaccagctccaccacccacagtttgggtgagcttgtgtagttacttcctggggctcccatacaaagtatcacaggctaagtggcttcaacaacaaacatatattgtctcatggttctggaagctaaaagttcgctatcaggctgttggcagggttggctctttctgaggactgtgggggaaggatctcgtctaggcctccctcctagaaatcgctggcattccttggcttacagatggctgtccttcctcttctccctgagtcttcacatggtcttccctctgtgtccaaatctccctggtttttctaccagtcatattggatcaggacccatcctaatgactccttcctaacttgatcatccacaaagaccctttttccaaataacgtcacattcacaggtggggaaggttaggatttcaacacatttcttggggtcagggacacaattcaatccataataccttggcaagtctcctatactctctaacgcactgtttccagatcacgtcaacagggatgacactgcctttcccactgcgaggattcaatttagatgacaagtgaaaagataggtcaatgataggtagagcattgacccagtgtctggcccatggttgttgttcaataaacattggctaagttatcaatgaaaattcttgctataagtatctcatgacacacacgtgggatacacagaaacccatgctcaactgggcaggcacgtgtgtttatgtggctccccagtgtccctagagaagattctctcttacttttcaggtgtctttggccttttcctcttccagcctctacaagcaggttgtttgcccagacacagacctctctcccacaaagcccactttggagattggcgcccgccttctgctgctagttagttgtttgaaaagtgctgacgcttctcttcatccaccgtgccaggactccgtgccaaagccgcccacacaagcaaggctcgccctgcatgccagggtttcagaaagtggacctggcaccaaccaagcgtagaaagagaggcccttgtgatacagcctcccgacacactcacacacacacacataccagccagagaccagagaccccaatcagtacttttaaaaggaataaaaattgctcaatctctttgatgatattcaaagagtcttttttaatatatgaagaagcacattctaaattcttaacacatctggtgtcacccgctcttttccccctctaaaccctcttaattccataatttagaaggtcttaagataccgaaggatctcactgaggcataattggatatcttgtgcgttccaagttgcatctgatgtcccacctcatcccagaaacttttccactgagttggagagaaaagatttgggggttcggggagcaaggacggtgctctgcctgctcaagtgggctttgacagaaaagctgagctgcctgcaggaaaatgtttgctattcattttgccctgacactccaggagagaaagcacaatttcttttgtgattggaggtaatgtaatctacaggaaaatcaatgtgggctgacgggagaatcgcccagctgatctgcagaccagagacactgaatcacagcagctgaaagcggcatggcagtgaggccgttcctgcagcctccgggagaaagtggtcttggaaagctcacaccctggggtgctcctaacctcaaaggagcccgtggacccagccgcccaagccaccaagagttaagtggcaaagtgctcagttgtggggacagtgctgggggtacagagggccacaacgtgctctgctgggttactgagaacagagagatacatacagaagaaggaagacagacagaggacctaagattgtaagatacagacagaaagagatagggagggagcaagaaatagacacacacacacacgcatgcacacacacacacacacacacaaaacagggacctctgtttcaaattgtcccctactacaaattgtcctttactactttttaaattaaaaattcagacaatgtccccaccatccccaaacagcaattactttagtaatcaggaaagaaaatgttgcaaaaataaataaataaataagatagacttaacaaaaaataactctcgccacccaagaaacatctgcgcatctgctggccccttactggtctggttcagctgacttcagcactcacagcagcagcggcggcggcagcagcaccagcagcaaagttagcaggtgtcaccccaatgtggccgcaaaccgcttctcaggattcagagacataaatcagaacaacaggcccatactacccccttcccatatgtcccctgtacctaagccacaaccactcacaggcttctggcccctggacgcttgctttaaggcattacaaacacccaccccccaactttggaggtgagggtgcttttctagaatctctgtaacctttctgggtagtcaaaccacctggtcatttattattaatacctgaagcatgtggaaaattgcatttgggaaaggagtgtgttaactaacaactagagcccagacctggagtgctgggagagaggctggtggttcccactggtacccgttggtgcccattgctaatctctgacacgaggaggctggagaggcccagggtgggatggggcaaagaattgctgatacatgcaggcctctcggtggccccctccctcctgcctataacaaaaacccttcccccatctctccttctgcctggagtgtataacaggcctcttctaccccctcgcgaacttcctggcaatggcttcctatttcacctattatgttcctggcagaaacttttaaggccaccgaggcagcagtctc

SEQ ID NO: 1883509 - DNA, 4001 bp, Homo sapiens; identical to SEQ ID NO: 588226

SEQ ID NO: 1883510 - DNA, 4001 bp, Homo sapiens; identical to SEQ ID NO: 588230

SEQ ID NO: 1883511 - DNA, 4001 bp, Homo sapiens
ggtgtccaggaccgaggaggtagccccgggctgggaggaacctgcacagcccacgtcccctcaaagctgacaggctcccgttcagagtgtctgcacggctgaagggggctttgccctgcagggcgacacaaaggtgagggacaccctggagtcctcgactctgatggagaagtacaacaccaggatcagctttgagaaccgggaggaggatatgatcggtacaggccccggaactggggcccgggctgcaggcgggtggctggaacacaggtcggggtggcgccggctcccatcccaccgggacatcctggagggacagcggggctacagggtgcatcagttgtacctgcaggactttaattgatggaggtgacttagtgatgccatggggaggctaaagccactgaaataccttgttaatttctccgaaaggaggaggcatgccatgccagacgggcccggaggagaggcaccagggctggagcagggaggagcgcggtgaaggcctgggccggagcttccactgggggttctgcgggaaaggctaggcagggcagcgtgagccgctgcgaatgggctgggctgagtcctcccggcacgctggggctgtccctggggcaaggcacctggcccgggtcggtggagggcgggggcgagaggcgggtcgggcggctgcgcctagctgggctagccccgtgtgcgagccgccgcctccgcccgcagacaccttccagttccccgacatggaccacagctacgtcccttcgcgcgccgagatcaagaggcaggcgcagcggctaatcgaggggaagctcaaggcggccaagaaaaagaagaagtagccccgccgccccgctccctgctttgctacacaaataaacatttttccaggactgctgcggacgctggggcgaccggggtctcggagaggagcacgggacacgcaggatcgggggaggttctgcgtaaggaggcagcccgggcccggaactgcgcgccagaaccgcgtgcgcatgcgccgaccgcgcgcgccgcgcccccgcggccctcgcggcgccccgtagccgcgcacccctcccgtcccgccgagccggcgccaagatggcggcgctgactcctggagagcggtcgcgccggaggccgcgggggccggagcggagcagccgcggctgaggttcccgagtcgccgctcggggctgcgctccgccgccgggaccccggcctctggccgcgccggctccggcctccgggggggccggggccgccgggacatggtgccagtcgcaccccttccccgccgccgctgagctcgccggccgcgcccgggctgggacgtccgagcgggaagatgttttccgccctgaagaagctggtggggtcggaccaggccccgggccgggacaagaacatccccgccgggctgcagtccatgaaccaggcgttgcagaggcgcttcgccaagggggtgcagtacaacagtgagtgcggcgggccgggggggcgcgggagcgccgcgcgggtctccgaacccaggccccgggcgccgcgcggtggtgggtgtcggtctcacctgcttgccggttgtggggtgcgctgggcccgccgggcgctccgggagcgggggcgcgggccaggggacgcgaggagaggccaggccagggccgggtcctcgcggcccccgagccgcgggtcgtttcccagccgcactcgcctgccgcgtgtcgctcccgccgcgctgtgcagtggagcgggtcggcggcggcggggttggcccggctgcccggcccgggggtgattacataatgccaagcagggcccgccggcccggggcgccgcgcccccgacgctccacggtgcccagccccgggcaccactcacctgcaggaggtgcggggaacccagccggccttggcgctttcagcgggatttttctttgttgacttcctactgagtttgaagacagaatattagctacgccacacattctcgcctttttttttaaaagaagcgtttgtaagagacgtatctagaaaagctccagaaggcacgggctgacttgcgactgtaggagacatcccatttctcgtaggaaggaggagtcatttacggactcctgagtgcctgggacgctccattcctttgttataaattgtgtaaattgtcctcgacctcttatgagtttttccatcttgcgggctctttcccagtagtttttgaaagcttttatgtggttccctgttttgacattgcttccctcttagccatttccgtatgtttctatgaggttttaggacgctacgcctatccagttttttggtcactttaaggggagccttagagcctccgtgatatttccatggtaatgtagaattttaagaactaatgatcagaaagactcttgtgcaggtttaaaagcaagttcatgaattcgcgtgccgtgtgcacggagagaggccgtagttcctggggctggagctagtccaggaggacagtgaagatgtcgccttccttagtcccccggcctgtgagcaagaggaagctgcagaccactcgggccaccctcacccagacacctttagcagtaagcaagataaaacaacttcttaaagataagtctgagcatctaggtatgaaagttggtgtccgggccgggcacggtggctcatgcctgtaatcccagcactttgggaggccaaggcgggcagatcacgaggtcaggaattcgagaccagcctggccaacatagtgaaacaccgtctctactaaaaatacgaaaaaaaaatttaaaagaaagttgatgtccgaaccaagggccgtattggcttttcttatactctagaacatacgacgacaaagaagattttgatgaagttcaaattagagtcagcgtgctcatcagaaagaaagcgcagccaacacgtttaggaacagaaacggattatgttgaagacaaacaatccattgcgtttgtgttcagtaacccaagcatcaaaggaacttgtggctggggagaaggcttgactatttgaaatctcaggactcctctgtccaggagctcccagactcccgtggagtggaagcctgggggctcgctgaagaagtcacgtgactggaacgtgcttaatgcttggctgtctggtaaggaaaataaagtggtgcattttgaataaaaataaaagctgattttaaatgtgttataattgaaactttatacatagctggcattcggagaagagaatattgagtcaaaataactgagtttacgccagtttttagactctgcgtttggatcctttatttaattttattgcttacagtattggctaagctcagtattagtccctgggaaatcaggcctggacctggaaactgttcaccttctgaaaaggctccccgagggtcctgggcaaggtccacctcatgcaccaggaccacccctgtgtggtcctgggcgagtgtgactaaaaagggcaatggggtccttccagaggagaaaagccagtctccagtacttggagaacaggttatgatctcctagaactgaatgaaaggtggtgagacagagagaaatttgaatttgtacctaaattacattttagaaagatgttatctttatagctgaataacatgcaattttaaaacttttgagtttctgtgttagaatagaaagtttctagtatttcttttcttttcttttcttttttgagacagagttttgcgttttgctgtgtctcccaggctggagtgcagtggcgtgatctcagctcactgcaagctcctcctcccgggttcacaccattctcctgcttcagcctcccgagtagctgggactataggcaccggccaccacgcccggctaattttttgtatttttagtagaggcaggatttcaccgtgttagccaggatggtctcaatctcctgacctcgtgatctgcccgcctcagcctctcaaagtgctgggattacaggcgtaagccaccatgcccggctttctggtat

SEQ ID NO: 1883512 - DNA, 4001 bp, Homo sapiens; identical to SEQ ID NO: 588239

SEQ ID NO: 1883513 - DNA, 4001 bp, Homo sapiens
caagatgtatttgggggtaaaaacagtaggacttgctgttggtatgagaggtaaaggagagggaggaactaaggctgaactctaggttttggactggatggtgatgccattgattgacacggagaagacccaaagaagtttggggaaggcggtgagatcaagggtttggatgtgttaaatttaagatgtgtatgaaccattaaaatgagatgacaaatcagcgggtagacatgagtctggagcacaggggtaaggtcaggacttggatttcaatttgagaattatagatacacagatgttatttaaagccacaggaataaacaggattctcctcactggccaaaatatgaggaactctaaagttagaggtcagctagaagggaagaagactgaggagaagtagtgaaagaggtaggagaaaaactaacagcattagcgtttatatagggcttactttatgccaggcactattcaaagcactttgtggcttcatggaagcaaagagaaaaatgtttttcttttcttcctccctttccagtctctcctgtgactttcacccctaaattcaaaaggtttaggtgcaaaagtgattctcagcttttatttgtaattaattttatagtaatcttgtactgttataatcttgtactgttataatactataattatagtatacattcattggaaaaatattcaaacagcacagtacagggaagctaaatgtggaaagtaaagatcctcagaagctttccttcctaggctcacccaccagaggtaatcattaacagtttcttgcatatcctccaggaatgttctgcgcaaacacacacacacacacacacacacacacacacacacacggacgcaaacaaataccatccctctctcttctctctctgtatacgtacgcatatgtttaattctgcaagttgctttgtttaaaactcaataccttttggaggtatttatatatcagcatattcagatacaatttactttttttaaaaagggtaatatgccattgtattaatattccatactttaagttcctctatcgatggacaattagaatgcttttttttttcttgccacacacacacaaaaattgctgccagaaatctttgtagtaaatctttggatattggtgcaaaaataattgttgcatactttcttagtggtgaaattgctgaatcaatccgctcaagcctctcatattgtcaaattactcctcctaaaaggttatactaatgacattctcacatcatttccttacatcttggtacacatttggtattaagcgacttcacaagtttgccagtctaaacacatggaaaaaaatggcgtcatgttgtttttatttgggtctctttatgagtagggcagcaagacctgattgttaaacgttcaagttttgaagttaaactccctgggtctggatcctacttcttccttgtaaaatgtgtgatctcgggcatgctgggtctacttcctcgtctcaaaaaaagaggataaagagagtacatatctttaggcttaaacaagatacgcaggcatacaggaagcccttcttatgcgttcgctactagcggtactgatcctaatttttttgaagccgtgccggctccggtactttatttttggtgtgctcctccaaccaaccaagtttcgcagaattctgttgttgcctgtaattagaaatgagacgaaaattggctccgcttgttcaaaattctcctccctccgccccaactctgccttagaatcactggtttaaatgtcaatgtaaaggaatgagttgcaatttttaagcaacatgtaaagtgcacacctggtctgagtacctcccggcggccaggacccgccgttttcggtatagggaacaccagataacaatatataacgctacctaacaaacgtttctccacccacagcgccattagcggttaggtttgcagtgccgaagagctgcaagaaaacggggcttgaaacaggaatacaattgcagatccacccactacacgcaaagggcccgggacgcgcctccacagccccgccccaaccggaagtgacgcaccgcgccgactatttcttccgccgtccgccggtggcgaggcccaggctgtcgccgggtgtgcagcggcgtcgcggccagtagagggattctgggtaacggcccggacccccggctgggcttctggctcggcgcagcaggttccattcacgccaagtctgttggcagtggcagttgtagggccaagggcggttgtaggacccggagcagccggacatggaacaaccgtggccgcctccgggaccctggagcctccctcgggccgagggtgaggctgaggaagagagtgacttcgacgtgttccccagttctccccgctgcccgcagctgccaggcggcggcgcccaggtgagaaggggcctgcgttctgcggagggatggagtggtgctgtcgccaaacccctggaatgccgcgtctcccagaccctcttctacgcctttttctacgcccacctcactgccaggggccggggacctgggacctgacgcctgatgccatcccaccccttttatggcatcttcggagggcagacggggtggccatatattaccaacctccacctccacgcacatgttttctttcgccttggctgattcctgttcactcttggaataccttcctccatctccccttcctgacagcactcagatttggggcggctcatgctgtaacattgaccctttgtcctcttgtgagaggttttccccaagcactttattctgttaaaggctctagcatacttgtgcacagttgctaggaacagtgaatgattgtagttcagcatcacactgagtcctgacaaagatttcacatgcgattttcaccgatgttgacaactgagtaaattctttaaatctcgcttttgacgctggcgtacacctctcccattcgcgtgaccatctttgccttactgttttgttttttagttttgcttcacgtcattctccagtgaaaatatatacgcatatacttgtgttttccttcagacttctcttaggttcctggtattgtgttttcaatccagcattcctgccttcctgcgactgaaacgtatccaaatgtgatatactattaaggatttttcagggacctatcttaggggatacttacatactcgcatcaccttgtcctgtttttttctccgaatccgtgtgtgttttggaagtatatttcagaatcacagactaaacactaatatattcaatggatcataagtgtctgccgccttcttgcaaaatggggttcccaagagtgtaacagatttaatagtagttttcctctcaacttattttgctagatgttaatgagaatgagttaaattgcttaccagtaagcgtgacattatcaatcttatgtccagctaacagggttagttggcttcacacagagaaaaatgctgtttcataaccactgtctgtactttggccagctaagtcactggggaactacaagacattttttaggaggacagaatgagagttgatgggtccatcattagtcacccactaattttggatcactagtgtcatctttatatacaaaatgtattataagcacatgatgtgctagggaggaaagaagaatgaacagcagatgccattgtcaattttgaaggcatatgaagagaaaaaagggtgtcaagaatttcagtgcattgtggttgaattacagaagtaatctagagaaatatctgtatgttaatttcttacttgtgcacttctaaatttgtttagctggaagagattttagaagtgagtaagcttatctctctcattaaaagtgttttccctgaggccatgtaactagttagtggccaggttaaaactagaacccacttatgactcctagtccagtatattttcccacctactgcactgcccaccagagttcgagaccagcctgaccaacatggagaaaccctgtctctac

SEQ ID NO: 1883514 - DNA, 4001 bp, Homo sapiens; identical to SEQ ID NO: 588246

SEQ ID NO: 1883515 - DNA, 4001 bp, Homo sapiens
ctatcttgcccgacctgggaaacagacgttaaggaagataacaatctattttcagagagcgagtttataaaaccaatgcaatgggtaaatatgaagtgtgaataggaggagaagctaaagagtggtcggagaatctaatgcaagctacgggagaaagaaactcaagtgcaaatgctgcctcaggaataaacgtaaaaagagactttcaagtgcaaatgctccctcaggaataaaataatcttgagactctcaagtgtaaatgctgcctcgggagaaccgaacggcgagctggagcccatacgcaacgagattagagaggaaggcagaagccagagcacatgaataaatgagcatccattttgtttcagaaatgatcggaaaccatttgtgggtttgtagaagcaggcatgcgtagggaagctacgggattccgccgaggagcgccagagcctgaggcgccctttggttatcgcaagctggctggctcactccgcaccaggtgcaaaagatgcctggggatgcgggaagggaaaggccacatcttcacgccttcgcgcctggcattgtgagcaaccactgagactcattatataacactcgttttcttcttgcaaccctgcgggccgcgcggtcgcgctttctctgccctccgccgggtggacctggagcgcttgagcggtcggcgcgcctggagcagccaggcgggcagtggactagctgctggaccagggaggtgtgggagagcggtggcggcgggtacatgcacgtgaagccattgcgagaactttatccataagtatttcaatgccggtagggacggcaagagaggagggcgggatgtgccacacatctttgacctcaggtttctaacgcctgttttctttctgccctctgcagacatccccgattgaaagaaccagagaggctctgagaaacctcgggaaacttagatcatcagtcaccgaaggtcctacagggccacaactgcccccgccacaacccaccccgctttcgtagttttcatttagaaaatagagcttttaaaaatgtcctgccttttaacgtagatatatgccttcccccactaccgtaaatgtccatttatatcattttttatatattcttataaaaatgtaaaaaagaaaaacaccgcttctgccttttcactgtgttggagttttctggagtgagcactcacgccctaagcgcacattcatgtgggcatttcttgcgagcctcgcagcctccggaagctgtcgacttcatgacaagcattttgtgaactagggaagctcaggggggttactggcttctcttgagtcacactgctagcaaatggcagaaccaaagctcaaataaaaataaaataattttcattcattcactcatttattgtcaacatttattgagcacctattacaacaatttcatcgcatggaagacagcatcgtttctgacactgttgtttcatgtatctcttagaaaaacgctgctattagacatctaacactatttatcttgaggtgataaaatatcaaaagccgtgtctcaagatcgatgaaatgcggttaaaatgatgaatagaaactctagggggacctcatatcgatagactcgagactggcacatctggagatccgtatttatccggcttccccttccagatcacgcgaggtttgggatattttgctcaccaggcctcagccaggtaactgaatccagccaaccctggcccatagtctcggaatccgactcggctcccagtccccgcctcggcgttctgagacccccaggctggggttccagagggctgtgaggttgcgaatgactgctgccaaaccggaaggaactctgcggttctctgccacagtgggattgttgcaggcacgcggctcagacttcactgaggttgggagatgctcctgtccacgctgcctcatcccgtgctggagcactgcacctctatttttttttttagggtacacgccacataacataaaactaaaaattttaaagagtagaattcagtggcatttagtacaatgttatgcaaccatcactcctatctagcccaaaacattttcgtcaactgcataggaggccccattaagcatacctgttaaactcttcttgcctccaactcctggcaactacaaaactccttttgtctctatggatttacctattctgaatatttcttataaatgggatcatacaatatgtgaccttccgtgtctggcttctttcaccaagtgtagtgttttgggggttcattcctgctgcagcatgtatcagtacctcatttcattttatggctgaatcatattccattgtatgaatatactggaaattgctcgtctactcatccagtgatgaacatcgagttgttttttggcttaaaattattcatagtgttctcatataaatataaatatgtaattattatttttatccatatttattacattatttatatttttatatttttattgtattataataattttataatattatactatgataatataacagactgactcctatggtctgtcagtgtgctcttccactggcgtgctcccttccgctggggtgccccgctccacgtccagttcctccgatgagttcctctggacatagagccgcttgtgtgtctgcctgctagggtctcagggttttcataggcaaaggatgggggcgtggcgggacagggtggtcttgggatatgcaacatttgggcgtgaaggaaggagtgcctgtcctcacctaggtccagtgggcacaggcccaggggagggcccttaccagggacccgcctttgtctacccaacacttccctgcccctcttctctatcattgcgtttcagttacctttgccttggttcagcactcacttggttgctgtaaaactttcttactgtttcccagagttcccacgaagtcaattctggcagcttttgcttatttttctgtgtttctatataggaatgggccctgcgagctcactactgtgccacttttgctattatcttttgttgttgttgttgttcaatttgttttgttttagggcaggatggtcaaatgcttatgatgtgccaatttcctgcctccatatatctcctgtgcctggtacgcagtgcccatgcccggcatcctcactttctgggcatctgtctgtcaacatttctctgaagctcgctagctctaccactcagctgtccccctgaaaattttctccaccttcccccgcagctgtaggaagctcaccttcctccttacccttcctcaaccccactcctgttctctccctttttcccccttccacccccatttccccgacttctgctgggggtgggagggataaccgattcacagacattcccctccccctcgccgcttctcgggagattgctggttcgcagtcctacgctccactcgccagcaggctccgctgtggtgtgagcacctccgggagcgcaaaggcgtccgctttgaggcactgggcctcgggccaggcagaggctatctccgggacccttttatggagatctgctgttaaagcccacgcgtgtttcccgagcacactgagcacacgcatactgggcctgacgactccagggagggacctgctccggaaccgcggactagacccgggtcccagaactacccgtggaggaggccgcagtaacctccgaagcaggctgagagactcgggtgggctttctccagtgaaaaaaaagaagccagaggggaagggtagatggagcaggaaagaaggacggattctaagcatggctgttcgaggccctgaggctgcagaactgactgcgggactgcggtttggaggcggggactttccaaaaccacggacgaaagaaacctcccaaccaaccgattaagcacgggggctgtggagcagaagggcaataaaaggccctgcccaccgaaacctgtaaaagtttcctttgtaagcacgcgtcacgagcgcgggtgacgaggcc

SEQ ID NO: 1883516 - DNA, 4001 bp, Homo sapiens
catccgacatcgtttttcttccaggatgaactaaccctttctaaagcgcccttcctctgtgggacagaaaacctaatgcccccctacagaggcggaggccggctgaaggtggtggtaggaggggaatgctgggggcgtggcataggtgcagaggaagacccataaaaggatctggttcccatagagctgacattctacacaacaaacaagtaaacaagtacataagtaaaataatctcttcgtcctaagtgctataaagaaaaaaatcacggtggtatgagggtgcctgaaaagggaagcatttctgaggaagggctacttacttcagaagagacctgaaggaaaaagagctatatttgcgaagagggagaaagagcagccatactagacagaaaggtggcatgtggccccagcacaaagcacggtgttgggtaaattctgagtgaaatctacctaccggggaggtgcatttgtaaatatctagatagatatttagagtggctacgtaagagtgatcgctaaatctcactttttccaaagggccccgttttgtcttgggtttgtaccgaggtccggcagcaacgtcaagtgatggggcgggggatggggaaagagaagtctgccgctcctctaggctaccgcaccgccttaagtgggtggctcggccagtgcaggcctcactttcctcccctgtaaggtctggggggcttgacgtctgatctgtaaggccctgtcggctcacgctgtggttccacttcttcaactaggccactaggcccaagcgcatgaacaggaagccactgagaagcgggccacatttccaggttcccggagctgggcctagtcccgaatcctctggcacacacccacccactcaggccgcgggtccagcccgcgaggtttaggacggatccaggcagaccgcaggctccgggtcggggcaccgggtcagcgcgccggcctgaaggcggcgtcctgggctcgacttcccgcgcgcggagagccggcgagcccgcgtccgagttcctggacgagagccgagcctcgcttagaccgcgctcaggacccggctcctccgcattctccggctgcccctgtgtcctcgactcacccctcctttctgccgctccttcctttccttgccctgcttttactgttcccaaacaggaccgcttttcctgtctcccagctggaaaggaggaagggagagagtccagaaaggatcggtgatgtggaagaaaaggggaggaggggacatggagggggagaccggagagagaacgtacgccgaggagtcaggcggcgggatcaaggggagtcggggtgtctgggcgcggggcagagcgtggaggcggcagcggccaacggtcgccaagacaaccattctacgcgaggacgcggcgacaggaggggagcggccagcaggggaggggagcgcgggggaagaggaaagaggaagaagcgctcagatgctccgcggctgtcgtgaaggttaaaaccgaaaataaaaatgggctagacacaaaggactcggtgcttgtcccagccaggcgccctcggcgacgcgggcagctgggaggggaatgggcgcccggacccagctgggacccccgggtgcgactccacctacctagtccggcgccaggccgggtcgacagctccggcagcgccagcgccgcgccgtgtccagatgtcgcgtcagaggcgtgcagcggtttagtttaatttcgcttgttttccaaatctagaagaggagcggagcggcttttagttcaaaactgacattcagcctcctgattggcggatagagcaatgagatgacctcgctttcctttcttcctttttcatttttaaataatctagtttgaagaatggaagactttcgacgaggggagccaggaataaaataaggggaataggggagcggggacgcgagcagcaccagaatccgcgggagcgcggctgttcctggtagggccgtgtcaggtgacggatgtagctagggggcgagctgcctggagttgcgttccaggcgtccggcccctgggccgtcaccgcggggcgcccgcgctgagggtgggaagatggtggtgggggtgggggcgcacacagggcgggaaagtggcggtaggcgggagggagaggaacgcgggccctgagccgcccgcgcgcgcgcctccctacgggcgcctccggcagcccttcccgcgtgcgcagggctcagagccgttccgagatcttggaggtccgggtgggagtgggggtggggtgggggtgggggtgaaggtggggggcgggcgcgctcagggaaggcgggtgcgcgcctgcggggcggagatgggcagggggcggtgcgtgggtcccagtctgcagttaagggggcaggagtggcgctgctcacctctggtgccaaagggcggcgcagcggctgccgagctcggccctggaggcggcgagaacatggtgcgcaggttcttggtgaccctccggattcggcgcgcgtgcggcccgccgcgagtgagggttttcgtggttcacatcccgcggctcacgggggagtgggcagcgccaggggcgcccgccgctgtggccctcgtgctgatgctactgaggagccagcgtctagggcagcagccgcttcctagaagaccaggtaggaaaggccctcgaaaagtccggggcgcattcggcacttgttttgtttggtgtgatttcgtaaacagataattcgtctctagcccaggctaggaggaggaggagataaccgccggtggaggcttccccattcgggttacaacgacttagacatgtggttctcgcagtaccattgaacctggacctcccttcacacagcccctcaatcgtgggaaactgaggcgaacagagcttctaaacccacctcagaagtcagtgagtcccgaatatcctgggtgggaatgactaagacacacacacacacacacacacacacacacacacacacacacacacagtaggaaaggtgtatttcaagcacactttctttctccttggggagaattattgctaaccatctaagttttctggaggcggccttttttctccccagcctcccggcggggtcaccctctcccaccttccaggagagtggaggacccgtgagatacggggcacgcaggcagcgacttcctgaaatgctaacaaggatcgtaggatcagttactgctgcgaggagcaagcacttgcttcttgggggagttttgcagccaacagggaaatgggctttctttgtgagttagaggtagaggtccggcggcctgagtgattgaaactgctcgggacaatgctcgtatgtttagcaaacgacagaactgtagaactgttcctgagaaatcccaactgatagtattttagtcatctcagacgacagttagcacagtttaaaaatgaggcctacttcttgaaaaacagaatccaaggtagttttgtcctcacattgacaaatgttgacacagccagtgtaatttcctataaccaggaaaactgaaagaatatatgtacagttaaaatatgtacaatgctaattaaaacttgtgtaataagtctaaaagtaatttaatgaggcttcacttttatgaccgtccttgtggtatgcttcgccaggaatatatagcttcaaaaagcaaaggccagcggaggggtaattatttttttactgcaatgttaattgtctctttgacatggaaatataaacctgttaaaactatcagtgtttaatttagtgtctcaatttctattagcaaaaatttataatctataggataaatgcacattttattttttacttttcatattatgcaagttaatttttttaatttagtcaaaggagcttataaaggatttcagggcctgttgctggatttgattttaattcattttgaaacattgacaagaccctggttgttgttttttttaacagtggtttatccgtatcagcaaaagtttagccactgtgaccggta

SEQ ID NO: 1883517 - DNA, 4001 bp, Homo sapiens
cgttggcgtacaggttgatcgggtcagcggggatgaagtctccatcaatgacagggacgaagcccacatagtgcagcatggggtctgggtgggagagccagcaggttagcaggttcttgtaccttccagttttccctgagccgccccttgcctctcagggctggaattggctatgtcctcccttctctgatctatggacacttggggcagggttgattctgcaccatcaggggcatcctgtgccctgtaggatgtttagagcatccccggcctcgacccacgaggtgccaggagcaccccctccccagctgtgacaatcacagatgtctccaggccctgccacacgtccccaggctgagagccactgtctagggccagatctgtcctcttcagcggcagcccctccctctcctctctctctttgctgggcctgaagcaggaaggaggaaacttagaagccactgagggaactgatggagaaggagctccctctctcagggctgggttccagtccatcagccaaaaatggtgcgaggtctgcattgtactccagacccctggacgggcccctagaggacccagtggctgctgaggcaggcggggcctggctgtcactgggcccagcacagcaggctttgcttctagcggggccgtgggggttgctttgtttgggcttgtccatcctgagggcctcagggtggggaaatggggaggggtcgtgatgacctgccgaaggcctctcagcaccccaagaagagctcgcccaagaagaaggtgacctgtcctttgagtcaggagcccaggaccactgcccaaacctcccggtcccagggccagggagtgtggagagcaggcagcagaggtggagacaggagtccccagggcctgagacaccgcaggcggcagaacagcgtggttgggatctggggtcccctgtgtgactcctgctgggggcagggactgggccgggcaccgacaccggcttcctgtggggcttggggtttctgtggcttctccttcacaggcagagagggtagaatttatggatgcctcgagagagctcctgcctgccggctctctttctggagggacccggacccgggtgtggagtagctcggctttcagcttcctgcacaggaataggaggcagcagctgtgccatgctgggcaaactgcctgcctgcttctctccagccgtctgcctgctctccacactccctgcccctgggcccgtttccccttctgtaaaatgggaacaacagagaggttggtaggtggaatcaccaggattagcaaatgtaaattcaagaggcccagttacatttgaatttcaggtaaacagtgaattgttttttagtatgtttcatttttttctttttctattttttgagacagagtctcgccctgtcacccaggctggagtgcagtagcgtgatctcagctcaccgcaatctccacctcccagcttcaagcggttctcctgcctcagcctcccgagtagctgggattacaggcacccaccaccacgcccgattaatatttgtatttttagtagagacggggtttcaccatgttggccaggctggtctccaactcctgacctcaagtgatccacccacctcggcctcccaaactggtgggattgcaggtgtgagccactgcgcccggcccatagaaatttgtttcaaatattgcatgggacatacttacacagcagttcttggcagtttatctgaaattcaaatggaattgggcatcctgcgttctacctggcacctgtccccatagaaatgagcgtgagtgcccgggatctgctgcggggctgtgctgggctctttctcagcctggcccgaagtttccagatctgattgagcgagagagcagcaggacctgcccctctgctgggctcttaccttcgcggcactcgccactgcccagcagcaggtgaggcccaacacaaccagttgcaggcgccccatggtgagcatcagcctctgggtggccctccctctgggcctcgggtatttatggagctggatccaaggtcacatgcttgttcatgagctctcaggcactccctcccctctacaccctcaggtgcagggagatccagttttccccaaacccacagtgcacctgtgcaggttaccacttacctgggagcagaggcaggtggcaaggtggcgggtggtaagggggatggtggggccgggcagggtgcacagtgccctgccttctggtttgttcacagggcttggtgtcactgtcagagaaaagggcatactttgtctccatgccctgcctgtcccctaggtccccagaggggcttcacaggggaccaagcacgtgacttctgggacagagagggtgacatgctgtgggccccccacccaagtggctgaccttatctgtacgagcttttcctggggccatggagcaagcagtccaagctgggtgcgggtcccagagcagcacaaagccgtctcattcaagggtggggagatgtcaccatccagcctgatgcatcctgggagggaggactagaggctcagggggtgtgggtgggggggtgcggaggcatctagcccaaacttgtggtcttccctgaggaaagaaaggacacagccaaggccctggggcatgcccaggcagagtgacaggagagaaaaggaggccagcgggagggaagggagaaggtcctgtgaggttgtggaggaagaggaggccactcgtattttctgtgaacaggtattaatcctggagccaggaaaggctctgagaagtgaaagaacaccacgaacaaagtcttcagatggggcctgtaagctcagccagtgtgaggtcaccctcaccgagacgctcggtggcagctccagccaccgcacagccctctgcagtgatgggaacagggtgagggcagccagagccttcccacccaacagtcccccaggagacactggggcctgtgcttcccacaccaaccacactcccgttctgccacccctgcggccggtgccagggaccgagtggacctgcagagccacgtctgtccctctgtctgtcgaccacagccggtgccagcaattcaggaggcctagtgggcgagggaggctggggaaaggactggagggtgggaggaggagctcggccacaggaaataaggggcctgcaggtggctggggcgccccagggcaaaggcatttgcctcagacctttgcccggctactctagttctgagaacctgccctaaataaaggaggtaattctgaactgggagacatgccctttgtgctccaggatattcactgcagtgtcatttacagtggctaaggaggaaaggggagggcagaggggaggcagcagggagaggaaggaggtgggggagagggctggggcaggggagagggaaaggaaggccccactttttatatatatacatttttagagcagatttaggttcacagcaaaattagaagaaggttacagagatttcccgtatgtcctcgccccaacccagtctcccccattatcaacatcccccaccagggggtacagctgttatactttatgaacctacattgacatgtcataatcacccagagtccacagatttaggggtttttttgtttgttttgagacagggtctcactatcacccaggctagagggcagtggcacaataacagctcactgcagtcttgaactcctgggctcaagggatcctcctgctttagcctctcaagtagctgggattacaggcgcccgccatcacacccggctaatttttgtatttttagtagagagggagtttcgccatgttggccaggctggtctcgaactcctgagctcaagtgatctgcccgcctcagcctcccaaagtgctgggatgacagttgtgagccactgcgcccagcccctaacctagttttggccatgctctgagcccacattctttgtggaacctcaagatggtatctaagctctgtactctgttgagaagtt

SEQ ID NO: 1883518 - DNA, 4001 bp, Homo sapiens
caggaaataattatttccctgccatcaagtgtaggtgtgtgctgggggagggggagagaatagttggactcatctcaggaagcaggacaccaggttggggggcactggatccatcctggcttctggggccatgtcctgagtgcatcctgtgtacttgcatgggtgcatgtggacactgatgcacgcctactgggctgggggtcccaggctcctaggggcacatggctggggtcaagggtgggccggggttcctgacaaggacttacatattaaaatccttcattttctcttgatcattggtgtacaattacggaaaagccacatctgacctgggtcatgtcccactgccctgactcgactgctctgagcttctcagggcccagtggcaaggctcaccacaggggtgtcggggacagatgacggatctgaggggctcccgagcatccaggtttcaggctctctccccaggagcacagcagggggcctgccattcaaagcaatctggagaagtacagacctccaattgagttaaaacattaccctttcagtttatgatgtttatagctaattagctaacctcaccagtaaagttatttttttttttagaaaaatggccctggcattaccaatattctgtaactcatttgcagttgacaacattgtgtagccactagtcttatcgaacagcaaaccaccataggttgccttctaccatcttagcaaacctttgcctacagatgccaataatgttgctttctgttgcctgaaagaagatcttgagccccattaagaagggcattttggggtcaagatgctctcaccttaaaccaggcttcctaagctccctgcctgcatgattcccacctcctactccgtgtcagtcgggttgggtgaaagcagagcgggtgagggcctctccagggccctagggctgggatttcccagtcttgcctgagaacaggaggggctccccaggacagtcctgcctgggctgatgctgacccctcccccaccccggtttctcccaacagatggctgctcctgtcccgtgggcctgctgtgctgtgcttgccgccgccgccgcagttgtctacgcccagagacacagtccacagggtgagtgctcacgggagccgcctgctgacccccctctcagagctgggcatgaaccctcactggcatagctgcatcctgacactacccaagagtcacacactggcattgtcacacatgaccacccagagggacatggagtcatgtgacactgatatgcacagtcctccacactcacactagggtggtcgaatgctgacggtgtctctggcttgagatgatctgtcttcttactagggtggcatagggtacaggcaggtgggatgggagttgacgggggaggctggggcgggacctgtatattgtatctgggtgaaaggggatctctcggagatttgtggggtgcagttggaggcaccgattggagacagtgggcaagactgcaggtcaccttctaccctcagcttcatcccagacggaggatggggacagagaaggtggactgagaatgagacgaagggacaggctaacatgcgggagagagccagtgcactaaggaagggacaggttaatcagctggaatggccacacgggggagggacagctcagggctcggccattggcagcctccctgccctccctttacctatttctccagtgaggggcaaggcctgcccacagcccacaggacaaggagcggtgttaacagaggccctcttaacttggccacctgcccctctactgcacttgaggcagcacctcaaacagcaacatcagcccgaggtctgaactcaaaactcaccttgaaccaggcttcctaagctccctgcctgcatgattcccacctcctactccgtgtcagtcgggttgggtgaaagcagagagggtgagggcctctccagggaccaggcatggagcagaccctggtggctgggctctgccaccctcaaggctgtgggtagtgagtcgaggcttatatggcctcttctttatgagatcatcagtgagacccggagagatcctggccagccccaggggcattgactgggcatccctagggcctgccagtggtctctaccttgtgtccccatggtcctggacataaggccacctctctgagagtgtgaaactgtgttcttgtgagggtgagagtgtgtccctgtttgagtgcatttctctgtgtggctgtatccttgtggactgttcctcacgtgtgacattgtctgtctatgtcaccttgcctgtctgcatgccctttgtggggctgtatccttgtgtttgagactgtaccccacatgtaattgtgtctctctgtttctctttgtgtgtttgtattaaactgtctccctgtgtccctgggcataactgctgtgcctttaggtgatggtgcccttcttgtacgtgtacatgtgatctcgtatcaggtgttaccatccctgaagtgagacagtgtccctgtgtgactgtgaacttgtgtgtgactgtggccttgtggatgactgtcctgcatgtccttcttctttaggggtgactgcccttgttcctttgtgtgtggcaaagtgaagttgctttgggatgcccggggggactgtttctgacatgtggtccccctgtgagcctgtgtgtgcaggtgtgagggagccgtcagctctgtccctctgtgttctccatgtccatgacctcatcccgtctctgtctctcatcctggcttctaacaaccttttcacagctgattcctttggagcatttgtcaccgcttcagggccaagaaccccaatcctccccctgctgcttgatttaatttctgaaatggacagcacatcagtaggggcacccacggggcgggagcagagctgtccagagacaaaagattaaatcactgccatctttggagcagttgcatggctgcgtgtattgccattgttgtgttattgtagcagttgtgacactgtgtgcttgtcatgtcctcttacccctccacctctccactgtggcctgtcgttgtcttctgccattgtgttgtcattttttcgttctgccctgcctttacatcatcggtctgtcattattgtcaggttgcgtttctactttttttgtgcagcagacaaggtgtggtggggaggtgttatcccatagccattgtatgtaatgtgttgttcggttgctgtgtcctcgtgtggtggccgtacctgctccccaggattaagggccacactgggtccacgttagcgttgagctgcctggtcagtgttgatgtgttgctgctgggaccatgatggccacgccccctccccaaaggtcagttttcagcctcctcctcaggcagctggatgcaaagtctctgctagggggtgcagagagaggggcttggcatgtttcctggaagctccaggtttttggaagggaggctggaggggggctcagtggctggagctggtggactgttgggggcgctcagtggccggagtcttggacactgggcctctggtcagggggaggcccctgtttagtgtctggtccagcctcacagctgtggcctccaaggcccccagccaccgcccttccgcccgttcatcgtctgttcggctggtcccaggctccacagatgagtggtcagggctggctgggtttcctgcttccttcttctctgacagggacagagaggggcaggatagagataggcagcgagggagagagacccggagtcacagagagaccctggcacagcgaggacgacagaggcagcaaaccgggacagatgttccagtgcagagcaaagcagggctgaggagggggctgcaatgggaggagggggtggccagtgggtccaagggggatccctacacccctgcagtcttggtggtgttaacaagcctaattaagaggccactggcccaacttaattggctcgttaacaggaattgcctctaaaaatcccccaactcagc

SEQ ID NO: 1883519 - DNA, 4001 bp, Homo sapiens
agtttcctaactaacccacacacactctatagtaggcttacccttctttccccaggctggctagcgaacttgcaaaacataaccatttaggggaaaaaattgaggcaattaaaattaaaagtgttttaggctaagtaatgaataaattaacccactgaaaagttacatcaaaggctattactcagcattttaccaattacaggaatttctgcaaaatctgcccagccatttgtttgtgtatccctgggatcagtgcccagagttcaatctttctcttgatgcttcctgttgttttcagggactcaatgagagcagtaagtgacctttcactcagtgcaagtctatgggcactgaagttacgaaaatatttcccttcatgcagaatcttcctaacaaagctttcccatgtatttgtcgggtcaaataacattcagataaactgcacataatccccaaaatgccaaatgtttagagagcttttttttttttgagacggagttttgcgttttgctcttgttgcccaggctggagtgctatggtgggatctcagctcactgcaacctccacctcccaggttcaagcgattctcctgcctcagcctcccgagtagctggaattacagatgcctgccaccacgcccggctaatttttgtatttttagtagagacagggtttcaccatggtggccaagctggtctcgaactcctgacctcaggtgatccacccacctcggcctcccaaagtgctgggattacagacatgagccactgtgcccggcctagagagctcttcccatgaagagccatttcatgccatcatcaacaggctgccttcgtgggtggccaatgtgcttctggaaaaccagctgtgaataacgtgagcaactcatggtgtctacatgagaaggaaacttttagatgtccttattgactttcttcttggtattgaaggtggtataattattatagttacatagttttatctggaagaattacttgatctaaaaggtaatttaaaattagtaaaatttattagatatgaggatactacatatgatgtagaatcatagcccattctagaaataaaagcttcctaggtgtttaccaaattaaggaaaataaaaaacagggaacccgatggcaaattaaataatgtaaaatattagcatccagagaggaatcattttcaagatcacctaaatgactggctgagttttgtctttaaccaagaactttctactgagaaacgaagcccctgacaggggtgttcaagtgttattcccttagtagttagggcaggttattaatttagtttcgcctacaggcgctctgtccctatactgcgtggaagttaattagcattttaactctgaagctgccaaggtcggcaaaactgtaagctgctaacatctaagttgatgcagtatgatgtaatgtctgccagttttttccctgttagacttaattcctacaaaatattacaatcctaaaaaggaataaatgacagcatttgcaggctaatctcttattaagatgctcttttcaggttttacagaaacggccactttctcaatgaatattcaagaacatcgattaaaaagtcaaaacatgcatggtatatcttagactcccccacaagaggaaagtctattgtaaacaaaatcgtctttttcgggttgcaattccaaatatttttttaaggttcttcatgttcaggagcatgttctgcaattccacttccaaatattaccgataataaaaaaatacaaagttttccagacagcctagcgcaagttttaaaccatttgctgtacttacgtggatttcctgctcctacggggctccaagtctgagtggggagaagcagcagcaccttgaggacggcccaggccactgaagccatgctctcttcagccaggcgccctgagacccgggcaaggcgacggccgctctgcgtcgttcctgctctcactcccgctctcactcccgtcccctgcgcggctccgacgctgctctgtctcccctgtccagtctctagctctcttcctcacgcactggcagcctccctcggcgctgcagaccctcccgccaagccgcgcccggccccagctgcgtctccgaggtcggccccgcggactcgcgccgcagctttctggagcgctcggggccgcgcggcgccgccccaggcacggaggcggcaggttcaggcgcgtcccggacactaggcgcgggaggcggccggcagcaacgcgagtcaagaagcgagcgggagggacgccccagctccgcctggcgctctcctcccgttataccggcagcttcctccgtccctctctcccaccggggcggggcggccgcggtgcacggactcgtgccaaagaccgcgccgtcagcctccgcctgcaggtggagaacgccaggctttatcactctgctgttcacccaacgcaggggctgcacccaggaaaatcctgtcctgtttgagttcaaatagggaagatggggcagaaataactctgcggcgtgtactcgggcagacgcgcgcacactttgattttgctaggaattctgacttgtagagaaccaagctgggaaaccgggccaggagcagggagaggccggtgagcctgggttgtgcgagtgcaagcctttatttaaagttttaatattttgtctatcatgggttttttttctttgcgattacattcaattttaaaactatttcattcattcaggattagcgttacttaacagttgctcctgagactagtgcgttagtcccttcaccctagtcctggccttggtggaagtctaaaatttatgttttattccagctttctgtccaaaagagcaacccctgcaagtgtaggatgaggagctcagtccagcagcagctaacactgcactccttgcgcgcctgctgtgtgctagagagaggggcagaggcgggaggcgggaggcagggggcgggggggtctttctctttttctcttcctctgcttctcaaattcacagtaggggcaaagattgacaaactcactcacattaccaccaccgcgagtttccaaaaaagaaaaaagaaagaaagatactaacttttttagatggtatctctaagaaatagtgtattaatcttccctttggaaagacaactttgaaaggctttttcattaaaatgaattcaaatgtaatagatgtaaaatgtaaaatgaattcaagtgtaatagatgaagaaacttacaaagtcattcttgaattataaattgggttcacttaaactacttttgcacaagaactctgtaaatagcacgtcttttattacagaaaaaattataaatctaaagttttgattgacagatcagttgccttcagtgagacagagagaaaatggaaatcattttctaaattggacctagagtaaaacaacaaatgtcaatctattattataccaatttgtcaggcatcagatggagtctttaaaaatgtgaacttggccgggtgcagcggctcatgcctgtaatctcagcactttgggaggccgaggaggccaagaggtcaggagatggagcccatcctggccaacatggtgaaaccccgtctctattaaaatacaaaaaattagccgggcgtggtggtgcctgcctgtagtcccagctactcgggaggctgaggcaggagaatcgcttgaacccgggaggcagaggttgcagcaagccaacattgcgccctgcactctagcttggcgacagagccagactccgtctcaagacaaaaaaaaaaaaaaagtgaacttgggtgttcaaagtgttaggcttaatggagaaaggacaagaaacttctacggtggtagacatttgcaattaaaaaaatggcttcattaaactgtaaaatcactagcgtagtgagggtgaatgcattttttacaacattggaggaatatgtttatgaatattattcccaatacataaaatatacattttacacacttataggtacactcaa

SEQ ID NO: 1883520 - DNA, 4001 bp, Homo sapiens
aggtcgcgtcccccagctgggcagaggagatcccggcaggcagcggagttgccgaagccgtggaagccagggccacaggaccagaggccacacagagccgggcagggcagccctcatgccagagccgtagctccagggtcgctagatggagcacaacctccacctggtgccaatggccatcgtttagggccaggtccggcagtctcaggacaagcacagtggtgctgtagctccagagtgtggcctgaagtgtggctgccaccaatgccagctccaagctttccttggtgtcattgcgagtggccaaggtcccagcgggcagtgtggtgcgaaacctcagtgccagacccagggggccaccagctggcactgatgcctgaatggggctcccagccatcacagagaaggtggtattctggccacagaacggtccatgggtaccaggtgggcagtggcagacgtaactgtggaccccagactcgaagatagggatgcaggtggcagccagcgggcaggtgtggccctggcagccagtgagctgcacagaacagtcgcgcccaccccaggtctctgggcacctgcagatatagcctgccacagtgtcactgcaggttccgccgtgcaggcagggatccgacaggcattcatccacatcttcctcacatgtcggccctttgggagagacaaagccaaggttcagtaatgtctggggccagaatcacagtactgacccagaacttacatgcctcttatgatggggacctcagtacctatcagccaaaccaattcccagaggatttctcatggtcccctcaagtccccccgtaggccagaagccaagatgccccttcccttctcatgtctggtgagtgtccaggccctgtagatttaatctcctaaacattctccaatgcccctttctcctaccccccatctcctgccttaccagctgtctgggctaccatcccgcatcccccagttcgccagccttcagaagccctttcccatccatctccaccagtagccagaggtccatttctaaagcatcgccaggctgggttcctctgccgcctgaagtccaatcactcaccctgacatttaagacaccctcatgggctgggtcctaccaggctctcaagcctcaatcctgcttcccacaaatcttgaacgtcccattcctccgagcatttcctggaaagtcgtgactctggggctttgctcatactgttctgtctgcttggaatgcctcattcacccttacccttcctttcaaactcctactcatcctgcaaagcccaaactcaaagggcccagaggctttccctaactcccaacctcaaactactgtgtcactctgcagtcccaggcacagctccccagaaccctgtattaaaagtatttgtttactcagctgagatcttcagggacctgaatatgtccttggtgcccagcaaagggcctgacatggcttttatggacagagtgatggcatggaggagctagtggggtagtgcaagtacccaaggcactctgagtggcctcccaggctctaacccctcagtccctctgccccagggcccccacactggctgtgaaggggctgcctcatcctccctctagggatcccttcaggtgctcaggccccagcttgggtccagaagccatagcccactgtagctcagccagagccacatcccagctggaggaacccaggcccagagaagtcaccagggtttgaagcccagcctcgatcagctcacaaacaccacagcctcttcctaggaaccaccacccaccaacctccccctgcccagggcccacattcctccatacctgccaggagccacaggtggcccaggaaggtccacagagcccccggctccattgccatgccctccagacaggttgagagtggtgggcgggcactgaggctggggaagtggggaggaggcagagctccctgcctggcccagctgcctccttcggagcctgctcaggaatgccaggcactggcctcccccatgcccagcatggcctaaagggagggaggatgggcaaagagcccagccctgcagctggggtcccccctccctggctctgacctcagaggtctgccctccctgtcacccaacagtgagctcaactgggagaggagccgggttcccgctgatagtggtgaacctgggggatgacaccccctcatcctctcagctgtaagatggggttttaaacccctgcctcatggggctgtggcaaggaaaaaacaaaatgcagagcaaatgcttcccagaggccagacgtgctgtgtgggcccactgtgtgccaggtacccaggaggccatggctcttggagcaggacttggggaacctcggcccatggaggcagtggatgggccttcgggacccccaggagtgtcagccatccagggctgggggacactgagtcccaccatcttcaggcgagtgagagaggggaagaggtgaccaccatctctttcccctggtggaggagcctgtgcccaggagcctgccagggggaggaggcagtgtgccccagcaggaatgcgggcgggtgtgagggaggtgtcgcaggcattccagagggggcagggacgttcagtgttggcggtggagctccctgggctcaccggggtcctgtgtctgtgcatctgcgtgtacccaaggcaggggcagacttctgaacccccaactcctgcctgacaggccccagctccccaaaggtcagagtcatccttctacagatgctgccccctaactctctgcaatagcccccctttccttctctgtcctggctgaaccacctccgtcttccctgaagaccatccctccacacgttctcccagacaacctcagcccactatggccccagctgccaggactacactcctgagccccagtctcacctccaaagcgagtcccagttcagccaccctcagcggtcacctgggccaccatacccacctcctccctgatctccttgaccccatcaatccacacatccagacagaagggaccttctcacctgaggaccaccaattctgatggtcccagggcccaccccaccccagacacctgcgtagccatctgggcagtgacactggaagccattgggcaggtcctggcagtggcctccgttgaggcatggccgtgaggcacactcgtccacctccacaccgcagtcggctcctgtaagaggcccagctgtgggtcccacctgcaccctcagagccaggcaggggctgagagggtccattctatagctagagagactgagtccaagagagagggcagactcgggtgtggggtgtggggtgggggggtggggggggtgggggggtgggcacaagatccctccctgggcatctggacatgggctgaccgcttccccagcaggggctcaccctcaaagccaggagggcagtggcacaggaaacccgcagcatggcggaagctgaaggcgccagggaaggcggcctggacacccccgtagagggccgggtcagagcgctgcaggcatcggcccccatgctggcaggggctcgatgcacactcgtcctcgtccacctcgcacagctcgccgctgtagcctgggggcacacacacgcggacatcaggtctcacggggttgccgggcagcacctcttcactatgaccaggctagcgagggccagcaagggaccgcagctcggaataagccacgaatggcgagggagggacacactaagggccgcaggaatgaccacggcagccttcagcagcagtggcctattactgctattactagtcttactactaattttttttttttttttttgagatagaatctcactctgttgcccaggctggagtgcagcggcatgatctctgctcacctccacctcccaggttcaagcgattctcctgcctcagcttcctgagtagctaggactacaggtacatgccaccatgcttggctaatttttgtatttttagtagagatg

SEQ ID NO: 1883521 - DNA, 4001 bp, Homo sapiens
cagagcaagattccgtctcaaaaaataataaataaataaataaatagttatgcattgtatggaaacatcaggtagaaatattgcatgtaggccgggtgtggtggctcatgcttataatcccagcactttgggaggctgaggcgggcagatcacctgaggtagggagttcaagaccagcctggctaatatggtgaaaccccatctctactaaaaacacaaaaattagccgggcgtggtggcaggggcctgtaatcccagctactcaggaagctgaggcaggagaattgcttgaacccaggaggcggaggttgcaatgagctgagattgcgccattgcactccagcctgggagacaagagcgagacttcatctcaaaaaagaaagaaaggaaggaaggaagaaagaaagaaagaaagaaagaaagaaagaaagaaagaaagaaagaaagaaagaaagaaagaaagattacatgtataaaataaactatgtgaaatctacgaacccaaatatttacattgaattttttgtaccaaatagtccatcctgcttgtgtatcatggtggttttcaatttttcttcctcaatgtctacaaagaaaaactcttaccttctttttttataggaccagaaggaatcaagaagtccataaacaacagcagagatgcgccccacagttgccacagccttcattagggccttctcttccacagggagtatttgcatgtacccagtgtcattagtagcagaatacttgggattgtacctacaggctttttccttttaaaagtaaagggggaagagacttgattaccaccatcctcctcctggacaacatgagttagaaccacaatgctcagtagtttgcaacttaggatttcccaggaaatgaaatgctatttgttgacttgaaactaaacattagctcaagtctcttgaatgagacccttaggcttactagccacaagaaatttttcacagtggagaaatgtgtattatatgtaaaatagtttgtatattctcaatgttactatgtttggatattctctatcttatatgttcttgctaacatatagcaagaacagctgtatgttaaccacataatcatagaactgtgcaaaggctaataatttataatgacagcactgacagtttgcagatatagattctaccatctaaaatgtgagttctgaaaaaactgtgtgttacctctgaaagcgttccacttcccaaaagcagagctggaatgacagcaagataaagagctccacttaccttttcttcatatgaaaaggattcctcagagtccaggcctccattgtcggcaacatactggaagcaaaataatggttctccaaaaatgcagccaacattgccttgaagcctagagcagtccaccaggtctgcacactcagtgaaactagtttctcagttttcctaacatctgtccttacagagccccagctgcactaaaagcataagaagatgcacacttaccatgataaaagaataaaaaagctgtcattcacaaagcaaatagcaaaactttgacaacagctcatctttctgaatactatgaactgcaagttgttctacactccactaaagcaaagaggtcgatcacctcttggctttcctggggagatgggaggtctgaatctgacactgtcttacctgatccttcacaggagtcacgtagcctttctctctccaatccacagatttgcggatgtcatgaagcagaggttcctggagcactttccccttcctgtgcttctggttttgaaagccattcaccacctgcctgaattcttcactggtcttcaaggaaaaggaaataaaatgttgaaaagcaagagattactttaataaagaaccgaggagaggaagcacagagctcggcagtccacagcacactcaccatttctccaaaggcgttcatggccattgtgaagctgtgtttcccttccctgtattcctgattgtgctgctcaatcatcttcatgttctgccacactgctctcctccatccttcttcattctagaggcaaatatgtaattgatgctctttatttctaactaaaacccaacccatgctcaccgagtgaatctgcagacaaaagtgaaaaagaaaccatggccagagaaggcttgacgcctctgggagatgttctccaagtcaagaaacaacaggagcctatgcccacatcgtactcataattggtgccattaggttattgcattaggttattggtaagagctggcctctagtagctactctttggctataatctccaaacaccaaggaccattctcccaggaatccctctggatggtttcaggtgccaccaaccatgccatataatctcttgtgctttgccttccactgatctaaactgtgatcaagtgttagactagctgaggctaatctcaggcaaaagacagcaaggaggagtgaaggattcatgtttcaaaacctaggaagggaaaagaaatgaggatctgattagaccaatcctaaaaagccatcttactgctacctgagaaactttggccaccatagtagaataaaaatatttaaattattttcccatgcatttacctaaggacggtgaaagaggccaaggatctggttggaggaaaacagggcaagtggaggtattggatggactcaccaaaatgaaaagcagcctgtccagagctgtaggagctgaaacagtttatgcgatgataatttaggttatgaaaaatatgaaggtacctcgtgtgtgagaaggttaaggcaacagctaggaaactaactgatctaggttttgtacaaattgtactgaggccatccaggcaaaacctcaccaatggagacttctaatcccaagtagggacaaagggatccccaataattgggaggtcacttcacaccttgtttttggctagtacacagcaggaggtgagctatgttttccagtctccccttcttgcaggaaacctttctggaatgccttcccaggagacagtgggaaggagagcacacactgctcccgcagccctacatgtcgccagtactgccaacacctcatctgcctctccaaaaccagggctcctggctgagctcccaggccaggtcccatgctgcttgcccccaccctctgctcaggctcactgtggccacggggcatgtgcggtggtgcaaggagcaagggacatctccacctgacttgcaggggtcgagcttccctgtcctgcccaaccagccctaggaataccatagctcagcaccccagaaatgcccccactcacagagcggaggtactcgccgggcaccggggtggcccccgtcccgtctgtacaggcacagtcggcaagtgcagggtccaggggtcttcagtcctctgcggccgcctcaaggttgccagtttgacctctaaagtcccccaccaggatgccacccaggcggctctgtccccaccgcctgcccgcactgtgattggctgagccgcctctgggcgtagcctcagggcactgggacgcagcaccatgcagctcagtcccaacctgtcgcaggacccggcgcgcctgcctagaggacccgaggcaggagttgggggcggggaggtggagctgcgccatccaggggctgccgagtggagggtcggaagtctccctctagggtctggatcaacaaagcacccgacttaatgcgctgggagagtgattcatgaaaagaaatttaaagctagccctgtgtgcattatcagcccaaccctgcttttctttagtcctagttctttactaaaatctcctgcagggctgagatttactatagtccagtggttcctgtttagtccacagaaaggtggggccgggtggaagaatgcagggcccgcgagcagaagccttctctcccatttaagggtgtgtgcagctgagctttagtagaatctggtagagaaaggcacccccaaaacacgcatgcaatggtcaagaccagaccctggggagggaggg

SEQ ID NO: 1883522 - DNA, 4001 bp, Homo sapiens
aagtctttctggcaatttatacctgttcttcaccagccaatatttgttatccgagtctgatccttcatagccatagccaaccaccagcatagcatgatccaggccttcagagtcacagcgtggctcaaaataaatttccgagagaataaaatgaaggctgggtgaggagttcccgaggacacctgagagtaacccaccctgtcacccacagggagggaggcaactctaaaatcagtgaaatgacacacagtccagatcgggcttaacaagatctattgttatcaaggctagggaattaggctgtcatccacaactagcagaaatagaaattagcataagtccctcataaaaaaactttcttacaggcataaaagaccactcattttaagcttgtaattctactctagaatatcaatcttaaaaatagcacagaacaccaaaatccttgaatcaaaaggctcttttcagatttaatcacaaaaaaaactttggaaaaattctaagaatacaacaattagagaatatttaagtaaattaaactatacataacatagctatttataaaaagttatgaagtacatgtattcatggacatacgttcaacgtaatatcaaatggaagcattaggtatgattattgcgtgtatagagtccatcatgctggtatgtcatggtggtttactttttttctgcaataatttctatgaagaaagatgcttacctttttttatagaactggaaggagacatggcttgcatcaacagcaacagagatgggccccacagttgccactgccttcgccaggtccttctcccatgaaggtatgtccacaaagccagtgtcattagcaacagaatacttgggattgtacctacaggttttaaccttttaaaggttaagagggaggagacttgattactaccatccttctcctggggaacatgagtcggaaccacaacactcagcagtttgcagcatagaatttccaagtcaacactcttacaaatcatccaaggaagtgaaatgtaattattaatagttaatttgaaacggaaaattagctcagttctcttcagtgagacccctaggtttactttccataagacatttttcacaatggagatgtgtattatatgtagaatggtttgtatattctccatgttacatagaagcaagaacagctgcatgttaaccatgtaatcacagaactgtgcaaaggctataatttataatgacaatactgacagtttgcagatagagattccaccatctaaaatgggaattctgaaaagtgtctgttatctctgaaagtgtcccagtaaaacaaagcaggaatggcagcaagaaaaggagctccatttacctttccttcatatggataggaggcctcagagtccaggtctccgttctcctcaacataccagaaggaagtatccatgaagccaccattgcagccctcattgctttgaggaccagagctaccagattctgctcactcagtgagataagtttgcctgttttctagaacatctgcccttccagcataccagttgtactaaaagcccaacaagagccacaatgaccctgaaaagagaataaaaaagctgatatccacacacacacacacacacacacacacacacacacacacagagcaagacttttaacaacagctcatatatctaaatactcctttaaaaagtgaactgcatgttgcagcacagtctagcatagcacaaatgtcaattgcttcttggctttcctggggtgatgggaggtctgaacctaacacagtctcacctgatccttcacaggactcatgtagcctttctctctccagttcacagatgtggggatctcaagaagcagacgttcctggaactctttccccttcctgtgcttctggtattgaaaaccattcatcacctgcctgaattcttaattagtcttcaaggaaaagtaaataaaatgttaaaaagcaagagattgatttggtaaagaactgaggagaggaagcacagagttcagcagtccacagcacactcaccatgtctccaaaggcgttcatggctgttgtgaagctgtgtttcccttggctgtgttcctgattgtgctgctcaatcatcttcatgttctcccacactgctctcctccatccttcttcattctaaagacaaacatgtaactgatgctctttatttctaattaaaacccagcctatgctaaccaagtgaatcttcagacagagatgtaagagtaaccatggcaggggaaggcttgacacctctgggagatgttctccaagctgagacacaacaagggtgtatgcccatatcgtgctcataatcggtgctattaagttattgcattaggttattggtaagagctggcatctagaagctactttctggccgtatgatcccaatagcaaggtccatctctctggggttcccctggacagtttcagatgccaccaaccatgccatataatctcttgtgctttgccttccacttggtccattgttcatctaaactgtggtcacgtgttacagcagctgaggcaataggcagccaggaagagtgaagggttcatgtttcaaaaatctgggaagggaaaagaaatgaggatctgattagactaatccgaaaaagtcatcttactgccccctgagaaactagggccaccatgatagaataaaaatatttaaattattctcccatgcatttacctaaggactgtggaagaggccaaggatctggttggagaaaaacaaggcaagtggaagtattggatggactcaccaaaatgaaaagcagcctgtccagagctgtaggagctgaaacagttttatgggatgataatttaggctatgaaaaggataggaaggtaccttatgggcgagaagttaaaggcaacaaccaggaaactaggaaaccgttggcccaggttttgtaccaattgtgctgaggtcatccaggcaaaacctcactaatgaagacatctaatttcaagaagggacaaagggatccccaataattgggaagtcacttcacactttgttcttggctaatgcatagcagaaggtgaagtatgttttccaaacaccccttgtaacggaaacagttcttgaatgtcttcccaggagaaactgggaaggagagcacctatctaccgccgctcccgcagtcctgcagtcctgcaggggccagtcctgccaacactccaactcccctcatagagcataaacccaatcaggtggccgaaccgccagaagccagagtccccagtgtccgcgcccacacaggggtaggcagcttcccaggctttgggctggggacccaggccaggtcccctgcctcttgcttccaccccccgctcatgctcactgtggccccaggaggtgggtggtggtgcagggagcaagcggcgcctctgcctgatttgcccgggtcgagcctccctgtcccaccccaccagccctgggaatactgcggcctggcactcctgaaaatccctcactcaccgagctgaaggacttgctgggtccctggtggcccctgtccaatctcagcccactggggtctcagctgcagtagccacaggtggacaggcacagtgggcaggtgccgagtccaggagtctcccgtcgcctaaggccgcccgaaagcagctaattgacttcttaaggctgggcgggaccttccggcgggctgactcctagcctgtggagcggctcagtccacttgcctcagtggaaccggggggaggggagctgggggctacgaagagaagggtcggaggtctccctggagggttcggatcaactaagtaccttatttaatgccctgggccggtggttcatgaaaagaagtttacaggagccctgtgtgcattttcagcctaaccctgcttttcctttaggcctagaattgtttattaaaatctcctgcagggccgagagccagaggactctagcccagtggttcctgtttagtccacag

SEQ ID NO: 1883523 - DNA, 4001 bp, Homo sapiens
caatcgtcccgatctgacgggggcgggatggatgagaaaagctgggaaaggaggaatccggcccagagaacaatgctggcaaaaacgcgtcctggccaacaggtgccaggtttcgtctctgggcagaactgtcccatgctctttgtctgcacgggaggagggggcggcagctggtgtaagtgccacgccaagctttgcccagtccctttgttctgccatagagtaaagattgcctttcttccccaccagccagatgaaatccccaggcccacagcagcttcacaaacagcggggagcctggaggggcaagggtggccagggcgtcatgtcccggcccctgacctgctgggatctgagctgctgccgggggagctttgctctctccagccccagctcctccaagctgctgctgttcttcctcctatggctgaggctccacggtcaccagctccaagagcagcaacccagcgaggggcttaaagctggcagtggggactcagagggtgcctgccctgcccctcccatgcgatggcaggccgtagggttgccgtgagaggctggaggttgtcgcggcctctagtcacggtcctgtcttatagagtccctgctcccctcagagccacgttggagaaatgactggtggacggtgcggggctgcagtggaaagggcctcccttgcagtccttggctccaggctctcgctggaggtcatggggacagcttccagacaatggccgggacgctgggtgcactcaggctgtgccaccgatgctgtggccaccacggggcatccccttgcctgctctgagactcagtttctgtacccataaaatgggcacaataacaccccatccgcttgtcccgtttcatttttcctcacagcatcatcagtacctgatacgaatttcctggttgactcactcactcactgcctgtctctcctgccaatggtggcaattccttgagggcagggactcggttccccagagcatgcctggcacggtgcagtgaacagacgagtggacgcagtgtacacgtgggtgcggcgaaagctgctggatggcagcgtctgcgtggcatggcccggggctgacgggtctcctccaacttgcaggggggcttcgggatcctggaggagatgtgtgtcaactacgtgcactactacccccagacgcagctggagctctgcaagagcgctgtggacgccggcttcctgcagaagtacttccacctcatcaacaggtgagggctccctgcacaagctccctgcccccagggaaccccgacacagaacctcgggcctgttaggcggctgggcagattggaggagtccaggctaagttctaggagcagagacctgtggcggcatcactcacccctcccctcactcgtttcctgctgagtctggatttggcttcagagcctcctcaacccagcctgcagcagccattacccacccgccaaggtgacaggagaggtgaggccgttgccggtgaaggcagcatctggggtggcctggcggaggcagcggggctggggaggaggtggcaggacggttgccccagggacaggactcgagttgcagggaggtgttgctggtgcccactgggctccctgcccgtcagctgctccccagcctggctgttccttgtccccaccaggttcaacaacgaggatgtctgcacctgccctcaggcgtccgtgtctcagcagttcacctctgttccctggaactccttcaaccgcgacgtactgaaggccctgtacagcttcgcgcccatctccatgcactgcaacaagtcctcagccgtccgcttccaggtgcgctgccatgggcccgggtggggcatgcagtcaggcaggcctcatggggggccccagtgaggggtgatgggtctgcactccaaactgctggcaaaagcactcgcacaagacaatgagagcaagtgccaggtggtgacacataggcctagacagccagccagccagcagagagagaggagagaggagagagaggagagagaggagagagaggagagagaggagagagggagagggagagagggagagggagagaggagagagagaggagagagagagagagagagagggagagagagagaaccaataacgaggcaaggaagggagggcaggcaccctctctggtgacacctccacactgtaccgaatgccaaatgcaggtggtgtgagcagggcgcactaacctgcctaaaaataaagcaccaggggaggggaaggtaagaaacgaaccagtctgaagctgcgagctggttttttcctccttatctgagacccactggtattcgaaggcatctaatttatcctgggcccactgggctgtggtcaggaggccagggcctatgcagagttagtcgcgtaaggtgccgcagcctggagatccaggaagatccttcccagaagcatttgggagccagattaactgctaagtcaaacatcctcagcaccaagggaaggaagggctaatactggcttgctgagaatagtgtggggtggacgtctgatggggttgaaaacttggcatttggtgtagccttgaggggaagagatagctaaaaaatatcagagcctgcagccaggggctctggttgctacactagggtgaatgattaaattgggtggggacagaggcggggagaggcctggatgactcccaggttcctgactaggtgaatgggaagccaggggagggggcatttactgaggtgaggacccccaaaaagcaacttgggggagcagagtgagttcagtttgagacaagctgagtttgagggcaagaatccaagaggtggctgggaagtggctggggaagcagccacccatcttgcccctccagcctcagtttacctcctgcccccttccttgcagggtgaatggaacctgcagcccctgcccaaggtcatctccacactggaagagcccaccccacagtgccccaccagccagggccgaagccctgctggccccaccgttgtcagcattggtgggggcaaaggctgaggggggacctactcctccccctcctccatgctgtccctgtgggctcacaccggcactgtgcactctactctgcgacgatccccatggaacagccctgcacgcccaggatgaaggggccagaccacgcccctgcctgagaccacggtccaatccagccttcttcccccagggtcccctgcatggctgagagggtgtgggtgccctgttgacctaccctggaccgagtggaccacgacctcgtccatttaaacccggctgactcagtgcagggacagcctgcacagtggtccagggtccagccctccgccagccctgttccgcctcactgggtgtggcctggcttctgggacaggcaccatgctgggccggggtgtggaatcaccgggaacgcccccgcccccgccccgctgctcccggtgtgcagcgggtgcgggtgccgcttaaacatttccctgctgagtggctcgtgtttcacagtgggcggcttccctgcgacggaggcaggaccaggcatttagctagttagagactcgcctgggaaattgctccattcctgagtaaacagatattttcgcccacctaaagggaagccctgacaacaactatcaccaaaagacgaggcggcaaagatccagcggggcttctgggcgccggttccacgtggggtggaattattagcaccagcttgcttctctgccggtggggccagcgctgaacagaccggggtggagtcagggctgtgctttccgcgtggttctgccacttagggagtgtgccttgggcgggccatttcacattcctgaccctcacttttctcatctgtaaaaccaggctgatgccgtgcgggctaatgagccaataaagctcacacttgggctggcacccactggaggtgggtatgtttgcactccgggccgtcgctccaggagagagaagcttgctcctgagcctcctccctgtgc

SEQ ID NO: 1883524 - DNA, 4001 bp, Homo sapiens
  modified_base (3988)..(4001): a, c, t, g, unknown or other
taactttagttattatagaaagggcagtagcagatgggtctgctccgtctcccttctaagaaggtgggcaggacaaatggcagcctcctgcagaggcccagtgagaagcctggccctcggccacacaggatggaagacagattggattccacagaggggagctgccctgggaagatctcacggatggccaggacccaccatttcttcggggttcccctgttttctccaacgggcactaatgcctgtgcctgggtcctggcaacactctggactccacactcttctgggtttcacctttgtagcaggatccctgcagatcaggcccatgacaaacaccgtctccagcgggcagagcaaaggaagggcgcagcgccaggcagtggtgcagctgcctgtcaggaagaggcctacttctggtgaaactgggcagacaaaaggcagtgagaaatgtgatctcggggtggtggaggctctagggaaaggaaaaggcaggagtgaacttccacacagcagcaatggcagaaccaaaggtggctttgacctccacgagggctcagatccaggccaacagcttgtccaggacagggtgccgggtgtatcactaatccaggagcactatgctggcagaatccctttggtgcctgatggccctgccttcgtgggaacagaggctaaggctttgagttacagctgcctccccaacagtgcatccccttctccttcctcagcctcaggtaggagacagggcaggcaacccccctttcctcttctccccttctccagcccctgtctgtccacccagctggaggcagccaggcttgcctatggactggttgacagccttcatgcacaggttctccaccagagcctttcttgggggcccctggcctgggctctgagctgggagtgaaggggatgacccatgcggactgtttgctgcttgtagctttccctgggaaagactctgccaggccttggagccagaccaggaggctttataggccactgcaagcagcagggctccagatgacatcacagggaatatcaagagggagtggaggggcatcgaagcctctccaggagacaggagacgccggcccagtagagccctaggggcgacgccactcccactcactgtctactctcctctcacctctgcaacactggggacactcacaagattgtgatccaagtcggccgtcgtcttctgcagctctggagacctgatgctggggaagggcatgcctggcatcaccacacacctggggggagacaggagcctggggccggtgggcccacacatcaccagctgctccgttctaccatttcttcagccctcttggctgtgcctgcggctctgcccctcccctctctgcacctaccacccagagagggcttgttgagctcagagatcccacctaggccaatccactgggttctgtggcagcgatggcctgcctgatcttccacctgctctcccagggccaaagccagacctgctgagcccctccctccagccggctggtctgagcagtcacagcccggctttgggctccgatggcagcagatggcaggtaggggtccagctgctggagcgagggccggccacgtatcacagccaaggagatgagcacaagcactacttactggcctaggttgtcagagaagttgatgctctcactcatctttcctccaatctttcccctatgcctggttgtggtattaagttacatgcagacaacaggggccagaagatgaacaatggcccatcccactctaggcatggctcctctccacaggaaaactccactccagtgctcagcttgcaccctggcacaggccagcagttgctggaagtcagacacctgcagatcaagaccacagcatcaagaccctgtgacctctcaaaggcttggtggaaaggacacgggaagtctgggctaagagacagcaaatacacatgaacagaaagaagaggtcaaagaaaaggctgacggcaagttaacaaaaagaaaaatggtgaatgatacccggtgctggcaatctcgtttaaactacatgcaggaacagcaaaggaaatccggcaaatttgcgcagtcattctcaacaccggccatgcagcaaaatcatcagtggaaatttaaaaaaatacacgtggccaggccccagcccaaatcactaataagaatctccagggcttcacctgttagactggcaaaaatccaaaagtaaacactttgtggagaaacaggcactcctagacattggtggtgggatacagaacagtacaattctgatggtaatcagttaacaaattaaacatatttattttatacttttaaacccaggaatcccatatttaggagtctactgagaccaaacagcatatgctcctggtgtttccctataatccgccactactgttggagcaagagggcccagcagtgtccccagctgccagcaggcgggcgtgctgccagtacaccttgagcaagaggaccctgcaatgtccgtagctgccagcaggcggcgtgccaccactatacagtaagcaagaggaccctgcagtgccccggcgccagcagggggcggtggccaccactctaagcaagagagccctgcagttgccctagtcgccagcagggggcgccctggcacagcaccgtgagcaagcgggtcctgtagtgcccggctgcaagcaaggggcggtcgatcccggcttttcggattactgaagttccacccgtctctgcgccgcgccgccgtgacgtgagtttctgcgcgtgcacggcgcccccccccccccccccccccccgcccccagcccggcgccgtgcgactttgctcctgcaacacacgcacccccaacccccgcccgtaggcgtgcgtctctgcgcctgcgccacgcctccacccctggacgcgctagcatgtgtctctgcgcctgcgccggcgcggcgcgcctctctgcgcctgcgccggcgcggcgcgcctctctgcgcctgcgccgggggagttgcgttctcgtcagcacagagccgcagagcaccgcgagggcggagctgcgttgtcctctgcacagatttcggtggtactgcgaaggcggagcagagttctcgtcaggtcagacccgggcgggcgggctgagggtaccgcgagggcggagctgcgttctgctcagtacagacctgggggtcaccgtaaaggtggagcagcattcccctaagcacagacgttggggccactgactggctttgggacaactcggggcgcattaacggtgaataaaatctttcccggttgcagccatgaataatcaaggtgagagaccagttagagcggttcagtgcggaaaacgggaaagcaaaagcccctctgaatgctgcgcaccgagattctcccaaggcaaggggaggggctgcattgcagggtccacttgcagcgtcggaacgcaaatgcagcattcctaatgcacacatgatacccaaaatataacacccacattcctcatgtgcttacggtgagggtgagggtgagggtgggggtgggggtgggggttggggttggggttggggttagggttcgggttcgggttcgggttcgggttcgggttcgggttcgggttgggttagggttagggttagggtagggttagggtttagggtttagggtttagggtttagggtttagggttagaggttaggggttaggggttagggttagggttagggttagggttaggggttaggggttaggggttagggttagggttagggtagggttagggttagggttaagggttaggggttaggggttaggggttaggggttagggtagggttagggtgagggtgagggtgagggtgagggtgagggtgagggtgagggttgggttagggttagggttagggttgggttagggttagggttagggttgggttggggttggggttggggtggggttgggttagggttagggttagggttannnnnnnnnnnnnn

SEQ ID NO: 1883525 - DNA, 4001 bp, Homo sapiens; identical to SEQ ID NO: 588301

SEQ ID NO: 1883526 - DNA, 4001 bp, Homo sapiens
ggacccactgcaggggcccagcaggggcaggcacgagtgtgagagcaacatgaccccagcagctctcgctgtgtgccaggcacatggacacgcaccacacaaaccccaccgtgtgccaggcacacggacaagcaccgcacaaaccccactgtgagccactaggcacatggacaagcactgcacaaaccccactgtgtgccaggcacatggacaagcaccgcagaaaccccacgcctcagtgaccctccacaccttgcgggacgggcagccctcaggtgacagaaccgaggctcagagagggaaagcaacttgtgccaggtcacacagcctcatagcccagctcggcctaacaaagccagagccctcgggggtgcaggtttccccacaagttctgatataatgttggggctctcccggcccagggacacaagctcccagctctctgcatcaaggaaggagaccaggagaagctcccccagcaatgacagctacgaggctgcaaatctctccctccctccaccatttgtgcaatgtcttttgtccccacttctcttcaccagcctcccaccactaacccaggggacccacaaggggctcacagtgttggtgtggaccctctgtgggcctcctgatggcagcagcgcctggggaaagagggctgagctgaggcctggcacaggcagggcccccagcagcccctgcccttacaatgggatgctggctcaggtgcccgaagcccaaaggaggtggcccggaaggttggagcttcaatcgaaggcctgttctctgcccgcagccaggcccagggctgtggcaaaggagggtggtgccccagccaacaccactgtccctgccggccagcagccacggccccggctggaagggagcaaggctctgcctggcttctgtggtctttgggggagggcacgtgggcccagcaggcagcttgcgctgcgctcagggcacagatggttctcattcccgttgcctcccttacacaggaaaaacaaaccagcccggggccaacagacccctttttaacctcgtgtttattttccttcccatgcttgaaaacgctgactgtcctgtgggcggcagctgctgagggtcttgccaggacggcactttcctgacctcagggcagctctcccagggaggggctggggtgcacggaggggccccgaaggaatgcagcccatttcctgctcctggacttctccgagtcatacccggggtcgcagctgcctttcaagggcctggagtctcctgacaccaccggaaggcccaggatgctgtcgggggcaggacagaacccggggaggccggctgtgggcctcgctggctgcggagaaccccccaagccatcgggagctgagggtgggtggaggggaagccacgtcacaccacataggcccacagggctccaagaattcagaggaggaggaggaggcggtaggggctggggtcccgggaccccgggtgggcacagcctactgtgccacctgcatcctccctaagcctgcacagtgcccaggaggaaggaaggggcaggctgcatccccattccgggggagcttgggaggggaatgtggccacccagggtctcagaggtggggggcttaccaaccgtcccacaggccaagcagagcctgtatttgtcatcggtgccccaggtttctctaaagcaggcagacagcatccccacggcctgcgccccatggcccaaggcagaagtttggagaagggggcaaagccacgttggggctgcacagaagaggagggtaggacccccgaggcgtagggcgcccaccaagaaaggcaaggaggcctcagcagcccctccccacgtgggtgaggctgcggggctcaccaggcggcctgtggatgaaaggagcccagaggccagtgtggctgcactgtgacccagggacccccgcgggccctcagaagtccccaggggaccagcagcaaggccaggcccaggccctctcccctgcattccctggggtggggtgggctggggcccacaccccctcccccctcccccctccccggggactgcccgcctcacggcgcccctccccccgcgtccgccccgccccccgcagagggaggcacgcggcggtggccgcccggtccgcgccccctccccgcgcgggcggcggtgacatcacggccacggcggcgggaggggcggcggcgccccgcgcacatcacttcctcggcgcctccccgggggaggacgggcgaacgaggcgcggacggacaggcggacagcagggcggacagcagggaggacagcagggcgggcagggggcggacggccacggcgcggggggcgctcccggctcccgctcccgcgtccccgacccatggcgggcccggccccgcccgcggccgacgagctcccgggcccggccgccaggcgcctctactccaggtaggacgggccggggccggggccggggccggggctgggaccggaccgggccgggtcgggacgcgggggaggctgcagttgggaacaaaggcagctctcgcgggcgcgcagcgtggctgaggacgcgcccctccctccaggccgagcccagcccggcgtgtgcccgcgtgggcgtcccctgaagccctctttcccccaagccaaggggaagggggtggggggccggggggctggaggcggggtgggcagcttctccagcctcactcccctggcacctggcaggggcaccgtggggtgcttccctcccaagcctggccctgccatgcccggggcactcaggggcatcatggccaaagagacctggctgctctggatggggctctgcccctcaccagccctccacgagcccagtgggatccagctgggttggaagggagccagccaggtgggtgtgtacctgcctgaaaaggcatctactctccgggcacattcctgggtgatcccagtgactgggctctgtgccccacgcctttggggatgacagggtggccctgccccaggtggcatgcctgcctggtgactcccaatgtccccccaggggctgccctgggcccagccgggcaggtgcctggagccccaagcaaggctgggtggtaccaggcctcaggcagagccacacgagcgtgaggtccaggcaggggcttgcgaatgggtggcagccgtcagaggcaggcctggctccccagagcgagggacactattgtcctctggacatccctaaaacctggtgacctccctgataggggtcccagcagctgatcccggggggcgcctagcctggcccccaaggattctctggccccagccaagcagcaagcctctgcctggggcacccgaaatgaggtactggtggcggcacggcggacagaggccttgctgcctccggtctgctctctgctttggtcccagacacagccccattgtgccgtcctggatggagcgctgagcccctagcctggctcctgggccccacgcaggggaggggcgtgagggtgattttgctggcagctgctgccaggggcctgccctaaaggattttcaagggtttcctccgctgatctgatcggctgtgcagggccgcatgtgctccagggcggccgtgctgtgagggggatggatagcagccctggctggagtgagtttgagtgtgagtgtgtggagctgtgagagagtgtgtgtgtggagctgtgagagacgggtgtccaagaccttagccttgggtgaggcctgcacagctgaccatagagttgggcattctccaggctacagctagaagcctggggtcccctggggacacgccaggcaggagccagcccctggcaggggcagtgctcagggggaccactcagagagaccccagacccagccttgcatccccctaagcagggagtccagttgagctccagggtggagtcaggcccagacttgggggaagcgcgccaagccctccagcagggcctgtgacgaggtccccccgggagtctgcaccccaccgtgtagc

SEQ ID NO: 1883527 - DNA, 4001 bp, Homo sapiens
cactgtcacagtccatgccacactgagcactacacacacgtgacacccaggacaatgggactgagggcgggaaccgaggactaggcaaacagtggagtctgtgccaccaacacctgaaggcacagttctgcaccctcaaaggtccgagcctacactttagcattagcaggggccaggtaaaggctggtgactaaactctctgcctccgtgttggcacaggcaaggctgggggaggcaaaagagacagaactggaataggaagaagtagagccacccacagcctgggccccacaggtgtggaggtggaagagtgagagcccccagatctgaggagccagcagcggtgcagggcccctcaccccaccttacccatctctgtgtcacacagagatgtccatccctcctccctcccctcccccttcctcactcctcctcaccccatctctgtgcctcatcctttcattactcaccccttctttcctcatccctcaccctgccttcctgcccctccccagcccttctttccttatcccccaccctgccttccctcccctccccagccctcctttcctctgccctccttactcccaccctatggctcatctgccccatgcccctcccctcctcatccccctcaccccatctcaccatcctctcaccaccccctctccctacctccccccctcaaccccatttcctcaaattcctcatgctcatttccccacattcatcacccatctctgctcccctcctggcccccaaccccacttcctttccatcctcctttcaccccaagtctctttcttccttcacacctcatgcccctttacccttgggagccccatagtgactcctggcatgaaggtaggtagtgaagaatctacagacatgactccaggaccctggcaccccccccccgccttgctctgctcttggcccaggtactcaagctgcagtttctagcaagacctcatgggtgtccaaactctgtctctggaaaataggaaagaaagaagtaaaggggagcttccggcctgacccttctatcatcatcaaccccccagcactcccctcccccacttcacccccaaattactccctccccacccccgctccctcgagcacagatgggcctgggagacagtgacgtgggcgccaggcaccgtgtctgctggagtggcggcttccgctggcgaccgcctccgcagccccgcctgctccctgcatcggggacactggggctgagatctaatgacttaatggggggtgggggagactagagattctgagggtgttaaggaaggggatcttggggagtgagatgaaagatgaaaggggagagctaggataggagatcggggtgtaaagaaagaaccaagaataagacaaaagggatcactgcgggaaggaagacaggagatcatctagggccaagaaggaaagggctaaaacacaggcactccagggggaagcaggatgagagactgattagaagagggactgaaatggagaccgcggggtcgctgaagaggggcgcgaggatgaggggctgtacagagggtgggcgggggagattcctggaggcaccggcctgggcagagccatccgtttccctcgggggagaggtccggggggctctgaaacccggcatccgtggggtctgttagagattccgttaggtcacatcaggccaccgcggggtcaggataaggtaaagctaaatgaggtcagcttgaggtggttacaccgttggctgaaaggcgagtaagaagtgctgaccttttggccccggtccagggactacacctcccagagtgcactgttctctccctcttgccccccaatgaagaaaggaaagaatgcacggccgcacggccaactggtgggtacagttttcctttaaggctgcctttgacgtcgcaagggttccagaaggttctcctgggattcgagcagtggccagtacgtcccaccttctcaacccggagattggactaatatagtttgcccccgggctcgggtctgagtctcaggcacgaaccaataaaatcaaagggcgagcgaggttgccgccctctgtctttttcaccaatggcacgacaagatggcaaagaggcgtggttgagtgatcccagagggcgccaatcagatccacaccaatcactgcctggaatgtgtgcgcgtgtggccgggtgacaggggcggaggatgggcggctatcaccaagccgcttgttgaaaactgcccaatcacagtggaggctgagctgagtgacaggaagacggttcaatgggcggcgcggaggcggagccgtgggggcgggctcccggtcccgctatcggcggccggcgggcaggcgactcctgtcccgggtggaggcggcggagccggagccgggggagggggcagcggctgtctcacggaccacggcggcgcccgcagctcctcaccggtgagggcgccaagccaggactcgggggtcccgggagcggggcgtcgtgaagccagggctcctggtgttggggggttgggacactgagggcccgtaggctctgctgccttggggatgcggggccccggggtctgcagggtgctcggagtcctagaccagggcttggctgtcacagggggcagccagcgtctgagtcggggaggggaggggaggggagggtcgagtcggaccggaccagattgggttctgtggggcggaggcatctgtgagcagaccagccagccagcgcgggtgacatcaccgaccaccctcccccgcccgagccccctcccctcctctcctcgccgcgccttttgtcccggccgagctccgctctgccccgcccatctgcgagggaggagactcccgtcagtgacttcattgagtaggttcttggggattggggtcgggtcctccccagtgagaggcgacaggagctcactgcctctcgggccctcacaatcacacctgtcacaggtatacacgctgccactcacaaacacacgcttgcactcccagcctcactgacacgctgccatacagccgctcacagccagccagacactgctgcacctgagagcaggtggccgcgggtcttctcccttcactctccacatttggggatcaggtccggcacctgctgcgccagacaggccttgctgggcacgcgcctctgagagtccaaggaggtggcttccagagctgcagcacttcaggccggctccggtggagcgatcagaggtgaggggcttggctgggcatgtttaagcgcacagtgctctcctgcccacccccagcagcacccccactgcaggcccgaggagctttccggagcttcccacactcctggggagaagacttcttagccagcttgatgtttaaaattcagctggagcccttaaaacttcgagcgtggacgctgaatgggtttgtaaagtttcggtaagtccctccggagaagggcactcacacccatacccagtcaaaccctccacgcggccatcccctccattgccttcctgcttcctccaactcatcctcatcccctctgtgacatacaggaacccccctccggcctcacccacatatttgaatgaattgcaccccttatcattccttttctcaaacccttcaggtatccattttccacagacatttcctccattatttcaactctccacattcctccctttcaacccatcattaacccattttccacctcagccatttccatctgtcactcatccccctccatcagtacctcattttctgtatcagccatctcccctccctgtacctcaacagtccccctcgccattttctccccatttttccttcctgcctctaccttaacatcctcctcattcttctccatcaaaggcagtgccatgccatggggctcctttgtcattccaacacgtggcctgtgggtaggggggaagggaaggagggaggaaagcagaaagagaaaaaggaggcagatcctgaaagagcttgccctgtgtctgcg

SEQ ID NO: 1883528 - DNA, 4001 bp, Homo sapiens; identical to SEQ ID NO: 588315

SEQ ID NO: 1883529 - DNA, 4001 bp, Homo sapiens; identical to SEQ ID NO: 588317

SEQ ID NO: 1883530 - DNA, 4001 bp, Homo sapiens; identical to SEQ ID NO: 588322

SEQ ID NO: 1883531 - DNA, 4001 bp, Homo sapiens
cttaaggcttatttaagctttcagaatttactttatgttttttgagatggagtttcgctcttgttgcccaggctgcagtgcaatggcgcgatctcggctcaccgcaacctctgcctcccgggttcaagcaattctccggcttcagcctcccgagtaactgggagtacaggcatgcgccaccacgccggctaatttttgtatatttagtagagacggggtttctccattttggtcaggatggtctcgaactcctgacctcaggtgatccgcccgcctcggcctcccaaagtgctgagatttacaggcgtcagccaccgcgcccggtctttaatcaatctttctggtctcacagcctacctactggtcattctgaccttttgctcttatttacttccaaagcacctttagcctccctagatgttccttcttgacgacataggaatctatctcgggccgatttaaatcaaatccacagcctcattttcagtccaaatttcactgcaatatgctgaacacactttactttcaacgtaaaatttctttcttactattaatgagctatcctgatagtgacaggtgaaacacaattgactaaggggttaaaatgtccatttttcaaatgccacggccactctgaatcaaatctgagattggagtggagaaaccaaatgtgtaaaacaaaggtcacaaaacagaggcagagcacagtatttcagtgggggaaaaaaaataagctaaatttagtcacataagtcccagctcttcttgggatatatatatgatttttatgagaactaatcctatccggaaacatttccttcacctttcccttagcccttttccttcggtcatgcagtctcttaccgtgctaattatcatattaatataatcctcacttgcgatccttcctgactttattccccatcctcagattctcttgaaagcataatgccttcctaagtatacacacaatccatttaaaagtctttgtatgcgacagcctaactattcaaacacgaagtcatttctctaacggtcctagaaaaaattttttaaaagaaaaagaaaaccacaaagtcaagagcttctgaggggacctgaaaagtcatcaaattgaacgctctcgttttatagttggagaaacttattcactgagctaaaagggccctactaatggagcccctaattcaactgtgtaatctgatataatcttaaattcagcctcaataagagctttctggaatcgccagcgagtccgtgggggagccacggctagaacccaggcctcctgattcccagccacagcttttccaccgaaccggcagctcttcccaaaagttgaaggcaactgtccgctcaccgtccaagactactcgttttacatgaggaaagggtcacagctcccgaaattttggattccacggcggcagctgctgcttctgacagcagaggcgggaggtggcccaggactactcggtcctcaaagactggactctctctcggcgcgcccggacctccgcgcttcactgactggcttccctagaagactgggggccttgcggggagataaaaagggcagacacgccacccccaccgaggccctggacgcccagccgccctagaatcacgaccttagcccttggaaagccagggagatgcggaccccctagacccgcagcccggccgcgtggggcggcgcgcagctgagggaccaggagctgcgccccaccacaagtgaggggcggaccggagacgccgaggtcggcgagggggcacgcgctagttccacagctcggctggcgagacggagggtaggcaggggtcccaggccgcgggtgactcggggtccgtcacatacatactcactgccgtagctgcaaacagaaagcaccaaacagggaccaaaacgcgtagagggacggggaggggcgaggacaaatgaggtaaggaggccgcgtccgcgcagacccgggaggagagaaggcacttccgggacaacacagccctaggcgtcgccttctgtgtccgcccacctgtcgcgcctggtatgcgcatgcgtactaagtgcgaacctttctctgccccgcccataatctttagatttgccttccatgctttgccccttccccttcccatcttctcttgaagttacctagattgcgtctattatttgaatgactcgtacaaaagagatgctatttatcgggcaaaagccgggagttcgtgccctctacgcccgcaaggaaaactacaactcccatgaggacacgggtgagattgaggccgggctccgcctccttctccctggagcttggtggacgccttcccagtgccacgtggcggggagctgatctgatcgcgggcgtgacgacggcccgcacggctagctgcttggcccgcgggcctgggcagccctggagcgggaaacgcctccgtgagaacgcatggcttcaagcttctcccttgcgctcctgatcttaggctgatcgcttttacctttaggttgaagttgaacacagttcacactgtgctcttcctccccctctttctggaattccaggcaacagatttaacactttatgaatcttgaagagctgcactcctcctaaatattgcagttaatgctgatcctttggaagcctccgaaggccacaaggctgtgatgggagcctctggcttcagttgcctttctcacaccttattttaatactcaaggtaaacccttctgtacaactttagaaataactgtcaacctaaaggaaaaacggaggcaaagttaatataaatagagaatttatttgggccaagtctcaagaatgcaaactgggagcatcacttcaagttacccttaatttaatacatgatcttagcagcagtttcaagtgagttctttgttttgttggccaggaagcttgaactcttgtctcaaaggaattgatccttccatctctgcctcccaaagtactgggattacaggtgtgggcgactgcacccggctacaagtgaatttttaaaggaaaaaaaaagaagaggcccttgctaaattgtattccaagaatttacattaaaataacaacctatccattggctatacttgttctttctatcacggattctgggaacacgaagataaagggtgatgcttgtacagggcagaaaagaacaaagtgcctttaaacaattgctagtgtacatggggatggtgctaactgacatctcatactcaggtctctctgggtctgataaattttgaatgcctggccgggctggtggggttgctcacactcgtaatctcagcattttgggagcctaagggggaaggatctcttaaggccaagaattcgaaaccagcctcggtaatataccaacaggctatctcttaaaaaattttaaaaattagccaggcacggtgatgcatcatgcaaccgtgctccatcctgggtgacagactgagatcctgtctcaaaaaataagataaagaataaatctcctttttataaaatctttttataaaaattaaataaaaattaaaatttttaaataattcaaattttaaatattagctaggtgtgatggggcacgcctgtagctctagttactcaggaggctggggcgggaggattgcttgagcctggaagttcaaggtcactgtgagctgtgattacaccactgcactccagcctggataagagaccccataactttaattaaaaaaaaatgggggactgggcacggtggctcatggctgtaatcccagcactttgggagggtgaggtgggaggatcacttgagtccaggagttcaagaccagcctgggcaacatagtgagaccccatctctatttcttaaattagtaaatacaaatacaaataaattgttttgttctgtgagttaccaggaatgtaaaaaagattaaaataaaataaattgttgcatacttttaatatagcgtagactgctctatttttctcctgtcataatgaaacactttgccagttcat

SEQ ID NO: 1883532 - DNA, 4001 bp, Homo sapiens
aggccggacagggctgggatgctcggcacaggaggctgcctcacccttccttcctcttcttggggagccccatgtcccccaccccagcttgtcctatgtcccaacctggagcagcccctgtcatcagacctatccggccaggggacagctcggggcaggaatagctaagtagccgagtgcacgagttgctaaggcttggcccgctgggggccttcccggtgaactgactgctgtgcttacaggcaaggggcgagggcagagtctgcgtcctccccaggctgtcctcctggcactggactcctgggtgacagcctggggggctgggcaccgcctgctgccaacttgttcttcactgcaaccccctcctgataagctctgccctgcccccagcccctccccaggccaagactagaccctccccaagggaaggaggcctgggctcaggcccagagtgccagctttgccctatcccatagcctggagccaccacaggaggggcactccactctcttgggctcctggagcctcagaggcaggtacaggaggtgggctgcggccttgccctaatgtcgggggcccagcggggacaggaggggcggggggttggcaggggacagacatgggttcttggacgccagagggtactgggggtccagggggttggggctgcccccgggttctggtatgggtggagcacactctgtgcccaaggcccaggggctcagcaaggggcaggcgggcccctccctcaccctccggtccttggaggtgcccccttccctgccctggccgctctggtggtgtgtgtttgggatcatggcacagaccttcagcagggaatcattttgggagtcagcagtgcctcctgcccaggctccagccccacagaagccaggccgggccccacgcctggcctcctcccctcacctcaggggcccagcacagagggggagacctggtgggagagtgtggccaccccaaggcctgcgcctgtcctcatctgggcactggaaggtctggagcccagggcttcaccctgcctggggtggtgtcagaggtggaggcccggcaggggcaggaagctggagctctggtcccagctttgtgccccacacaggcctcagtttccccattgtctctcttgtcagcagggccatgttgtccagtggccttccagccacctgggaatgttctgaggttagttataaggggaagggctgccttaccttcccagagcgtgctggctgggcagagaggcgtggaggggcctggcagagccccccgggccctcccgggcctcccggacccctcaccagggtgcttttggcctctgaagccccaggagagggcagactaagcccctggcagaggccagcctgggcatctcaggtggcgcgagacagaggggcaccaggcgcggccgcgggagccgggctgcaggaggtgcaggaggagggagtgaagcagagtgcgggagggatggggcttcctgtttaccccgagcgccccccggcctcggacgggctggctctgtcagccacggatgtggtggaaccttcccatcagaggacgtcccggacccgacgggggctggagggagctgccaggcaggggtgcctgcgggcagaggagccgtctgctcccgagcgagggtttgggcagggagaagtgagggtccccagcctttcctctcacctctccctgcctgctccggcccctgacccacgtcccagagcgacaccctctgagttgaggggcttccattttcagaggaggcagctggctcacaggtggaagccgcttgttcaagggtggaaaacggaggcccaggactggagtccgggcgcctgagcctcgggggtcgcccgggggacccctcgcccttcccctggccgctcccgtctcccttcctggggctgcccactgctccagctgatggcgtggaggagtccatggccttgtgggctggcttcttggcaggtccccaccggctttgcatctgagtgtccccttctcctgacattgcccctaccctggtccggtccaccccgcttcctgcctggataacagtcgcccctcctcggccttgctgggcgccgctgcccttcacacccagtgctcagggagtttcgcggagggacacatcgggttgtgtgacctcctcctaaggcgccaccacactcagcacaaagtccagtcctgccggtgctccatgcccctgcccgggtgcgcgctccacagggcagggacccggacctggaagaggtgacttggagcaggtgcgcagaaagtgcggagtcccccactgcgccgggcgtgtcacccgttggtggcctggcaaacttgaactgcagcgagacgtgggcttagagatgggaaagtgaacctgagaggggccggcagcccgggcaggagacacagccccttggccacaccccaggggaccggcatgccccactgctggcagcaggtgatgggagcatccctgggagaacagactccccccagttctgcacacactgctggtgccttggagctcttaccagcctgggggcttagctttgaacatcttcgtgttatcttttggcagacgtgaagataaatgcagttcccttaggctgtccctggggggtccccagtcccaggaggggcaggaagccagggaatgccctgcagttctcaggtcccctgccagcagtgcaggagcatttggccgccccacacccttgtcagcacttgctgttgtctgtctttttcattttagccattctgatgattttgcagtggtattgctgtattgttatttttgttcatgtaggaaggtgaagaaaatcttattttttaaacggcagaatccgtccctagggagagacttgcttcacaggggagacacctggctggggtgagagcgcagtgtgggctcagggggctgtgtgctgcaggctccgtggatgtccccagcagcacccagggagtctggaggggaggagagagaagaggcctccactgtggagtgagcctgggagaggggtccccagatggacactgggtgctgcctggcagctcacgaggtgggcactggtggtctgacttgagaaagccttgtggagcagcgtgagccccagatggagcccctagtgtgtggggcacccctcccctggggatgcctgtgcttctggggtctgtgggcttctgggaagggtgtggggggtccctccctggaggcttcatccctgtctctcttgcggggttgtcatagagctccagtagagtcagggaccatgggtgccctgaaggcttctctgcctcagtttcccctcgtgtcagaccagggcatggagggtcttcggagccctggggagggtcccggggtctccagttcccagtcatggggcagacagtttgtgcctgggtccttcccaggagggaggaaggaggggtccgtagcttccagcagattcttgaaggagggtcatgtgaccctcgagtgagttcagagtccccacccaatgcagctgccagggcctcgcgtgtcccttcggggtcctcagcgccacgaacggggctggtcccagtgtccagcttctgggatcccgctcctgcaggccctggagactgcttcccacccctgctgaggttcccatggggctgaggaagggggacttgccggccccctgaggctgccctcacgcctggcgccagtacatggcacagaagtcccactcggtgggctgtgatttgcccaggcccgacagatggggcagccgttaacgtcaagaggaaaaagcacttcatctcccgcgacggaaggagaagttcccgagagctcagggcctgtggggcagccagttgaggtggcggcagttcagcagcccggcccccagctggagccgccctgtcctctccccacctgcccgcctggggagatctgggggccgccctgtcctctccccgcctgcccgtgtggggagagctggggaccaggcgctccaagcttttag

SEQ ID NO: 1883533 - DNA, 4001 bp, Homo sapiens; identical to SEQ ID NO: 588328

SEQ ID NO: 1883534 - DNA, 4001 bp, Homo sapiens
ctccacagcattctcgccagaattaaatcataaaataaaaatcttaggtacttgaatgtaaaccaagtctttgaatctaactttcaggctataggaactaaggcaaatgacttaaacaacacaagaaagttatgagctaagtccagaatctggaatccagattcttttagccaacagcgtggcaaatgggaagaagcaggggacagagagaatgttctgggtgaaagaaacacaaaagacttaagagacattgcagcagattgatttaatgagtggaaccagtttggatccaattagaaagagagaaaaaaagtaaaaggcattttgtcaacagacctttgaccatggactaggcactaaataataacaggaaattgttatttttgttacatgtgaaaagcattgctgttatgtgagacaatggtccatttttgatcttaatagaaacacactgtgctattcagtagtaaaatggggtttgttttaaaacagtaagtagttcaaaaccaagaaagaagggtgggagagaacgctggtgacagaggagccgagtcgagggttccaaaggctaactgcgccctcacttgtcactatggaaagttcttttgaaacaagtgagaggctctgcagaggggccgagtgtggcagaacatgcagcgagtgacatgaacactcagaggtgggaaaagccgtcacatagggagcccgctgggcacacgtgccacagatgagaggcgctgacgcagacgtcgcctagctgggatgagacaaaagcaacgccagtgtcggagtctgagtaaaggcatgtgcaccggaaacgtggagatacagagagaaaagtcacagggaagcacgtgtcacacggggatctgactccactggatcctgtttaacacctacggagaaggagaagaggaggcgaaccagtggttctcaaagtgtggtccctggaccagaagcatcaggagaaacggggaacactttagaaaagcaaaatcccagccaggccagacctgctgaatcagaaaccccggccacgccaacaggcaccagggtgagggccatgggcgaaactgactggcctgttccagggctctgcccgctcctcccgggtgttgcccatgctccccgacacagcggtcgggcctgacctttggaacaaggctcccattcctgccttcctcacagcaggccagtgagtctggaggcgccacctggcccctctcacgggcctcacctgtatcacctgggcgacggccgatgctgcacaggctgccgtggacctggaggagcgccctacgcaaaaggcttggaataatgcccagcattgctacacggatggttgtcctgttcacagctcacttacttccacaatgtgcagctaagacgcaataatcgagctgaagatggatccgctggccaataagaccaggaaactcgtggaagcaacagcctgacacacccctcaggaagcagacgacactaatggccacgtgctgacttcggccacagcaaatgcaagcccggggcagccagacacctgagcagtgtgactgcatgtggtgcctctcggcctggtgccaacaagcctcctgctcagaccctcaccatggccagccatggtcacgaggctctgagggctgaaagaaatcgtgttaaaaagaactggagaaattctcagaaaacattaattccgtctgtgctctgcctgatcccccctcctgtcccagaggcagcagagacgggacgtgctgaaccctctgagtctgtgatccccggtgaaaggagggaggtggccgaggcccggcccttgcggggcctgccctgcaggaaaccacagttctgggcagttctggactcaccttggtgtgactatcctgcctcaatctactcactttgtttatagcaaggtaggaaaaaccttgacaaaaccatgatcataaaaaagaaatacaacaggccattttcattcaaagactttgtctacacagtcctcctttttaacaagctctagacctgtgtttcatcatctgccgtgatttcactgttgggatctgctcgattggttctgcgcagaatccactcaggctcccgccctggtcacgcagcacaactcactcgaggggctgtcggggcccctgctgggctgggctttctcactcactcctcgtggctgctttaaatgaaaacaaacgtgcttacttcatggtccacgctctctgtagccatgcactggttgttggccagtgtggtgatctctcgactcttcggtgtttccatccggcagctgcagagaggcacttcctggaggccgtctgtctccagcacatctggaccgttggccaaccctaacgtcacacagacacatgtcagctcatgcaatcctgacctcaaaagaacatctagaaagtgatcgattatagtctcaacagtgatctcacacgccaggaaatgaaagcaatgcggttgattacccagcacaaacagccctgcgtggggcggggatggccaccacctgggcaacatgaaggggtggcctgtgcctccccagctaacaaaccccctgacagggtctcaagaggcacctattaacctgtgttctcaggttctcaggacccaggacacaagttccaaagccagaggctggtacctctggcagtagctcctaaatcttttgctttcaaacaaaagagcattcactgccctttaagaccttgttttcctacttggttttagaatggcagccacaaaaaaaaaaaaatcagtttggaaggttttaataacggttcatctattatctagaatctcactcacctactacaatagtccaaagagcccatttattaggctgaaagaggaaagcaccagaaaaacaaggaaagataaactagaggagaattagagctcaatatgcagctgacaatgacagcatagtccatagggaaggctgcagcagggccatggtcaggcaggcggccttgggcccgtcccagcacagccagggctggtgcccccatgccctgccccagccccggatgggagagacgggcaaggccaaggctgttgagcagcaggggcgggggtggagggcaccgccaggaagacccttaagcttggcaagtggctacagtgggtgccgctcccaaaggaagccagatcgcatttcacgttttcttttttgttaaacagtcaaagcagaaatagaagatgaatcattgtctcaaatactcactattacctctcttaattaaaaataattaactcttggctgggcgcggtggctcacgcctgtaatcccagcactttgggaggccaaggcgggcagatcacgaggtcaggagatcgagaccctcctggacaacatggtgaaaccccgtctctactaaaaaaaaaaatacaaaaattagctgggcatggggcacatgcctgtaatcccagctactcaggaggctgaggcaggagaatcacttgaaccagggagtcggaggttgtagtgagctgagattgtgccactgcactccagtctggcaacagagtgagactccgtctcaaaaaaaaacattaactcttgttttcacatctaaaaatatagtgttaaagtaaattaaaatggagaccaagactaaagaatccttgaacagacaaagccagttgagccaaggaggccatcttgaccttgcttgatttgaaaacaaaggatatcttgggctacttttggcaaatgcctatagtaaagaaaaataaaacttaagctctaccattcagaagcagccaaccaatctctagaactagggactttccagcagggacagaacaaacgaggaaactgcgtcatgaaccagtggggtgttttcctggctttactcccacgttcaccctaaaaatccttcccctcgtgtttcctcagtgcagctcccaacgtgcttctggtttggagctgcctcgttcatgaatcgctgctcaaggaaaccctttaaaagctgcactgtgccttagtgcat

SEQ ID NO: 1883535 - DNA, 4001 bp, Homo sapiens; identical to SEQ ID NO: 588345

SEQ ID NO: 1883536 - DNA, 4001 bp, Homo sapiens; identical to SEQ ID NO: 588346

SEQ ID NO: 1883537 - DNA, 4001 bp, Homo sapiens
tttatagcactaaatgcccacaagagacctctgcctgagaacgtgggtttcagcctaagagttgtaatatgtgtgcccattcacaggtgctgcatcagagtcccaggtgggaagaaggcaagcatacacaaaaatggtaaaaggcagaaaggagcccagtctcgttctttttaagaagttttcctaagaatctccacccagcgacttgctctcacatcttcttggccagcactggaccacacaactccttctagatacagaggagtcctaggattctatgagaaagaaggggagggtgggcaaagggcagccagctgtgcagcatctgctggagacacctaacccttggtggaggggttgtggtgctgggagaaggctttctggacggtgtgacagcagagataaacttaaaggccaagtaggagttaccctggtgaagcagggcagggttacaagcattccagcaacatgaagcagcaggagtgttttaattaaaagaaggcagttgctgtaaccaactataaacaaataaaggcttaaacacaatggaagtttatttctcactaagggaacatccaaatccatgatactttaagtcagggacccaggttcctcccatctatggttctgccatcactaatctgggtcttccacaattgccgtgctccttggaggtgggaagagcaggcggaggacacgtgggaggttttagagacaagcctggaggcagcatgcgtcactcccatgcagagtccattggccaatgctggctccgatggccacatctcactgcaggggcagctgggaaatacagtctggctgtctacccaggaggaagagcagccagtttctgctgctgatgatcaggaggtggagaaaatgttcagtcaggcagggagtgggaatagacaagaccacaagcagcttggtgcctctgaaagggagaggggtggaggggagactagagaggtgggtaggaatactggattccactgaccacgtgctggatgtcacgcttagccctcctgctctgtgccgggttaggcacctggtgttttacgtacataatctcaattctgtgagggcatccgacctgtgggaaaagagctgtttgtttcaaatgccagtcctgcttcctaacaagtgtttagagcttaatcgtgttcaaaatacatatacaatgtttaatacttacaagaatttggtggggaaaatattaccatctttcccttttgtgattggagaaaaatgaggctttgaagggtttaagaacttgcccaaggtcggccaggtgcagtggctcatgtctataatcccaacactttgggaggctgaggtgggaggatcgcttgaggccaggagttcaagaccagcctgagcaacatagtgagactttgtctctataaaaaataaataaataaataaaaagaacttgtccaaggtcagacaggcagcctcttagtaagcacacatatcctctatattatactacctctcatggaggatctcctgtgttctacaaatagtctggacttgagccagaatgtgttataatcctgggatcacggccagtgggcttagaagaagccatctctttctcatgccaagatgaggctcccccagatttgctcagacttacctatagtcagcagcatcgggggtcaggaaagacttcacgaagccataaatgcatccttctcggggcagcacctggctctcccaggtgaaagaggactccattttcacaggcaggcgtgggagcttcagcacccatctctgggcccagaatgacccactggagaccttacagctctcctgtcacccccaattcctgccccctctgcagccttggaggagaatggagctgaagggcctgccctctgtagggtgagaaagggaggctaaagcctggtgcccactgccctggctgctccgcattgcaggagctgcgcccttcctttcctggcacagggtccacagccccgaaaccccgttgtgtgggagctgggcacagggcagcaggactaatccttggaacagctcagggaggattatcccagccactgtcagcagcggtgcagctggctcattcccatatagggggaggccagagccaggggcctgccacaagttggaaggctggggaaggggaggccagcagaggtgtcctggctgtgggtggctctgagggggctctcaggggtggggctaaatctcaggggcaggattatgtaaatcaaaccaattctagccacagatttaaagtttggaaaaaaaaaaaaacccagcctggcggaaagaatttaaattataaaaacttagaagtatggaatgtgaaatcatcctgtaggtgcttatttaacaacgaaatcatcccgacacaatgagccatatgtgaaaagtcatccttccccaacacatcccccaacaggcactcctcaagcctctcccacccaagtgctggcatcctccctgtcctgcttcacctgagacaccccttgtctcattagacatgcaactacgggaggggtgacaggaagacaagacactatttcctcaggcccagtttggtgtggggagaaagcctcctgatcctgaaagcaagaatttgaccagagcagaagtaatcagtatgcagattgattctgtggtatgttaatgtttatgcatagattatgaggaccaggtgaaaagtgggccaggggagccagatgtgtgtgtgagtcatgggtggctgagatgaggacaggagggaaactggttcggaggctgctggcgatggggtgggggtgccaggaggaagggaggcagttgtttgaatgtctgcatgaaaaagcggacgacagcggggtctgggtgaattcgggcaaccatttggaccgtggagaaaactgcctgcgtgcggctgaggacctgcactattaatttgttttttagctaaggcaaagataaatataaaaactgatactccacccagttaccagaaaacatttaggtatgtgtgagacaacttgggtatgtgaacctaccttttcaatgtaaattcagtgaaatctaagtgcagatcccatatttccaataaaaaggtaacatccaaactcagatgtcctatgagtataaaatacacaaagatcttctggacttagtatgaaaagggattttttttttgtcaggtacctcactagttatttttaaaataggattgcatgttgaaatgataatcttttggatatattgggttaaataaatttattattaaagttaatttcacttaaaaatgtttaatgtagctactagaaattttaaaattaagcatgttgctcaccttatgtttctattggacggctctctctagatacaaaggctgccaagagggacctcactctagcttcagggagaagagaggaattagcaaggccaagcagaggctcctgagggcagggccaagggcggcttggtggggtggggatgggatgcacagagataactccaacccttaagaaggtgtttcctagagcaggctgtgacctgtcagtttatatactgaggcttaggagcctcttggatgcccccagatctgcacccctgaattgccctgtgcccctgccgtctttgttcctgtgctggcatagtggtctcacctccggcagtatcaccaccactgggcacaagcttctccagcacagcaactgtgtcttatttctccttgtactcccagtgttcacaccatgctgcactcacagaagactcttcgttgatattttgtggacagagagaatgcctgtgagagtgggctgaagtgtgcgttgggctccagagaccttaaggaggggagaccaggtcctgagtaaagttgaaggggaggggctgagtcctgctagccaggagtctcatcccctggggaagttccagggacccctcagaagtgcaaggggacggtgttagtgttagtccagtaacacagcccagagcctgccttccacgtgggtttgacaggagcc

SEQ ID NO: 1883538 - DNA, 4001 bp, Homo sapiens; identical to SEQ ID NO: 1883537

SEQ ID NO: 1883539 - DNA, 4001 bp, Homo sapiens; identical to SEQ ID NO: 1883537

SEQ ID NO: 1883540 - DNA, 4001 bp, Homo sapiens
acttttatgaattcaatttttagacctaaatttaaatccaaaagctgtaaaacttctgtaaaataacaaaagggatatttaggtaactttgggtttggcaattactttgtagatacaacagtaaagtacataaaagacaaatttctaccatgaaagaagatattggtatgaagtcgttacaattaaaaacttttgctctgggaaaggaaataagagaatggagaaacaagccacagacggagaaaatatttgcaaaacacctgtctggcatccagaccattaaaaaccacttacaactcaacaataagaaatcgaacaacccaattagtaaatggacgaaagatctaaagaggctcccatcagagatggcatatagaaggggaaaagcttatgaaaagatgtttgccctcccaacgcttttccctccctgcgtccctctccctcacacaccctccgctgcagcggagtgggagcgggtcaggggcgctaggcggtgacggtgacggtgacgtgctgtctctcgggcgaggcgtgggatttaagcgcattataagccgtgggtcccggggaatccgagaggctgagcttggagcccagactgacccgcctctctcatggtcccggcccactgccctgcagagcccgccttactcttcctctccacaggtctgctgtggctccaccaagcctggtaggcccacaaggagctgcatccagcaggagccgccgcccgggaacaagctacccgcgggctctggggacaaccgcccgtctgatgagctcggctgagcgtgcacgcaatgtcgaaatcaaggacgcctggatgcttttcatggcagagtgacaaaagtttaccaacaagaagaggagcagggctgctgaaaggtgcggtgccgcggcgccagaatgcgggatcctgagccctgcatgcgagtcttcgcggggccgatcgctgcgagcctcgcttaggtccagccgcctccagggagggcaatatccacgagacgcggggagtgagggcggtgctggccgcacccctggtcctggggccgcgggagccgtgctagcaggccgccttccactgccgcctgcgccgggtcgggttgctgcagcggtgcccgctgcaggagctccgcgcctgctgcttctccgacgtcagggcgccgccaggatgacaggtgcaggaggctgcggctgtgggcagatgtggtttccagccccaggtcccggcggcccctggcttcccagcccgctgtcctgtgggcaagaagatgaagaaagtcaccccatcagcaggtcagctgccccgcctggcagcccagccagacaaggcaaccgaagttcatcctgtctgagttgactttgtgcaggcagcgggccggcgcccaggatgctggggagccctgcgcgccggaggccgacaagccgtggggcccagaggcgccacagggcgagaaggcacccgcctcccagcgctttcaccccccggcccgcccgacccgctaggtgtagcagtggctgcggccaagccaggcattctgcccggcggcggctgcacaggggcgaaaactgagaacccctgctcaaccccatccggagtgactgccaagtgcccatgccagcgaccccgatccccctccggtggaggaatgggcgggaggcacggcctgggggccctcaggctgggcgcgctggcgatcccgaggccgaccaggccatgcacctccagcccgcctgggcacccaagctgcatccgccttctgtgtgcaggcagcagcctccaggcaacccccgagcccgccagcactccccacatctcagaaccggggccagatgtccctgtggctgcggctgagctaggtggtctgccctgcagcgggaaccggctctcagccccattccccgtggctgcagagggccactggctagaggtcccgagcttcagcagacgaggagccgagcaggggcagggcctggcgggctctcaggccaggtgcactcgcgatccagaggccgcctaggccgtgctccaccacctgggcgcccaagctgcaggcgccctctacctgctggcgacagctgcctggcaactcccaagatggctggcgctcccagcctggcagaaccggggctacatgtcgccctggctgcggccaagccaggcggtctacccggcggcggctgcaccgggacaggaaccgaccccccagtcccatccccggtggctgcggagggcccctgtcagcggccccgatctctcttcggaggaggagcgggtcgggagtcagggccaggcaggccctcaggcgggaagggatgcactcctgggattccgggacgtcccgcgggagcccaggagaacccgcaagccagcgacgcgtgcgcccgtgctgcaggtgccccctgccggccacgagggcttgggagcggcttccggagtcccggctggcgctgagttgtaggcgcgcgcctaactggcatcgcggggactcactcggtctgagagttcggagcgctgaggttcaggcgcgcgcctaacggcttagctgggctcactcggtctgagaggtcggagtctgcgagtgtcgctgctgaaggctgtggtggaccgggctggatcgcggattctgagctacattgcgggtttgggggtggatcttggatttgggggtggatcgcgggttgcgggggggatcgcgggttgcgggggagatcgcggatttggggcggagtgggggtggaaaggccacgaggagccgccgcggctcaggagcgggtggtgggcgtctgagaagtcgccaccatgaggaagctcttcagcttcgggagacgcctgggccaggcgctcctgagctccatggaccaagagtatgcgggtccgggttacgacattcgggactgggaactgcggaagatccacagggctgccatcaagggcgacgccgcggaggtggagcgctgcctgacgcgcaggttccgggacttggacgcccgcgacagaaaagacaggtagctcggggactcagcccgcggtgggagggggccgcaggcccggcttccctgcagcccggcagcccctggggcggggaccttggagggcgccgggcaccctcggagcagcggagccaaatggagcctcagctgctttccgtcgctggcaattccccgtccgtcgcgcttggtggaaaatttgagtgatttaactcacaaagttaggcatatccacgtttaaaacatggggccatatacatgatagggaggtgcctaatgagaactcattcccctgtcaaaaataccatgagcctttttcagtaggcgaagagttctcagataaaaccctgtgtcggttttacatccgaatccacctaggtagacaggttctttactggagcttcttagagggacactgggaagcgcgaggtgggttccttgaatgggaagactcagttttctcaaaatatgaactgtttccatgtttatcagttttacataaactgaatgaagatatcaaggttttatcatttttgcatgacacttgctatctatcttaccattgtgatgacatttaaaaatgtttataatggagtgaaaagacttgctcctctagatatcaaaatgtgctattaattcccacaattaattatttactaacagctgaaaacacagataaataaatggaacagaacaggaaatccaaaaacactgaaatatatgtaagatatatacatagggatggataatggtaacgtttcagatgagtaggaaaagatgagttattaataaaatgcctgctgtgtgaagaaaactaatgaaactttatgtcgcaaaaatgggttcctgatggaattcagactgaaatttttacacatgcaaaatgagaaaaagtaccagaagaaaacgcaaagacttatttatacaggtacattttatgttaacaaaggccttcgtaagaatgacctcgcaagcaggcattctgaaagttgatttagcaaactaaaaat

SEQ ID NO: 1883541 - DNA, 4001 bp, Homo sapiens
taagaggataagatgataggctcctgtcttagggctgtgccaggaactggactccttgaatacagaactaaaggaagtattatcagcagggttcatcttggtcagctcagtctgcccatgtaaggatgtagctgtaaagagaatgtgacatgggtgactttctcatgcaaaatccattctcttgactggataacatatctcagagctgagtagaaccccatataatgtcttttatgaataatgtactagtaaaatcctgaatttcagaactactgtgaccctgccccaaatcagtattgggtgactctttcctcctgagataattatgcctttgcaaccctctcaactagtgaaccagcctccactgtgtatgtctccctcccagccattttccatctcctcagtcctgccccaggctaaatgaaaaaatcaccacaggccaggctggtgtttagagactgcaaacagcaatagatcaccttttcatgacagagaacagctcttgtggcttctgatcttcttcctgagaaagtctcctagctgaggaaccagaagacagtgttatagtagacagtggcatggtagagttttcagagtatctggaggaggttggaggcctttgactctcagcaagaagacactgagaaccctaattataaatgctttaaggcctttctgtgcacagtgtaatgaatcatgacttgttcttctgtgcccattcttatttgactttaacaaccatactgtgagtgagaggatcatcagatgcccatgttatggcaaacaagactgagagatgaagtgacttccacaggttttaaaactagcaaatgacacagctaaggacatctgcactatttcctcaattctttattcccatgggaataatgtagagaattttggaacgtttccaaggtaagatttcccacccatggaagtttcagtctggggaactggagtcttcagtggcagagcacctggctcttggctccaggggtcatagagggacaggattcataggaaacacccacagtggaagggagtcagaggagagattgggacttcacctgttgatgctgcatctctagctctttgcctgactttttggtgacgcttaaaagacaaaaacattagaatgtgaagctgggacaccattttctttctcatgtccaaaatgagacttacatttattttccactccctttctatatatctatctgtattttatacgctttcctggattttctttgcctattccacctttttactccattttccttctctgcttatttcggattcacttggagccttttccaaattctataccttccatctgattcccagataagtcctgctggatgctgaggatgaagcaagagaaaggatagtacagatcaaagagtatgtggttctaatacctaaagacttcagtttataaacaccttaaagggccaccaaccaaaaaaatcccccatattgtgaggtcttttgagatccagtgagatagatcccatatcatctaggtctctattcaagtcaaatggaaagcttcttggcttttcaattagagtatggttcagggaagacctggtaaggaattacttttaggctctgagaaggaaaagactatataaaagtaactaaaggtatggcataaaaattgggggagaggggaagtggggtcaataaggaaggactctggagcttaaaagcatattatctgaggcttaattagttcagttggaatcatagtgttgccctacccagcagcagctcctttcaacttccaagttcaattcatggtggctccttttcacttgccagataattacaataacgatgaagatggagccataggtgtataagggatatccaacatcccacagaacaaaagtagggctcaacatggtctaaacctcattagcatgagatcagccatccctctatctcggcattcagggttctggtgcctaatgactcccagtgctaggccttgtcatatccacctcacagaggacggaactaggccaccagactgcatcacaaagccctcctgtttcataaggtacatgtagtagggaagctcatgtggtgattcagtctgtagatgagggtgttttgagcctgggactgaaggtgccacaagcagtgtctatttcctagtctgtcttcactttccactccctataccagcctgatgtctcggctctgtccttcacaactgtatggtcacctgtcctcagaaaactgagtgctttggcacaggggcaccttatgagaaggggtggttaggccggaggaacctccactaactctcccactagttttggaaatatacctgagaagcacacaagaatttagggagggcagagtctggttatggcttggagatggagatctttgatgtttcaggcaatgggtgattggtaacagaggtgcgggaaggggattatggctgatgtggtagggtgatagggagaggccaaggtggccgtatctatccagtctgtgtggcctcaagcttgcagatgggtggggagagattgtaaatgctgcaatctttttgaggcacattaatgtggctcacttctggaatactgtccaaatcatggttttctagagctgcctctgtccttcttatagcattctgcctgttcagggagatgaatgcctgtagagatggattagtagccatttctggctttgggtcgcaaactggttgctgcttgtggttggatctattcatctctggatgtattctgtttgcctgtaggatttttatttgtttgcttgagtcggattctggaaacttttaaagcagagcagctgttttccacttttgcctcaggactcatcactcctatactctgccgattaatttatacatttatgttacctgcttaacctccatgaatattgcaatacttccctaacagccaatgatttctgaatattcttagaaggtgttgccctggtgagaatggttatagccaaaagcggagaaaaaaattcttgggctcgaaatctttgaacattcatccagcatcccatcctttacctcactggcatggtaagtatattcagtatgctcatccctaagctgggtgatgtcaagggtacaaggactttgagtcatgttggcttcctcctctcaagacacttaaaaatctagtttcgaagacaagacaaatttacgtgaatcaagagccaatggcttatttcaaataatttgatgtattactgaggttcaggtctcaacttttcaagagagagaatgcatggaggggatcagtttggtcagagagggttcctggggagattaattttggagttttgtctaaaagtgcaggttatagggaaaaggactgttccaggtggcagagaaaattcctaacaaacgcagaaccccaaggaatgtgccacagagttcatttgatactaaaaaatgcagtctatctttagcagaggtgcagatgaatggattggagagcaattgtgggaaagattggaggagcaggggtgaggccctccttgatggagggcctttgcatttattttattttaatcacttagattaattgattttttaaagtaagcatacatataaatggtataaacttcaaaaggtagaagaagatataacatactgtctcctcatccttgtctctcatctctcatttttattccctcagtcaatcacttctatcaggttcttgtgtatctttccagactagtctagcataaatttaaaaaatgaatttcaatgttttattcacaaagggaaagatagtatagatagtatagatacttttctctctaatttccctccttctcctcctcctccttcttcttctccttctcctcctccttgttcttcttcttctcctcctcctccttcttcttcccctccctcccttccttccttcctcctcctcttcctcctcttctccttccttcttcttcttcttcttctgacaaggtcacccaggctggagtgcagt

SEQ ID NO: 1883542 - DNA, 4001 bp, Homo sapiens; identical to SEQ ID NO: 588367

SEQ ID NO: 1883543 - DNA, 4001 bp, Homo sapiens
agagagtgagggaagggtttgagtaggaaagtcaccagctggtactgacaaggacactgagggaacagtggttccatctgagcagaagtgtgtgccagggcttctcttggagcacaaagacaatgctgcagggatggcttctggcctggaaactccctttttggaaagtgacctgtggctccaggtagctgttctgtgtgcgacggtgctgaatcttgtccttgtccttggtgggaccccctgtgctcagggtggaggagctctctgtgacctccctggaccaggtagcgccacgggagatccccttcaggcactcttgcacacaggtctgccccgccatctgcaggaagcgtgcggtgttcccggctctccttagacactctcagcagctgaagtcactccaagcatccaagggaggcttctccctgcacctctgggtcatgtggtcaaggccaatgcagggcagaggagtgaccgctggaaaagaagagcccagatgaagtgcagtcacctacctgaggccgggctcccctggaagtccccatgaagtaagtctaggaagaaaccaccagagggcccctagatacccagtggggagggaaagggcagtgcggctcgtcttcatggagcgattgctacagtgctgggatttcatcacgcctgctagcttcattagttactattcccatgaaaaagtaacacagtaatgcaacattttattttattttattttgttaattttttttttggacggaatctttctgtgttgcccaggctggagtgcagtggcaagatctcggctcactgcaacctccacctcccaggttcaaataattatcctgcctcagcctccccagtagctgggattacaggcacccgccaccatacctgaccaatttttgtatttttagtagagacggggtttcaccaggttggccaggctgatcttgaacccctgacctcagatgatctgcccgccttgccctccaaaagtgctgagattacaggcgtgaggcaccatgcccggccttaatgcaacattttaaaaatcaaaattcatgctaaatattccattgtgagcaaaatatccacattttaaatcaagccatggtcagatcctgtaactgcaacactctgagagttgtacaagcgttgggcacgatgggaaactaaattttggcaaattccattcaacctataaagttgtcaccaaagaaaaggaaaagtactcacttgcggaatgttccagacagctcccaggcacactgcactgccagagatgggggatctgctccccgaggactggggcttttccaatgaaggccattttccagtttcgtctaaaagcacagaaggacttcgtgaaatgtttggcttcttcctaagggaaggaggtgcctacagcgttgccatcactgctgctggccacaggaagatgcgtacatatcgtcccgccctaagatcgtgttttgaaagtgggcgactttggaaattaactgaggctgtaaccgcagagctgacgggatgggggagctgctctgatgagtctccagagcggcccggtgaccgcaggagctctgagtcatcaaagaccggggccagggagcctggaagaggaagggcccgctgctcccgggccacgccgggacacatgagttaggggcaaaatttaatgccgcaacaaagcgactcatttttttggaactgaggctgttccagaacttcttactcactctcggcgccgcccccgcgcttccaggccccggacccgccgcaaacaccgctgggcttggactcaaaccgcggtccggtcccacccggtctggtccagtcccgttggaggcggcggttgggctcagcgccaggcgcgcgccctctgctggccgttgggaagcggcgagggaagcgctgagctcgcggccgagcggtggtcgctcgccccctcgcgggctctcccggaatcgctgacattctccgtcccttgctctctgctcctggctggggatgctccatttacatggattggaatagacctaagcaccacaattacaaaatcagttatacggtaatcaaagcctcaaaacaccaggtaacccatgttctaaatcactgtttgggagacagccaaacaggtgagtcacctgatgagaaatacctgccccaacctcttacatgaaagaaaaatttgtaatacaatcaagctactggtcactgtttatttttataatacctaccagttttaacaaaataccattctgaagaaagtgtcacaagataagttcaaacagaagaacagcaaatgccattttatatcattgtaatagatcaaagaatattacaaataatattcattcaaggaatacaaattttcttctctctaaacatttttgtaactcataatgtacaagatattgtcaaaataattccatgattttggtactaatatttgccaaccggggcaaaagagttgcgatttctttttgagctgggcaaaccatctgtataattgattagaaagagccacaagtttaacttcctctacagttttcctgtgggaaacgtcacatgaagggaaataaaaccatattttcatgtaatgtaattttttttaagatggggtcttgttatgttacccaggctggtctctaactttggcctcaagggatccttccccctcagcctctcacctctctcacctccagcctcccaaatgctaggattacaggcgtgatacatcgcgcctggtggaagaagagcacttcaatttcacccctaaaaacctcccaggcaaagactgtatttctttgccttcagatgggggcaaatttttggaagaacctttagacagcgattcccaaacagggacaaagtagatttcctgctttcatcttcctgatagtgatcaaggctggagggtagtagtttctccaggagatcttatctcacgcaccaccatggccctccatgtccagctggttgaagcctgcagaatgtggtggtgggaacaggagtcttgggtcttctggattttgagactatgtcctgtttcccaagagaactaggagcaggtctttgtattcaggcctgactaagaggagatactattcagatatctactattcaggtatctcaaatgcatgaagatgtccttacttttaagccatggctccaaggcgtatcccaggaaagggagcaggcaaggctggagcagagcgtccccagccaggagcagagagcaagggacggagaatgtcagcgattccgggagagcccgcgagggggcgagcgaccaccgctcggccgcgagctcagcgcttccctcgccgcttcccaacggccagcagagggcgcgcgcctggcgctgagcccaaccgccgcctccaacgggactggaccagaccgggtgggaccggaccgcggtttgagtccaagcccagcggtgtttgcggcgggtccggggcctggaagcgcgggggcggcgccgagagtgagtaagaagttctggaacagcctcagttccaaaaaaatgagtcgctttgttgcggcattaaattttgcccctaactcatgtgtcccggcgtggcccgggagcagcgggcccttcctcttccaggctccctggccccggtctttgatgactcagagctcctgcggtcaccgggccgctctggagactcatcagagcagctcccccatcccgtcagctctgcggttacagcctcagttaatttccaaagtcgcccactttcaaaacacgatcttagggcgggacgatatgtacgcatcttcctgtggccagcagcagtgatggcaacgctgtaggcacctccttcccttaggaagaagccaaacatttcacgaagtccttctgtgcttttagacgaaactggaaaatggccttcattggaaaagccccagtcctcggggagcagatcccccatctctggcagtgcagtgtgcctgggagctgtctggaacattccgcaagtgagtacttttcc

SEQ ID NO: 1883544 - DNA, 4001 bp, Homo sapiens
gagagtgagggaagggtttgagtaggaaagtcaccagctggtactgacaaggacactgagggaacagtggttccatctgagcagaagtgtgtgccagggcttctcttggagcacaaagacaatgctgcagggatggcttctggcctggaaactccctttttggaaagtgacctgtggctccaggtagctgttctgtgtgcgacggtgctgaatcttgtccttgtccttggtgggaccccctgtgctcagggtggaggagctctctgtgacctccctggaccaggtagcgccacgggagatccccttcaggcactcttgcacacaggtctgccccgccatctgcaggaagcgtgcggtgttcccggctctccttagacactctcagcagctgaagtcactccaagcatccaagggaggcttctccctgcacctctgggtcatgtggtcaaggccaatgcagggcagaggagtgaccgctggaaaagaagagcccagatgaagtgcagtcacctacctgaggccgggctcccctggaagtccccatgaagtaagtctaggaagaaaccaccagagggcccctagatacccagtggggagggaaagggcagtgcggctcgtcttcatggagcgattgctacagtgctgggatttcatcacgcctgctagcttcattagttactattcccatgaaaaagtaacacagtaatgcaacattttattttattttattttgttaattttttttttggacggaatctttctgtgttgcccaggctggagtgcagtggcaagatctcggctcactgcaacctccacctcccaggttcaaataattatcctgcctcagcctccccagtagctgggattacaggcacccgccaccatacctgaccaatttttgtatttttagtagagacggggtttcaccaggttggccaggctgatcttgaacccctgacctcagatgatctgcccgccttgccctccaaaagtgctgagattacaggcgtgaggcaccatgcccggccttaatgcaacattttaaaaatcaaaattcatgctaaatattccattgtgagcaaaatatccacattttaaatcaagccatggtcagatcctgtaactgcaacactctgagagttgtacaagcgttgggcacgatgggaaactaaattttggcaaattccattcaacctataaagttgtcaccaaagaaaaggaaaagtactcacttgcggaatgttccagacagctcccaggcacactgcactgccagagatgggggatctgctccccgaggactggggcttttccaatgaaggccattttccagtttcgtctaaaagcacagaaggacttcgtgaaatgtttggcttcttcctaagggaaggaggtgcctacagcgttgccatcactgctgctggccacaggaagatgcgtacatatcgtcccgccctaagatcgtgttttgaaagtgggcgactttggaaattaactgaggctgtaaccgcagagctgacgggatgggggagctgctctgatgagtctccagagcggcccggtgaccgcaggagctctgagtcatcaaagaccggggccagggagcctggaagaggaagggcccgctgctcccgggccacgccgggacacatgagttaggggcaaaatttaatgccgcaacaaagcgactcatttttttggaactgaggctgttccagaacttcttactcactctcggcgccgcccccgcgcttccaggccccggacccgccgcaaacaccgctgggcttggactcaaaccgcggtccggtcccacccggtctggtccagtcccgttggaggcggcggttgggctcagcgccaggcgcgcgccctctgctggccgttgggaagcggcgagggaagcgctgagctcgcggccgagcggtggtcgctcgccccctcgcgggctctcccggaatcgctgacattctccgtcccttgctctctgctcctggctggggacgctctgctccagccttgcctgctccctttcctgggatacgccttggagccatggcttaaaagtaaggacatcttcatgcatttgagatacctgaatagtagatatctgaatagtatctcctcttagtcaggcctgaatacaaagacctgctcctagttctcttgggaaacaggacatagtctcaaaatccagaagacccaagactcctgttcccaccaccacattctgcaggcttcaaccagctggacatggagggccatggtggtgcgtgagataagatctcctggagaaactactaccctccagccttgatcactatcaggaagatgaaagcaggaaatctactttgtccctgtttgggaatcgctgtctaaaggttcttccaaaaatttgcccccatctgaaggcaaagaaatacagtctttgcctgggaggtttttaggggtgaaattgaagtgctcttcttccaccaggcgcgatgtatcacgcctgtaatcctagcatttgggaggctggaggtgagagaggtgagaggctgagggggaaggatcccttgaggccaaagttagagaccagcctgggtaacataacaagaccccatcttaaaaaaaattacattacatgaaaatatggttttatttcccttcatgtgacgtttcccacaggaaaactgtagaggaagttaaacttgtggctctttctaatcaattatacagatggtttgcccagctcaaaaagaaatcgcaactcttttgccccggttggcaaatattagtaccaaaatcatggaattattttgacaatatcttgtacattatgagttacaaaaatgtttagagagaagaaaatttgtattccttgaatgaatattatttgtaatattctttgatctattacaatgatataaaatggcatttgctgttcttctgtttgaacttatcttgtgacactttcttcagaatggtattttgttaaaactggtaggtattataaaaataaacagtgaccagtagcttgattgtattacaaatttttctttcatgtaagaggttggggcaggtatttctcatcaggtgactcacctgtttggctgtctcccaaacagtgatttagaacatgggttacctggtgttttgaggctttgattaccgtataactgattttgtaattgtggtgcttaggtctattccaatccatgtaaatggagcatccccagccaggagcagagagcaagggacggagaatgtcagcgattccgggagagcccgcgagggggcgagcgaccaccgctcggccgcgagctcagcgcttccctcgccgcttcccaacggccagcagagggcgcgcgcctggcgctgagcccaaccgccgcctccaacgggactggaccagaccgggtgggaccggaccgcggtttgagtccaagcccagcggtgtttgcggcgggtccggggcctggaagcgcgggggcggcgccgagagtgagtaagaagttctggaacagcctcagttccaaaaaaatgagtcgctttgttgcggcattaaattttgcccctaactcatgtgtcccggcgtggcccgggagcagcgggcccttcctcttccaggctccctggccccggtctttgatgactcagagctcctgcggtcaccgggccgctctggagactcatcagagcagctcccccatcccgtcagctctgcggttacagcctcagttaatttccaaagtcgcccactttcaaaacacgatcttagggcgggacgatatgtacgcatcttcctgtggccagcagcagtgatggcaacgctgtaggcacctccttcccttaggaagaagccaaacatttcacgaagtccttctgtgcttttagacgaaactggaaaatggccttcattggaaaagccccagtcctcggggagcagatcccccatctctggcagtgcagtgtgcctgggagctgtctggaacattccgcaagtgagtacttttcct

SEQ ID NO: 1883545 - DNA, 4001 bp, Homo sapiens
agccgaccgcgctttacaggacacgtgccaccaggaacaggggcgaatccgaggtggagaccgtgtgaccacgcgtggcactggcctaccccacagcagatggtgtggatgtgtgtcgccggaggcatacggggcgacggcgaaacaaagggtggtgtccaggcatgtgctggtggaagggggaaacgagtgacctttccatcaatgccaaggaaagtcgaagaacacctggggctcggggggtgcgggtcgagatggggggctgtgcctgacccaagccacgttttcacatgcctaccagaggagcaaagaggttttggcaaaaatcgccccacccccaagcctccatcgccctggtagccctgacgcaacttcggctgcacccagccccagccccatccccagccccagccccagcccagtccctttggtttcctgacatttgtttcgtccagaagatcaagggagtcaggccacccaggagcagaggagaggatgtccctcaagaatgagacaggaagtgcaaaggaaatgggacaccacctgtcctggaagtcaaggccagtcacggtcgcctagcgctcattctaggcaatccacccacccatgaggggaaacgtggggaagaaggaagcttccctgcctgagacacgtatggaagccaagagctctcggctcatgatacctgcccaattaagcagaaacacgtttggagagagaaacgatcatgacacggatctccaggaagtgtctccctgacggactgggaagtcatcttttttgaaggcatttggccagagcgagaggcatccaggcccctgagaaacaggggaggcagagccagagggaggagagagtagaggccagagcccaggcaggatacagcaccgtgccaccgccacagacataaggggtggggttcctaaagggtggcttgtccagggaggccagcgttccagtgacagggactgttgccatctcccattcccggcttcctcttgctgactgtatcgtggtgtggcttcatttctcagagaagagccgtgaaaagatacaagcatcttctctggcgtggatccgctgctctcctgtgggacaaagagttcctctggggctcttgttctcggctgcagtgtactcatcttgatcctagaaaagaggccactcaggatggggatgagatttcagttgctccgggagcgacgcatctcctcacgtgggccaggctttcaggcacccaaagcggatccgccgcggcgaaaacgattgacagccggcctcatgacccaggtagagacgcagaaagaggctcaccaaagacaggccgccatgcgacaaaccgctttgtggcgcacagggcacattcggccaaagacacacacgcacacgggcatacacacacaaacccacagagagagggaaagaaacacacagagactgagagacagagagagaagagagactgggagacacacacacagacacacacacacacactcacacacacacacacacacacacacacagagacacacacacagcgtcatacagcagaggcattgaaacacacaccaccaggcaacccctgaggctgcggggttctgctcacgacgagaacgactctcgggtgagagagcagcccaggggcacgcaggccgacctgtcctcgagatcacggatggcggcacgacttttggggagactcaccccaaccaacaccgtccgggcaggcctgaggctgggatcccgtgctgcttcccccgtccccgcctggggtttcctcatcgtggtcggccctttgcgactcctggcatccggagacgttcccgtcgaccccgtggagaggtgaggccggatcctcagagccccgacacccaagcactgccacagagggctcctgctttgccaagcctcggggactggtttctaagacaaccatgggaaccactgtgacgggagaaaccgctcgcgcctcgcgcatgcgcattggctgagccgactcgcgctccgctcctggcagtatggctgcgtcccctttaaataccgccaccgccgcgcggcggcagcgaggttcctcctgccgccacggcggcggctggatccggggtccagtttggggcggcgtgggagagggggccgcgggtgtcttgtcctgtcccagggccaaacccctaggagtcctgtcctcaggacctccttgagccgacttccacggagggaggtggagcttcaagatgcctgctgtgttctccagactcccgttcagatccgattttggacccctccgagtgagataggataggctcaccacatctggtgaggcaggcagggccttgctgcaacacagaatgatcccgtaggtctcaaggcctacttgtactgttgtacataatgtatataattgacttttattcactcgacaaaatttcctaaaaatacatccaaatgattgcattaattaatattttgttcctttgatgactgagtagtatttcatggtttctggtataaattcaccacaaattaaacattcacctgggcttattgaccttttcaactgtaacaaattaagctgttgtagacattcgtgaacaagtttttgtgggaccacagtttcatcactccaaattaaacacccacaactgcaattgctgggatctatggtctatgcatatctggtttttattttactttaaaaaatttttaattattttcttaaaattttatgggtacactgagtgcccacagaagctagtaaggatactggggcattggagaggaggtagagaaggttaatcagcacacacagaaaaaaaatgtggaaagaatgaataacatatctgtctttttaaaaaactgtcagctatttttcagagtggctctattattttacttttccactagcaacttatgagtgatcgtattttttacatcctgaatagcttttgctattgtcacaatttttaaaagtcattttgataggtgtgtagaaatatctcactatggttttatttgacatgtccatgatgattaataatattgaacatgtttcatggattatttgacatctgaatatttttcttgttaaaacgtccattgatgtcttttgtccattacctaattggatcatttgcattttttaaaaaatttgctgttgtgttttgtgtcatctctatttatttttgtcggttttgatagatgtttatcaattgattgattttttcaataaaccagctttttgtttcacatttttttctgttttcaatttcatgaatttttgttattgtgatgattatttttcttcttctgcctgctttcagtttactctgttctttttctagtttcttgagatacaagtgtaagttattgatttgagatcttttcttatttttaatgaagcatttagtactataaatttctttcccaccacagccttagctgtatttcctatattttgatatgttgtattttctttcatttgttgaaatatatttttagatttttatttaagactttatatttaatccatagatcatttggaactgtgttgcataattgaaatgcatttaaacattttcctgctctctttctgttactgacttttattttaattccactatggtcagagaacatactctatatgacataaattcttttaaatgtatcagggtttgttttatggtgcaagaaatcatctagtattttagttaatatttcatgagctcctgaaaaactgtatattctgctgttttttgtggactgattctatatttagagagagatatatatataattgacatatatttatctgtatatgtgtgtctgtgtgtgtgtgtgtgtgtgagtttgtgtgtgtgaataaaatcttgttggttgattgtgctgtacagatcttctacatgcttgctgattgtcaaatttttgtccaataattctatcaattgctgagataaggctgttaaaacccacaactataatttattattttttagttctataat

SEQ ID NO: 1883546 - DNA, 4001 bp, Homo sapiens
cggaaagccgaccgcgctttacaggacacgtgccaccaggaacaggggcgaatccgaggtggagaccgtgtgaccacgcgtggcactggcctaccccacagcagatggtgtggatgtgtgtcgccggaggcatacggggcgacggcgaaacaaagggtggtgtccaggcatgtgctggtggaagggggaaacgagtgacctttccatcaatgccaaggaaagtcgaagaacacctggggctcggggggtgcgggtcgagatggggggctgtgcctgacccaagccacgttttcacatgcctaccagaggagcaaagaggttttggcaaaaattgccccacccccaagcctccatcgccctggtagccctgacgcaacttcggctgcacccagccccagccccatccccagccccagccccagcccagtccctttggtttcctgacatttgtttcgtccagaagatcaagggagtcaggccacccaggagcagaggagaggatgtccctcaagaatgagacaggaagtgcaaaggaaatgggacaccacctgtcctggaagtcaaggccagtcacggtcgcctagcgctcattctaggcaatccacccacccatgaggggaaacgtggggaagaaggaagcttccctgcctgagacacgtatggaagccaagagctctcggctcatgatacctgcccaattaagcagaaacacgtttggagagagaaacgatcatgacacggatctccaggaagtgtctccctgacggactgggaagtcatcttttttgaaggcatttggccagagcgagaggcatccaggcccctgagaaacaggggaggcagagccagagggaggagagagtagaggccagagcccaggcaggatacagcaccgtgccaccgccacagacataaggggtggggttcctaaagggtggcttgtccagggaggccagcgttccagtgacagggactgttgccatctcccattcccggcttcctcttgctgactgtatcgtggtgtggcttcatttctcagagaagagccgtgaaaagatacaagcatcttctctggcgtggatccgctgctctcctgtgggacaaagagttcctctggggctcttgttctcggctgcagtgtactcatcttgatcctagaaaagaggccactcaggatggggatgagatttcagttgctccgggagcgacgcatctcctcacgtgggccaggctttcaggcacccaaagcggatccgccgcggcgaaaacgattgacagccggcctcatgacccaggtagagacgcagaaagaggctcaccaaagacaggccgccatgcgacaaaccgctttgtggcgcacagggcacattcggccaaagacacacacgcacacgggcatacacacacaaacccacagagagagggaaagaaacacacagagactgagagacagagagagaagagagactgggagacacacacacagacacacacacacacactcacacacacacacacacacacacagagacacacacacagcgtcatacagcagaggcattgaaacacacaccaccaggcaacccctgaggctgcggggttctgctcacgacgagaacgaccctcgggtgagagagcagcccaggggcacgcaggccgacctgtcctcgagatcacggatggcggcacgacttttggggagactcaccccaaccaacaccgtccgggcaggcctgaggctgggatcccgtgctgcttcccccgtcccagcctggggtttcctcatcgtggtcggccctttgcgactcctggcatccggagacgttcccgtcgaccccgtggagaggtgaggccggatcctcagagccccgacacccaagcactgccacagagggctcctgctttgccaagcctcggggactggtttctaagacaaccatgggaaccactgtgacgggagaaaccgctcccgcctcgcgcatgcgcattggctgagccgactcgcgctccgctcctggcagtatggctgcgtcccctttaaataccgccaccgccgcgcggcggcagcgaggttcctcctgccgccacggcggcggctggatccggggtccagtttggggcggcgtgggagagggggccgcgggtgtcttgtcctgtcccagggccaaacccctaggagtcctgtcctcaggacctccttgagccgacttccacggagggaggtggagcttcaagatgcctgctgtgttctccagactcccgttcagatccgattttggacccctccgagtgagataggataggctcaccacatctggtgaggcaggcagggccttgctgcaacacagaatgatcccgtaggtctcaaggcctacttgtactgttgtacataatgtatataattgacttttattcactcgacaaaatttcctaaaaatacatccaaatgattgcattaattaatattttgttcctttgatgactgagtagtatttcatggtttctggtataaattcaccacaaattaaacattcacctgggcttattgaccttttcaactgtaacaaattaagctgttgtagacattcgtgaacaagtttttgtgggaccacagtttcatcactccaaattaaacacccacaactgcaattgctgggatctatggtctatgcatatctggtttttattttactttaaaaaatttttaattattttcttaaaattttatgggtacactgagtgcccacagaagctagtaaggatactggggcattggagaggaggtagagaaggttaatcagcacacacagaaaaaaaatgtggaaagaatgaataacatatctgtctttttaaaaaactgtcagctatttttcagagtggctctattattttacttttccactagcaacttatgagtgatcgtattttttacatcctgaatagcttttgctattgtcacaatttttaaaagtcattttgataggtgtgtagaaatatctcactatggttttatttgacatgtccatgatgattaataatattgaacatgtttcatggattatttgacatctgaatatttttcttgttaaaacgtccattgatgtcttttgtccattacctaattggatcatttgcattttttaaaaaatttgctgttgtgttttgtgtcatctctatttatttttgtcggttttgatagatgtttatcaattgattgattttttcaataaaccagctttttgtttcacatttttttctgttttcaatttcatgaatttttgttattgtgatgattatttttcttcttctgcctgctttcagtttactctgttctttttctagtttcttgagatacaagtgtaagttattgatttgagatcttttcttatttttaatgaagcatttagtactataaatttctttcccaccacagccttagctgtatttcctatattttgatatgttgtattttctttcatttgttgaaatatatttttagatttttatttaagactttatatttaatccatagatcatttggaactgtgttgcataattgaaatgcatttaaacattttcctgctctctttctgttactgacttttattttaattccactatggtcagagaacatactctatatgacataaattcttttaaatgtatcagggtttgttttatggtgcaagaaatcatctagtattttagttaatatttcatgagctcctgaaaaactgtatattctgctgttttttgtggactgattctatatttagagagagatatatatataattgacatatatttatctgtatatgtgtgtctgtgtgtgtgtgtgtgtgagtttgtgtgtgtgaataaaatcttgttggttgattgtgctgtacagatcttctacatgcttgctgattgtcaaatttttgtccaataattctatcaattgctgagataaggctgttaaaacccacaactataatttattattttttagttctataatt

SEQ ID NO: 1883547 - DNA, 4001 bp, Homo sapiens
agtctcatggctccctggacccccaaaagttatgaaaactaaaccagagctgagaactgggctaggatggaattgcctgtcaacccgagggatgcaaagaggaaccaccgttgggtccattaagaaatccacaaataaaataaaaataaatcagtgtgacacagaccacctggctgaaggaaaggtttctctctatgcctcagccctgctccagggctaccaaacagatcaggcttaatatttaaaatgtttaatagttaaaattttttaacaatttaactttaaaaaggtcacacattttctgatccagcaatgccccaatcagattgtttcattttattattattatcaacactgtcccctttttggcacctgtaaaatagttcctttcgggagtttggagccaggccaggcaccgtaggtgcatgggatgagatgggcaggtttggagctcctctgtctagtgaggatcacggtctgcagagaagggttggcctccccgtctcccatcaaggcttaaagcaaggagaaccatcccgaatttggttccttttccactaagtatccttagaggcgatccaccctgtgactaggtgactaggtgaaggactgaggtccagaaaggagctatcttaaacctggaatcccatttcctagtctgcagccttaagcagtttccctctcagacaactagccctctccttcctccgcatgaaaacccatggcttacagggatggttgttgctttccctaaagaaattcaggaagggagatgtgagggtcagttctcagcggtggcgttctttgaaggggacgcagcctgactgccaggaggggaggagtcggcccagccaatgcgcatgcgcgaagcacaagcggtttctcccgtcacagtggttcccacggttgtcttagaaaccagtccccgaggcttggcaaagggggagacttccgtggcagtgcttgggtgtcaaggctctgaggctccggcctgacgactccactgggtcgaggggaaagtctccggatgccaagagtcacaaagggccaaacagggtgaggaaacccgacgcagagtccggagaaggcagcatggaatccctccctcaggcctctctggacggtgttggtgggggtgagtctccccaaaagtcgtgacgcggtgatctcgaggacaggacggcctgcgtgcccctggggtgctctctcaccgaagggtcgttctcgtcgaaagcagaaccccacagcctcaggggttgcctgggtgtgtgtctttcaatgcctttgctataagactctgtgtgtgtgtctgtgtgtgtatgtgtgtgtgtctcccattctctcttctctctctgtctctcagtctctgtgtgtttctttccctctctctgtcggtttgtgtgtgtgtgcccgtgtgcgtgtgtgtccttggccgaatgtgccctgtgcaccacaaagctgtttctcgcatggcggcctgtctttggtgagcctgtttctgcctctctgcctgggtcatgagaccggttgtcaatccttttcgccgacgcggttccgctttgggtgtgtgaaggcctggcccacgtgaggagattcttcagtcccggagcaattgaaatatcctccccatcctgaacagcctcttttctaggatcaagatgaacacactgcagacgaggacacgagccccacaggagctctttgtcccgcaggagaccagcggacccacgtcagagaagatgcttgtatcttttcatggctcttctctgagaaatgaagccacaccacaataaggtctggaagaggaagccgggaatgggagatggcaacagtccctgtcactggaatgctggcctctctggacaagccacccttttggaaccccaccccttatgaccctggcagtggaacggtgatatatcctgcctggccgccggcgtctgccctgtcctccctcctgctctgcctcacctgtttctcaagtgcctcaatgcctctcgctgacgcccaatgtcttcaacaaagatgacttcccagtccgtcagggagacatttcttcgagatccgtgtcgtgattgtttctctctccaaacgtgtttctgcttgattgggcaggtcgcatgacctgggagctcctggcttccattcgtgtctcaggcagggaagcttccttcttctccacgtttcccctcatgggtgggtggattgcctagaatgagcgctaggcgaccatgactggccttgtcttccaggaaaggtagtgtcgcatttcctctgcacttcctgtctcattcatgagggacatcctctcctctgctcctgggtggcctgactcccttgatcttctggccgaaacgaatgtcaggaaaccaaagggactgggctggggctggggctggggctggggctgggcgcagctgaagttgcgtcagggctaccagggcggtggagggttgggggtggggcgaattttgcagaaacctctttgctcctctggtaggcatttgaaaacgtggcttgggtcaggcacaggacccccacccccccggtcctaggtgttcttcgattttccttggcattgatggaaaggtcaaccgtttccccattcaaccggcacatgcctggacaccaccctttgtttcgccgtcgccccgtatgcctccagtgacacacattaacaccaactgctgtgggataggccagtgccacgcgtggtcacatggtctccacctcggattcgcccctgttcctctatgcaggtgtcctgtaaagcacggtgggctttccggaaccccagggcttttagaagcggggcaggccaccgctctttcaaaggaggagggaggcagagggctgacggataagtgaatttgcagctgacactaggccttgagacctatgggatcattctgcgctgcagcgaggccctgcctgcctcaccagatgtggtgagcccatcctatttcactcgaagggggccaaaattggatctgaacaggagtccggagaacacagcaggcgtcctgaagctccccctccctcggtggaagtcggctcaagcaggtcctgaggtgaggactcctcggggtttggccctgggacaggagaagacacccacggccccctctcccacgccgccctaaactggaccctggatctagccgccgccgcggggctagcaggagcctcgctgctgccgcgctcagaggtggcagtatttaaaggggacacagcctgactgccaagaacggagcgcgagtcggctcagccaatgcacatgcgcgaggcgggagcggcttctccagtcacagtggttcccatggttgtcttagaaaccagtccccgaggcttggcgaagaaggagccctccgtggcagtgcttgggtttccgggctctgaggctccggcctaacctcttcttggggtcaacgggaatgtccccagatgccaggagtcgcaaagggccgactaccatgaggaaagcccagcggagacgggggaagcagcacgggatcccagcctcaggcctgaccggacggtgtttgttggggtgagtctccccaaaagtcgtgcctccgtcagtgatctctaggacaggtcggcctgcatgcccctgggctgctctctcacccgagggtccttctcgtagagagcagaacatcacagcctcagggattgcttgggggtgtgtttttcaatgccctcctccttagaaagagcagtggcctgccctgcttctaaaagccctggggctccggaaagccgacagtgctttacaggacacctgcaaagaggaacaggggcaaatccgaggcggagaccatatgactacgcgtggcactggcctatcccacagcagttggtgttaatgcgtgtcactggaggcatacggggagagggcgaaacaaagggtggtgtccaggaacgtgccggtggaagggggaaacgggtgacctttccatcaatgccaaggaaaatcgaaaaacacgtgggacacgcgg

SEQ ID NO: 1883548 - DNA, 4001 bp, Homo sapiens
ctcatggctccctggacccccaaaagttatgaaaactaaaccagagctgagaactgggctaggatggaattgcctgtcaacccgagggatgcaaagaggaaccaccgttgggtccattaagaaatccacaaataaaataaaaataaatcagtgtgacacagacaacctggctgaaggaaaggtttctctctacgcctcagccctgctccagggctaccaaacagatcaggcttaatatttaaaatgtttaatagttaaaattttttaacaatttaactttaaaaaggtcacacattttctgatccagcaatgccccaatcagattgtttcattttattattattatcaacactgtcccctttttggcacctgtaaaatagttcctttcgggagtttggagccaggccaggcaccgtcggtgcatgggatgagatgggcaggtttggagctcctctgtctagtgaggatcacggtctgcagagaagggttggcctccccgtctcctatcaaggcttaaagcaaggagaaccatcccaaatttggttccttttcccctaagtatccttagaggcaatccaccctgtgactaggtgactaggtgaaggactgaggtccagaaaggagctatcttaaacctggaatcccatttcctagtctgcagccttaagcagttaccctctcagacaactagccctctccttcctccgcatgaaaacccatggcttacagggatggttgttgctttccctaaagaaattcaggaagggagatgtgagggtcagttctcagcggtggcgttctttaaaggggacgcagcctgactgccaggaggggagaaagagtcggcccagccaatgcgcatgcgcgaagcacaagcggtttctcccgtcacagtggttcccacggttgtcttagaaaccagtccccgaggcttggcaaagggggagacttccgtggcagtgcttgggtgtcaaggctctgaggctccggcctgacggctccactgggtcgaggggaaagtctccggatgccaagagtcacaaagggccgaacagggtgaggaaacccgacgcagagtccggagaaggcagcatggaatccctccctcaggcctctctggacggtgttggtgggggtgagtctccccaaaagtcgtgacgcggtgatctcgaggacaggacggcctgcgtgcccctggggtgctctctcaccgaagggtcgttctcgtcgaaagcagaaccccacagcctcaggggttgcctgggtgtgtgtctttcaatgcctttgctataagactctgtgtgtgtgtctgtgtgtgtatgtgtgtgtgtgtctcccattctctcttctctctctgtctctcagtctctgtgtgtttctttccctctctctgtcggtttgtgtgtgtgtgcccgtgtgcgtgtgtgtccttggccgaatgtgccctgtgcaccacaaagctgtttctcgcatggcggcctgtctttggtgagcctgtttctgcctctctgcctgggtcatgagaccggttgtcaatccttttcgccgacgcggttccgctttgggtgtgtgaaggcctggcccacgtgaggagattcttcggtcccggagcaattgaaatatccccatcctgagcggtctcttttctaggatcaagatgaacacactgcagacgaggacacgagccccacaggagctctttgtcccgccggagaccagcggacccacgtcagagaagatgcttgtatcttttcacggctcttctctgagaaatgaagccacaccacaatacggtctggaagaggaagccgggaatgggagatggcaacagtccctgtcactggaatgctggcctctctggacaagccacccttttggaaccccatcccttatgaccctggcagtggaacggtgatatatcccgcctggccgccggcgtctgccctgtcctccctcctgctctgcctcacctgtttctcaagtgcctcaatgcctctcgctgacgcccaatgtcttcaacaaagatgacttcccagtccgtcagggagacatttcttcgagatccgtgtcgtgattgtttctctctccaaacctgtttctgcttgattgggcaggtcgcatgacctgggagctcctggcttccattcgtgtctcaggcagggaagcttccttcttctccacgtttcccctcatggtgggtggattgcctagaatgagcgctaggcgaccatgactggccttgtcttccaggaaaggtagtgtcgcatttcctctgcacttcctgtctcattcatgagggacatcctctcctctgctcctgggtggactgactcccttgatcttctggctgaaacgaatgtaagggaaccaaagggactgggctggggctggggctggggctggggctgtggctgggcgcagcctaagttgcgtcagggctaccagggcggtggagggttgggggtggggcgaattttgcagaaacctctttgctcctctggtaggcatgtgaaaacgtggcttgggtcaggcacaggacccccaccccccgggtcctaggtgttcttcgattttccctggcattgatggaaaggtcaactgtttccccattcaaccggcacatgcctggacaccaccctttgtttcgccgtcgccccgtatgcctccggtgacacacattaacaccaactgctgtgggataggccagtgccacgcgtggtcacatggtctccacctcggattcgcccctgttcctctatgcaggtgtcctgtaaagcgcggtgggctttccggaaccccagggcttttagaagcggggcaggccactgctctttcaaaggaggagggaggcagagggctgatggataagtgaatttgcagctgacactaggccttgagacctatgggatcattctgcactgcagcgaggccctgcctgcctcaccagatgtggtgagcccatcctatttcactcgaagggggccaaaattggatctgaacaggaggacggagaacacagcaggcgtcctgaagctccccctccctcagtggaagtcggctcaagcaggtcctgaggtgaggactcctcggggtttggccctgggacaggagaagacacccacggccccctctcccacgccgccccaaactggaccccggatctagccgccgccgcggggctagcaggagcctcgctgctgccacgctcagatgtggcagtatttaaaggggacccagcctgactgccaggagcggagcgcgagtcggctcagccaatgcacatgcgcgaggcgggagcggcttctccagtcacagtggttcccacggttgtcttagaaaccagtcaccgaggcttggcgaagaaggagccctccgtggcagtacttgggtttcggggctctgaggctccggcctaacctcttcttggggtcaacgggaatgtccccagatgccaggagtcgcaaaaggccaactaccatgaggaaagcccagcggagacgggggaagcagcacgggatcccagcctcaggcctgaccggacggtgttggttggggtgagtctccccaaaagtcatgcctccgtcagtgatctctaggacaggtcagcctgcatgcccctgggctgctctctcacccgagggtccttctcgtagagagcagaacatcacagcctcagggattgcttgggggtgtgtttttcaatgccctcctccttagaaagagcagtggcctgccctgcttctaaaagccctggggctccggaaagccgacagtgctttacaggacacctgcaaagaggaacaggggcaaatccgaggcggagaccatatgactacgcgtggcactggcctatcccacagcagttggtgttaatgcgtgtcactggaggcatacggggagacggcgaaacaaagggtggtgtccaggaacatgccggtggaagggggaaacgggtgacctttccatcaataccaaggaaaatcgaaaaacacgtgggacac

SEQ ID NO: 1883549 - DNA, 4001 bp, Homo sapiens
gccccaagtcaagtctttttcacagccttggttcaccataaaactaaggtggacaattgtcatggacagaattgtgttgcctcaaatttatgttgaagtcctcacctctagtacctcagaatggggctgtatttggaaagaggacctataaagaggtaattgaggtaaaattaggttatatgggtgggccctaatcagtaagactgatttccttgtaagacaaggagatgtggacagagaccacacacagaccacaggacaatcatgtgaggacacagtaagaaggtggccattggcaagggaaagagagaggcctcagaagagaccaaatgtgctgattccttgaccttggacttccagcctccaaaactgtgagaaaagaaattttttatggctgcatagtattccatggtgtatatgtgccacattttcttaaaaatgatgagttcatgtcctttgtagggacatggatgaaattggaaatcatcattctcagtaaactatcgcaagaacaaaaaaccaaacaccgcatattctcactcataggtgggaattgaacaatgagaacacatggacacaggaaggggaacatcacactctggggactgttgtggggtggggggaggggggagggatagcattgggagatatacctaatgctagatgacgagttagtgggtgcagcataccagcatggcacaggtatacatatgtaactaacctgcacattgtgcacatgtaccctaaaacttaaagtataataataataaataaacaaagaaagaaagaaagaaagaaagaaatttatgttacttaagccactcagtctgtggtattttgttatggcagccctagtaaactaatacaaatatttttagggacaacaaaccatggactttgttattctagtaagatgactttagcactattacctacttctaccttgaagtggtaaaaaaaggcagtgagaagcatttccatggagtgtataaatcgtgtcccgtgaaacagaattagctaataaggttaacacctgtcagctgtatatgatgctgcgtctccaatctccatccggacagcaaaggggaaggcatggacaggagacctgccttcagaagagcagctgacaaaggggcccacagcctggggacggtgacggcagtagccccccgaggcctgggatcccacagcacaattgtgaagggaaagtcttacttgctgggcccagatgtgtaattttctcccaccactgtttttttttgtgaaaaattcttaaataaacatggtgttggacatttttctgactaggaagttaggatatttgcttttctagcatctttattagatgactttttatgtttgcaaagtcactcagaaaaaacttcatcctcccaacacctccctggaccacagtccccacaaatgacattgaactcacaacataaaggaactcaccactaggtaaataggtgcttgactgtgatttaacacctgaattactaaaattgattgcaataattatccaaagaaaaacagccaagtgcagcagtaacgacagcctctgaactctctccacatcttcttgcagacagcgtctgagctgtttccatgtcttctccgggacagtctctgagtttctgagctctttccacgtcttctccgggacagcctctgaactctctccacgtcttctctgggacatcctctgagctctccacgtcttctctgggacagcctctgagctctttccacgtcttctctgggacagcctctgagctgtctccacgtctcctccaggacagcctctgagctccctccacatcttctctgggtctcctgtggagtctgatcacctttcagttaaggcatctcctgtgagcagcccagttggctactctgagttctgggggtagctgtccttggtttctctgaattgcccagaaaccaacctttctgttgcccatcgtagtgcctacgtggcttagctggagccctaccctgcttttgttgcccaacaaatgcctatgtgacagagctaaattcccattcagctttaactgcttagttttagaaaacaggatgtctggggtcagaagttccttcttaggactaaactggctgaagctggcaaaatccgcaatggcagcttgacctctgaaaaacctctagcttcattatgatccaatttccatgctaaatgacactcccactggcaccttgacagttgacaatcaccatgacaatggccagaagagaccaaaaacaggcagaaaagaggtggctctttgattccaaaaaaacctacctcccttcccaagaaaagctatgaatatttctccctttcctctgtatacccagccccttcattaagaatcctcagttctcaggctctgagaagttgatttgcaggctatgctcccacttctgcaattccatggccattgaaaaaagcccacactgtttgatactcactctcggtttggtgtattggcttcacaccaaacaagaaagagctcctttaggggtagtcaggaccctgattatattcccacatagaaactgttcccactcactactggcacagcagaacacataaactgtcagatggctccatttcaatgatttgacttgtaattctcaattgtttctgttcctaagattttaggactttctatcaactcataaaaaaaatctttaaaaaggtaaggcaaccttcaaatctaagatgctcagctttaaactagtaagttcttaaggatgttttttttccttcaaggaaactattctcctctttgctgagcaataatacaggttttaatattaaataagtacacaaagtaaaagaaacagacaaaaatgtcttcatagcaaggctgttaacagatttctttctttgttttttatttttgagatggggtctcactctgttgcccaggcgggagtgcagtggcacaatctcagctcactgcaacctctgcctcctcagttcaagtgattctcctgcctcagcctcccaagttgctgggatcacaggtgcctgccatcacgcccggctaatttttttgtatttttagtagagacggggttttgccatgttggccaggctggtctcaaactgctgacctcaggtgatccgcccaccttggcctcccaaagtgctgggattacaggcatgagccaccgtgcctggccagatttctaatatacgtaaagaaaaaagaaaaattttcaaatatttgtttagataagtactgatatttaaaaaaacaaccaagcctaaatccctagatttacaatttttaaaaaataagaaaagcaatgtaattcacagaataaaatcttttggagtaaagtaatataactctaacaaattggtaaatctaggcaagaaatgacttgcccaagtaacagacctagtaggtggagagttcatctgactccagaaaccacactctacaaaataaacttattgacgtgaagaatgtatataatctgtaactggtgtgaaactgtggcagaaatacaaagagccgtggtcttgctcatgatgttcaaaggcaatatttgaactgagggatggctgtgtgaattgaagtggtcactggagaaacgtgtttgagattgtgaaccatggggaacagggggtggtaattctggattttcggcatagaggagaaagaaagaactgcaaacatcattacagtgaaggagggtgaggccctccgaaaactgattgcgtttcaccagaaacactgatccagtgggggcagctgaagcacgaaaatgattagaaccagagtgatgtcacccacttttctttctttctttctttttcttctttttttttgaaacagagtctcgcagtctcgctctgtctcccaggctggagtgcagtggcgcgatctcggctcactgccagctccgcctcctggggtcacgtcattctcctgcctcaggctcccgagtagctgggaccacaggcgcccccaccatgtccggct

SEQ ID NO: 1883550 - DNA, 4001 bp, Homo sapiens
aattgtgttgcctcaaatttatgttgaagtcctcacctctagtacctcagaatggggctgtatttggaaagaggacctataaagaggtaattgaggtaaaattaggttatatgggtgggccctaatcagtaagactgatttccttgtaagacaaggagatgtggacagagaccacacacagaccacaggacaatcatgtgaggacacagtaagaaggtggccattggcaagggaaaagagagaggcctcagaagagaccaaatgtgctgattccttgaccttggacttccagcctccaaaactgtgagaaaagaaattttttatggctgcatagtattccatggtgtatatgtgccacattttcttaaaaatgatgagttcatgtcctttgtagggacatggatgaaattggaaatcatcattctcagtaaactatcacaagaacaaaaaaccaaacaccgcatattctcactcataggtgggaattgaacaatgagaacacatggacacaggaaggggaacatcacactctggggactgttgtggggtggggggaggggggagggatagcattgggagatatacctaatgctagatgacgagttagtgggtgcagcataccagcatggcacaggtatacatatgtaactaacctgcacattgtgcacatgtaccctaaaacttaaagtataataataataaataaacaaagaaagaaagaaagaaaaaaagaaatttatgttacttaagccactcagtctgtggtattttgttatggcagccctagtaaactaatacaaatatttttagggacaacaaaccatggactttgttattctagtaagatgactttagcactattacctacttctaccttgaagtggtaaaaaaaggcagtgagaagcatttccatggagtgtataaatcgtgtcccgtgaaacagaattagctaataaggttaacacctgtcagctgtatatgatgctgcatctccaatctccatccggacagcaaaggggaaggcatggacaggagacctgccttcagaagagcagctgacaaaggggcccacagcctggggacggtgacggcagtagccccccgaggcctgggatcccacagcacaattgtgaagggaaagtcttacttgctgggcccagatgtgtaattttctcccaccactgtttttttttgtgaaaaattcttaaataaacatggtgttggacatttttctgactaggaagttaggatatttgcttttctagcatctttattagatgactttttatgtttgcaaagtcactcagaaaaaacttcatcctcccaacacctccctggaccacagtccccacaaatgacattgaactcacaacataaaggaactcaccactaggtaaataggtgcttgactgtgatttaacacctgaattactaaaattgattgcaataattatccaaagaaaaacagccaagtgcagcagtaacgacagcctctgaactctctccacatcttcttgtggacagcctttgagctctctccatgtcttctccgggacagcctctgaactctctgcacgtcttcttgcagacagcctctgagctgtttccatgtcttctccgggacagtctctgagtttctgagctctttccacgtcttctccgggacagcctctgaactctctccacgtcttctctgggacatcctctgagctctccacgtcttctctgggacagcctctgagctctttccacgtcttctctgggacagcctctgagctgtctccacgtctcctccaggacagcctctgagctccctccacatcttctctgggtctcctgtggagtctgatcacctttcagttaaggcatctcctgtgagcagcccagttggctactctgagttctgggggtagctgtccttggtttctctgaattgcccagaaaccaacctttctgttgcccatcgtagtgcctacgtggcttagctggagccctaccctgcttttgttgcccaacaaatgcctatgtgacagagctaaattcccattcagctttaactgcttagttttagaaaacaggatgtctggggtcagaagttccttcttaggactaaactggctgaagctggcaaaatccgcaatggcagcttgacctctgaaaaacctctagcttcattatgatccaatttccatgctaaatgacactcccactggcaccttgacagttgacaatcaccatgacaatggccagaagagaccaaaaacaggcagaaaagaggtggctctttgattccaaaaaaacctacctcccttcccaagaaaagctatgaatatttctccctttcctctgtatacccagccccttcattaagaatcctcagttctcaggctctgagaagttgatttgcaggctatgctcccacttctgcaattccatggccattgaaaaaagcccacactgtttgatactcactctcggtttggtgtattggcttcacaccaaacaagaaagagctcctttaggggtagtcaggaccctgattatattcccacatagaaactgttcccactcactactggcacagcagaacacataaactgtcagatggctccatttcaatgatttgacttgtaattctcaattgtttctgttcctaagattttaggactttctatcaactcataaaaaaaatctttaaaaaggtaaggcaaccttcaaatctaagatgctcagctttaaactagtaagttcttaaggatgttttttttccttcaaggaaactattctcctctttgctgagcaataatacaggttttaatattaaataagtacacaaagtaaaagaaacagacaaaaatgtcttcatagcaaggctgttaacagatttctttcttttttttttatttttgagatggggtctcactctgttgcccaggcgggagtgcagtggcacaatctcagctcactgcaacctctgcctcctcagttcaagtgattctcctgcctcagcctcccaagttgctgggatcacaggtgcctgccatcacgcccggctaatttttttgtatttttagtagagacggggttttgccatgttggccaggctggtctcaaactgctgacctcaggtgatccgcccaccttggcctcccaaagtgctgggattacaggcatgagccaccgtgcctggccagatttctaatatacgtaaagaaaaaagaaaaattttcaaatatttgtttagataagtactgatatttaaaaaaacaaccaagcctaaatccctagatttacaatttttaaaaaataagaaaagcaatgtaattcacagaataaaatcttttggagtaaagtaatataactctaacaaattggtaaatctaggcaagaaatgacttgcccaagtaacagacctagtaggtggagagttcatctgactccagaaaccacactctacaaaataaacttattgacgtgaagaatgtatataatctgtaactggtgtgaaactgtggcagaaatacaaagagccgtggtcttgctcatgatgttcaaaggcaatatttgaactgagggatggctgtgtgaattgaagtggtcactggagaaacgtgtttgagattgtgaaccatggggaacagggggtggtaattctggattttcggcatagaggagaaagaaagaactgcaaacatcattacagtgaaggagggtgaggccctccgaaaactgattgcgtttcaccagaaacactgatccagtgggggcagctgaagcacgaaaatgattagaaccagagtgatgtcacccacttttctttctttctttctttttcttctttttttttgagacagagtctcgcagtctcgctctgtctcccaggctggagtgcagtggcgcgatctcggctcactgccagctccgcctcctggggtcacgtcattctcctgcctcaggctcccgagtagctgggaccacaggcgcccccaccatgtccggct

SEQ ID NO: 1883551 - DNA, 4001 bp, Homo sapiens
aattgtgttgcctcaaatttatgttgaagtcctcacctctagtacctcagaatggggctgtatttggaaagaggacctataaagaggtaattgaggtaaaattaggttatatgggtgggccctaatcagtaagactgatttccttgtaagacaaggagatgtggacagagaccacacacagaccacaggacaatcatgtgaggacacagtaagaaggtggccattggcaagggaaaagagagaggcctcagaagagaccaaatgtgctgattccttgaccttggacttccagcctccaaaactgtgagaaaagaaattttttatggctgcatagtattccatggtgtatatgtgccacattttcttaaaaatgatgagttcatgtcctttgtagggacatggatgaaattggaaatcatcattctcagtaaactatcacaagaacaaaaaaccaaacaccgcatattctcactcataggtgggaattgaacaatgagaacacatggacacaggaaggggaacatcacactctggggactgttgtggggtggggggaggggggagggatagcattgggagatatacctaatgctagatgacgagttagtgggtgcagcataccagcatggcacaggtatacatatgtaactaacctgcacattgtgcacatgtaccctaaaacttaaagtataataataataaataaacaaagaaagaaagaaagaaaaaaagaaatttatgttacttaagccactcagtctgtggtattttgttatggcagccctagtaaactaatacaaatatttttagggacaacaaaccatggactttgttattctagtaagatgactttagcactattacctacttctaccttgaagtggtaaaaaaaggcagtgagaagcatttccatggagtgtataaatcgtgtcccgtgaaacagaattagctaataaggttaacacctgtcagctgtatatgatgctgcgtctccaatctccatccggacagcaaaggggaaggcatggacaggagacctgccttcagaagagcagctgacaaaggggcccacagcctggggacggtgacggcagtagccccccgaggcctgggatcccacagcacaattgtgaagggaaagtcttacttgctgggcccagatgtgtaattttctcccaccactgtttttttttgtgaaaaattcttaaataaacatggtgttggacatttttctgactaggaagttaggatatttgcttttctagcatctttattagatgactttttatgtttgcaaagtcactcagaaaaaacttcatcctcccaacacctccctggaccacagtccccacaaatgacattgaactcacaacataaaggaactcaccactaggtaaataggtgcttgactgtgatttaacacctgaattactaaaattgattgcaataattatccaaagaaaaacagccaagtgcagcagtaacgacagcctctgaactctctccacatcttcttgtggacagcctttgagctctctccatgtcttctccgggacagcctctgaactctctgcacgtcttcttgcagacagcctctgagctgtttccatgtcttctccgggacagtctctgagtttctgagctctttccacgtcttctccgggacagcctctgaactctctccacgtcttctctgggacatcctctgagctctccacgtcttctctgggacagcctctgagctctttccacgtcttctctgggacagcctctgagctgtctccacgtctcctccaggacagcctctgagctccctccacatcttctctgggtctcctgtggagtctgatcacctttcagttaaggcatctcctgtgagcagcccagttggctactctgagttctgggggtagctgtccttggtttctctgaattgcccagaaaccaacctttctgttgcccatcgtagtgcctacgtggcttagctggagccctaccctgcttttgttgcccaacaaatgcctatgtgacagagctaaattcccattcagctttaactgcttagttttagaaaacaggatgtctggggtcagaagttccttcttaggactaaactggctgaagctggcaaaatccgcaatggcagcttgacctctgaaaaacctctagcttcattatgatccaatttccatgctaaatgacactcccactggcaccttgacagttgacaatcaccatgacaatggccagaagagaccaaaaacaggcagaaaagaggtggctctttgattccaaaaaaacctacctcccttcccaagaaaagctatgaatatttctccctttcctctgtatacccagccccttcattaagaatcctcagttctcaggctctgagaagttgatttgcaggctatgctcccacttctgcaattccatggccattgaaaaaagcccacactgtttgatactcactctcggtttggtgtattggcttcacaccaaacaagaaagagctcctttaggggtagtcaggaccctgattatattcccacatagaaactgttcccactcactactggcacagcagaacacataaactgtcagatggctccatttcaatgatttgacttgtaattctcaattgtttctgttcctaagattttaggactttctatcaactcataaaaaaaatctttaaaaaggtaaggcaaccttcaaatctaagatgctcagctttaaactagtaagttcttaaggatgttttttttccttcaaggaaactattctcctctttgctgagcaataatacaggttttaatattaaataagtacacaaagtaaaagaaacagacaaaaatgtcttcatagcaaggctgttaacagatttctttcttttttttttatttttgagatggggtctcactctgttgcccaggcgggagtgcagtggcacaatctcagctcactgcaacctctgcctcctcagttcaagtgattctcctgcctcagcctcccaagttgctgggatcacaggtgcctgccatcacgcccggctaatttttttgtatttttagtagagacggggttttgccatgttggccaggctggtctcaaactgctgacctcaggtgatccgcccaccttggcctcccaaagtgctgggattacaggcatgagccaccgtgcctggccagatttctaatatacgtaaagaaaaaagaaaaattttcaaatatttgtttagataagtactgatatttaaaaaaacaaccaagcctaaatccctagatttacaatttttaaaaaataagaaaagcaatgtaattcacagaataaaatcttttggagtaaagtaatataactctaacaaattggtaaatctaggcaagaaatgacttgcccaagtaacagacctagtaggtggagagttcatctgactccagaaaccacactctacaaaataaacttattgacgtgaagaatgtatataatctgtaactggtgtgaaactgtggcagaaatacaaagagccgtggtcttgctcatgatgttcaaaggcaatatttgaactgagggatggctgtgtgaattgaagtggtcactggagaaacgtgtttgagattgtgaaccatggggaacagggggtggtaattctggattttcggcatagaggagaaagaaagaactgcaaacatcattacagtgaaggagggtgaggccctccgaaaactgattgcgtttcaccagaaacactgatccagtgggggcagctgaagcacgaaaatgattagaaccagagtgatgtcacccacttttctttctttctttctttttcttctttttttttgagacagagtctcgcagtctcgctctgtctcccaggctggagtgcagtggcgcgatctcggctcactgccagctccgcctcctggggtcacgtcattctcctgcctcaggctcccgagtagctgggaccacaggcgcccccaccatgtccggct

SEQ ID NO: 1883552 - DNA, 4001 bp, Homo sapiens
catgtgaggacacagtaagaaggtggccattggcaagggaaggagagaggcctcagaagagaccaaatgtgctgattccttgatcttggacttccagcctccaaaactgtgagaaaagaaattttttatggctgcatagtattccatggtgtatatgtgccacattttcttaaaaatgatgagttcatgtcctttgtagggacatggatgaaattggaaatcatcattctcagtaaactatcgcaagaacaaaaaaccaaacaccacatattctcactcataggtgggaatcgaacagtgagaacacatggacataggaaggggaacatcacactctggggactgttgtggggtgggggaaggggggagggatagcattgggagatatacctaatgctagatgacgagttagtgggtgcagcacaccagcatggcacaggtatacatatgtaactaacctgcacattgtgcacatgtaccctaaaacttaaagtataataataataaataaacaaagaaagaaagaaagaaaaaaagaaatttatgttacttaagccactcagtctgtggtattttgttatggcagccctagtaaactaatacaaatatttttagggacaacaaaccatggactttgttattctagtaagatgactttagcactattacctacttctaccttgaagtggtaaaaaaaggcagtgagaagcatttccatggagtgtataaatcgtgtcccgtgaaacagaattagctaataaggttaacacctgtcagctgtatatgatgctgcgtctccaatctccatccggacaacaaaggggaaggcatggacaggagacctgccttcagaagagcagctgacaaaggggcccacagcctggggatggtgacggcagtagccccccgaggcctgggatcccacagcacaattgtgaagggaaagtcttacttgttgggcccagatgtgtaattttctcccaccactgtttttttgtgaaaaattcttctgaatacataattttgcccctaaataaacatggtgttggacatttttctgactaggaagttaggatatttgcttttctagcatctttattaggtgactttttatgtttgcaaagtcactcagaaaaaacttcatcctcccaacacctccctggaccacagtccccacaaatgacattgaactcacaacataaaggaactcaccactaggtaaataggtgcttgactgtgatttaacacctgaattactaaaattgatggcaataattatccaaagaaaaacagccaagtgcagcagtaacgacagcctctgaactctctccacatcttcttgtggacagcctttgagctctctccatgtcttctccgggacagcctctgaactctctgcacgtcttcttgcagacagcgtctgagctgtttccatgtcttctccgggacagtctctgagtttctgagctctttccacgtcttctccgggacagcctctgaactctctccacgtcttctctgggacagcctctgagctctctcttgtttgggacatcctctgagctctccacgtcttctctgggacagcctctgagctctttccacgtcttctccgggacagcctctgagctgtctccacgtctcctccaggacaacctctgagctccctccacatcttctctgggtctcctgtggagtctgatcacctttcagttaaggcatctcctgtgagcagcccagttggctactctgagttctgggggtagctgtccttggtttctctgaattgcccagaaaccaacctttctgttgcccatcgtagtgcctacgtggcttagctggagccctaccctgcttttgttgcccaaccaatgcctatgtgacagagctaaattcccattcagctttaactgcttagttttagaaaacaggatgtctggggtcagaagttccttcttaggactaaactggctgaagctggcaaaatccgcaatggcagcttgacctctgaaaaacctctagcttcattatgatccaatttccatgctaaacgacactcccactggcaccttgacagttgacaatcaccatgacaatggccagaagagaccaaaaacaggcagaaaagaggtggctctttgattccaaaaaaacctacctcccttcccaagaaaagctatgaatatttctccctttcctctgtataccagccccttcattaagaatcctcagttctcaggctctgagaagttgatttgcaggctatgctcccacttctgcaattccatggccattgaaaaaagcccacactgtttgatactcactcttggtttggtgtattggcttcacaccaaacaagaaagagctcctttaggggtagtcaggaccctgattatattcccacatagaaactgttcccactcactactggcacagcagaacacataaactgtcagatggctccatttcaatgatttgacttgtaattctcaattgtttctgttcctaagattttaggactttctatcaactcataaaaaaaatctttaaaaaggtaaggcaaccttcaaatctaagatgctcagctttaaactagtaagttcttaaggatgttttttttcctccaaggaaacaattctcctctttgctgagcaataatacaggttttaatattaaataagtacacaaagtaaaagaaacagacaaaaatgtcttcatagcaaggctgttaacagatttctttcttttttttttatttttgagatggggtctcactcttgcccaggcgggagtgcagtggcacaatctcagctcactgcaacctctgcctcctcagttcaagtgattctcctgcctcagcctcccaagttgctgggatcacaggtgcctgccatcacgcccggctaatttttttgtatttttagtagagacggggttttgccatgttggccaggctggtctcaaactgctgacctcaggtgatccgcccaccttggcctcccaaagtgctgggattacaggcatgagccaccgtgcctggccagatttctaatatacgtaaagaaaaaagaaaaattttcaaatacttgtttagataagtactgatatttaaaaaaacaaccaagcctaaatccctagatttacaatttttaaaaaataagaaaagcaatgtaattcacagaataaaatcttttggagtaaagtaatataactctaacaaattggtaaatctaggcaagaaatgacttgcccaagtaacagacctagtaggtggagagttcatctgactccagaaaccacactctacaaaataaacttattgacgtgaagaatgtatataatctgtaactggtgtgaaactgtggcagaaatacaaagagccgtggtcttgctcatgatgttcaaaggcaatagttgaactgagggatggctgtgtgaattgaagtggtcactggagaaacgtggttgagattgtgaaccatggggaacagggggtggtaattccggattttcggcatagaggagaaagaaagaactgcaaacatcattacagtgaaggagggtgaggccctccgaaaactgattgcttttcaccagaaacactgatccagtgggggcagctgaagcacgaaaatgattagaaccagagtgatgtcacccacttttctttctttctttctttctttttcttctttttttttgagacagagtcttacagtctcgctctgtctcccaggctggagtgcagtggcgcgatctcggctcactgcaagctccgcctcctggggtcacgtcattctcctgcctcaggctcccgagtagctgggaccacaggctcccccaccatgtccggcaaatttttttgtatttttagtagagagggggtttcaccgtgttagccaggatggtctcgatcccctgatcttgtgatctgcccgcctcgacctcccaaggtgctgagattacaggcgtgagccaccgtgcctggccgatgtcaccca

SEQ ID NO: 1883553 - DNA, 4001 bp, Homo sapiens
taagacaaggagatgtggacagagaccacacacagaccacaggacaatcatgtgaggacacagtaagaaggtggccattggcaagggaaaagagagaggcctcagaagagaccaaatgtgctgattccttgaccttggacttccagcctccaaaactgtgagaaaagaaattttttatggctgcatagtattccatggtgtatatgtgccacattttcttaaaaatgatgagttcatgtcctttgtagggacatggatgaaattggaaatcatcattctcagtaaactatcacaagaacaaaaaaccaaacaccgcatattctcactcataggtgggaattgaacaatgagaacacatggacacaggaaggggaacatcacactctggggactgttgtggggtggggggaggggggagggatagcattgggagatatacctaatgctagatgacgagttagtgggtgcagcataccagcatggcacaggtatacatatgtaactaacctgcacattgtgcacatgtaccctaaaacttaaagtataataataataaataaacaaagaaagaaagaaagaaaaaaagaaatttatgttacttaagccactcagtctgtggtattttgttatggcagccctagtaaactaatacaaatatttttagggacaacaaaccatggactttgttattctagtaagatgactttagcactattacctacttctaccttgaagtggtaaaaaaaggcagtgagaagcatttccatggagtgtataaatcgtgtcccgtgaaacagaattagctaataaggttaacacctgtcagctgtatatgatgctgcgtctccaatctccatccggacagcaaaggggaaggcatggacaggagacctgccttcagaagagcagctgacaaaggggcccacagcctggggacggtgacggcagtagccccccgaggcctgggatcccacagcacaattgtgaagggaaagtcttacttgctgggcccagatgtgtaattttctcccaccactgtttttttttgtgaaaaattcttaaataaacatggtgttggacatttttctgactaggaagttaggatatttgcttttctagcatctttattagatgactttttatgtttgcaaagtcactcagaaaaaacttcatcctcccaacacctccctggaccacagtccccacaaatgacattgaactcacaacataaaggaactcaccactaggtaaataggtgcttgactgtgatttaacacctgaattactaaaattgattgcaataattatccaaagaaaaacagccaagtgcagcagtaacgacagcctctgaactctctccacatcttcttgtggacagcctttgagctctctccatgtcttctccgggacagcctctgaactctctgcacgtcttcttgcagacagcctctgagctgtttccatgtcttctccgggacagtctctgagtttctgagctctttccacgtcttctccgggacagcctctgaactctctccacgtcttctctgggacatcctctgagctctccacgtcttctctgggacagcctctgagctctttccacgtcttctctgggacagcctctgagctgtctccacgtctcctccaggacagcctctgagctccctccacatcttctctgggtctcctgtggagtctgatcacctttcagttaaggcatctcctgtgagcagcccagttggctactctgagttctgggggtagctgtccttggtttctctgaattgcccagaaaccaacctttctgttgcccatcgtagtgcctacgtggcttagctggagccctaccctgcttttgttgcccaacaaatgcctatgtgacagagctaaattcccattcagctttaactgcttagttttagaaaacaggatgtctggggtcagaagttccttcttaggactaaactggctgaagctggcaaaatccgcaatggcagcttgacctctgaaaaacctctagcttcattatgatccaatttccatgctaaatgacactcccactggcaccttgacagttgacaatcaccatgacaatggccagaagagaccaaaaacaggcagaaaagaggtggctctttgattccaaaaaaacctacctcccttcccaagaaaagctatgaatatttctccctttcctctgtatacccagccccttcattaagaatcctcagttctcaggctctgagaagttgatttgcaggctatgctcccacttctgcaattccatggccattgaaaaaagcccacactgtttgatactcactctcggtttggtgtattggcttcacaccaaacaagaaagagctcctttaggggtagtcaggaccctgattatattcccacatagaaactgttcccactcactactggcacagcagaacacataaactgtcagatggctccatttcaatgatttgacttgtaattctcaattgtttctgttcctaagattttaggactttctatcaactcataaaaaaaatctttaaaaaggtaaggcaaccttcaaatctaagatgctcagctttaaactagtaagttcttaaggatgttttttttccttcaaggaaactattctcctctttgctgagcaataatacaggttttaatattaaataagtacacaaagtaaaagaaacagacaaaaatgtcttcatagcaaggctgttaacagatttctttcttttttttttatttttgagatggggtctcactctgttgcccaggcgggagtgcagtggcacaatctcagctcactgcaacctctgcctcctcagttcaagtgattctcctgcctcagcctcccaagttgctgggatcacaggtgcctgccatcacgcccggctaatttttttgtatttttagtagagacggggttttgccatgttggccaggctggtctcaaactgctgacctcaggtgatccgcccaccttggcctcccaaagtgctgggattacaggcatgagccaccgtgcctggccagatttctaatatacgtaaagaaaaaagaaaaattttcaaatatttgtttagataagtactgatatttaaaaaaacaaccaagcctaaatccctagatttacaatttttaaaaaataagaaaagcaatgtaattcacagaataaaatcttttggagtaaagtaatataactctaacaaattggtaaatctaggcaagaaatgacttgcccaagtaacagacctagtaggtggagagttcatctgactccagaaaccacactctacaaaataaacttattgacgtgaagaatgtatataatctgtaactggtgtgaaactgtggcagaaatacaaagagccgtggtcttgctcatgatgttcaaaggcaatatttgaactgagggatggctgtgtgaattgaagtggtcactggagaaacgtgtttgagattgtgaaccatggggaacagggggtggtaattctggattttcggcatagaggagaaagaaagaactgcaaacatcattacagtgaaggagggtgaggccctccgaaaactgattgcgtttcaccagaaacactgatccagtgggggcagctgaagcacgaaaatgattagaaccagagtgatgtcacccacttttctttctttctttctttttcttctttttttttgagacagagtctcgcagtctcgctctgtctcccaggctggagtgcagtggcgcgatctcggctcactgccagctccgcctcctggggtcacgtcattctcctgcctcaggctcccgagtagctgggaccacaggcgcccccaccatgtccggctaatttttttgtatttttagtagagagggggtttcaccgtgttagccaggatggtctcgatcccctgatctcgtgatctgcccgcctcgacctcccaaggtgctgagattacaggcgtgagccaccgtgcctggccgatgtcaccca

SEQ ID NO: 1883554 - DNA, 4001 bp, Homo sapiens; identical to SEQ ID NO: 1883550

SEQ ID NO: 1883555 - DNA, 4001 bp, Homo sapiens; identical to SEQ ID NO: 1883551

SEQ ID NO: 1883556 - DNA, 4001 bp, Homo sapiens
acaatcatgtgaggacacagtaagaaggtggccattggcaagggaaggagagaggcctcagaagagaccaaatgtgctgattccttgatcttggacttccagtctccaaaactgtgagaaaagaaattttttatggctgcatagtattccatggtgtatatgtgccacattttcttaaaaatgatgagttcatgtcctttgtagggacatggatgaaattggaaatcatcattctcagtaaactatcgcaagaacaaaaaaccaaacacctcatattctcactcataggtgggaattgaacaatgagaacacatggacacaggaaggggaacatcacactctggggactgttgtggggtggggggaggggggagggatagcattgggagatatacctaatgctagatgacgagttagtgggtgcagcacaccagcatggcacaggtatacatatgtaactaacctgcacattgtgcacatgtaccctaaaacttaaagtataataataataaataaagaaagaaagaaagaaaaaaagaaatttatgttacttaagccactcagtctgtggtattttgttatggcagccctagtaaactaatacaaatatttttagggacaacaaaccatggactttgttattctagtaagatgactttagcactattacctacttctaccttgaagtggtaaaaaaaggcagtgagaagcatttccatggaatgtataaatcgtgtcccgtgaaacagaattagctaataaggttaacacctgtcagctgtatatgatgctgcgtctccaatctccatccggacagcaaaggggaaggcatggacaggagacctgccttcagaagagcacctgacaaaggggcccacagcctggggacggtgacggcagtagccccccgaggcctgggatcccacagcacaattgtgaagggaaagtcttacttgctgggcccagatgtgtaattttctcccaccactggttttttgtgaaaaattcttctgaatacgtaattttgcccctaaataaacatggtgttggacatttttctgactaggaagttaggatatttgcttttctagcatctttattagatgactttttatgtttgcaaagtcactcagaaaaaacttcatcctcccaacacctccctggaccacagtccccacaaatgacattgaactcacaacataaaggaactcaccactaggtaaataggtgcttgactgtgatttaacacctgaattactaaaattgattgcaataattatccaaagaaaaacagccaagtgcaacagtaacgacagcctctgaactctctccacatcttcttgtggacagcctttgagctctctccatgtcttctctgggacagcctctgaactctctgcacgtcttcttgcagacagcctctgagctgtttccatgtcttctccgggacagtctctgagtctctgagctctttccacgtcttctccaggacagcctctgaactctctccacgtcttctctgggacagcctctgagctctctcttgtttgggacatcctctgagctctccacgtcttctctgggacagcctctgagctctttccacgtcttctccgggacagcctctgaactgtctccacgtctcctccaggacagcctctgagctccctccacatcttctctgggtctcctgtggagtctgatcacctttcagttaaggcatctcctgtgagcaacccagttggctactctgagttctgggggtagctgtccttggtttctctgaattgcccagaaaccaacctttctgttgcccatcgtagtgcctacgtggcttagctggagccctaccctgcttttgttgcccaaccaatgcctatgtgacagggctaaattcccattcagctttaactgcttagttttagaaaacaggatgtctggggtcagaagttccttcttaggactaaactggctgaagctggcaaaatccgcaatggcagcttgacctctgaaaaacctctagcttcattatgatccaatttccatgctaaatgacactcccactggcaccttgacagttgacaatcaccatgacaatggccagaagagaccaaaaacaggcagaaaagaggtggctctttgattccaaaaaaacctacctcccttcccaagaaaagctatgaatatttctccctttcctctgtatacccagccccttcattaagaatcctcagttctcaggctctgagaagttgatttgcaggctatgctcccacttctgcaattccatggccattgaaaaaagcccacactgtttgatactcactctcggtttggtgtattggcttcacaccaaacaagaaagagctcctttaggggtagtcaggaccctgattatattcccacatagaaactgttcccactcactactggcacagcagaacacataaactgtcagatggctccatttcaatgatttgacttgtaattctcaattgtttctgttcctaagattttaggactttctatcaactcataaaaaaaattttaaaaaggtaaggcaaccttcaaatctaagatgctcagctttaaactagtaagttcttaaggatgttttttttcctccaaggaaacaattctcctctttgctgagcaataatacaggttttaatattaaataagtacacaaagtaaaagaaacagacaaaaatgtcttcatagcaaggctgttaacagatttctttctttttttttatttttgagatggggtctcactctgttgcccaggcgggagtgcagtggcacaatctcagctcactgcaacctctgcctcctcagttcaagtgattctcctgccccagcctcccaagttgctgggatcacaggtgcctgccatcacgcccggctaatttttttgtatttttagtagagacggggttttgccatgttggccaggctggtctcaaactgctgacctcaggtgatccacccaccttggcctcccaaagtgctgggattacaggcatgagccaccgtgcctggccagatttctaatatatgtaaagaaaaaagaaaaattttcaaatacttgtttagataagtactgatatttaaaaaaacaaccaagcctaaatccctagatttacaatttttaaaaaataagaaaagcaatgtaattcacagaataaaatcttttggagtaaagtaatataactctaacaaattggtaaatctaggcaagaaatgacttgcccaagtaacagacctagtaggtggagagctcatctgactccagaaaccacactctacaaaataaacttattgacgtgaagtatgtatataatctgtaactggtgtgaaactgtggcagaaatacaaagagccgtggtcttgctcatgatgttcaaaggcaatatttgaactgagggatggctgtgtgaattgaagtggtcactggagaaacgtggttgagattgtgaaccatggggaacagggggtggtaattctggatttttggcatagaggagaaagaaagaactgcaaacatcattacagtgaaggagggtgaggccctccgaaaactgattgcgtttcaccagaaacactgatccagtgggggcagctgaagcacgaaaatgattagaaccagagtgatgtcacccacgtttctttctttttcttcttttttttttgagacagagtctcgcagtctcgctctgtctcccaggctggagtgcagtggcgccatctcggctcactgcaagctccgcctcctggggtcacgtcattctcctgcctcaggctcccgagtagctgggaccacaggtgcccccaccatgtcctgctaatttttttgtatttttagtggagagggggtttcaccgtgttagccaggatggtctcgatcccctgatctcgtgatctgtccgcctcgacctcccaaggtgctgagattacaggcgtgagccaccgtgcctggccgatgtcacccacgtttctta

SEQ ID NO: 1883557 - DNA, 4001 bp, Homo sapiens
cctcaggagtgaggtagtacaggaagtctgtgcacaggcagatctgctggtgctgttacactatgagggcactgagctccaagatggtggcaatatattcactgggattcctgcacggtgaggttggagagaggaagcatctccataacacatatgaaaccctggaagcacttcccagccagaaattcaggaccacgttatatgcagatatgggtgccctctgagcacacttgtctctctgtctcccactctgagctgcctcctggccccacatgccccagcctggcccagggcttagcccagtgggtgttcagtccatggtgttgactgctccctgggccaggagagcccttggtggctctgtgactcctcctgtggaacccctacctctgccttgggacctcccaattcccatggaagcccccacagctctggattgccccacctgccctgtgatcctccagccccataggccttactcgatgccttagccctcccagaacatgacacgtttctctgaatgtggctgatgtccagggccatctgtagatgtttgctggggacctcttgctgttttcctttatggtctgtaggccagggccaagaggagaaaccagcctaatctcagaatggacaaaaggctcactgccctaacagcaaccaccaaacagtcagcagtgcttctggatggaaaagaggtttcattctgcagaaagctccttgtttggcttctttctgaagccaggaaggggtaccaaacccagcttacctgcggtgcctacgttagcatctgtgcctaggatgcatgatgggctcccactgcagggttgacattccctccagctggagacctgggctcctgacaccacctggcgtgtttgtcctgctctggatgacggtggaaaggctgtatctggtattttcctaggtccttggttttcaccttctagacatccagcaggagtgaccatacccagccccacacctgaaatgggactcccttgtagagcacctgagacctctacagacagaagagtgctctggtgagacaggccacagaggtccccgggggggggggggatcaggggctggaggattctggaggtttccagccttgggctctgtggttcctcaaagagtttaggtttacctaggactaggcctcccctcccatgattcaaagagtgggtgagtgctatgcatcacgaactctgatctggacctattttttcatttaggtcaccaagagacaacccctaacccccaagctagggatggtccaagctctggcatgagattctcttccagcaatgtgatgcttgcagggacagggagaaaagccggtgaccaggcctgctgtcccccaggtaaggacagtgtgctacccaccctctgagaggcaggtggtgccaggtcactgcactgggtccctgtacccctggctctgcagacaccagtcatggaggtcctcccctctccacattaccttcttgctactcccagatttcttctggtcattaagcactttgagccatttttctgtgcagccgatctgatatttttgctatcagatgaaacatgacaaagtaagccgagccaccaggattcctggagggaaccttggatgctgcgtcttgggatccagagccctgatgggactgaaccagaaggagccagggaaggacaaacactggggctcaggccctatgacccaacggccattggtggcctgtcctcatggccccaagacaccctgtcctcaggccacagacaccatgggctttggtcaggtcccagcctcccagtagtgccctggcactggtgggtgctgacccccaaaccacaatagcagttctgggttatgggtttggtaaaaccacctcagggagaattctggggttgggtttggcaggaaccacggggcctcccaggaatgatgtgtcactcctacttgccacaaaatgtgcacagaggctatcccactgaccagcccatcctgctggacaggatggaggaaatcagggaaaaggcagggtggacatctggggtgcagggagaggcaggtgcatgctgggaggtcaggccctgcgagggctgtgggggcatcaggtggggtgggctccaggtgcaccctcaatgcactgggtgggtctcaggccaggctccctggaccctggttggctgatgtggtcactccctgggggactgctgtcaagccctggccacccaccctgggcagcaccgtcccatcccaagaccggattttctgagtcctgagacaggacagtgctgtccaggcctgacagactgggaggacctgccaagtcctccatccctagaccagcctcccacacagcagggacagtctcttccatttaccttcagggcactgactgatccatgtcactctaaggcaaccaaggcagagctgaggacctgtgccaggctgggagccagtcccctccctaaatgggcctgaggaaagcaccatccctgtcccaatgcgccccaagttttagcccaggagacacatagggaagggaggacggagcctctctgctggctgacacttgaaaagcgggacctgggagtagagggagcgcagggctggcagggatgctccaggcccatggagagcttaggctgcaccaaggggctgcccctcctgggctggaggctgtgccctctgcaggatctgagaaagtccagtcctgagatgggacagtgctgccaagggtgggtggctaggcctgacagcagtcccccagggagtgaccacatcacccgaccagggtccagagagcctggaccgagacctgcccagtgcacactgagagtgcacctggagcccaccccacctgacgcccccacagccctcacagggtccgacctcccagcatgcacctgcctctccctgcacccctactgcccaccctgcctgttccctggcttcctccatcctgtgcagcccatagactgttaccatctctctagccactctggcccttcctttacctttgttctttcagaatctctgagcaagatctcccaggtccatccaaacacctgctttgtccacttttgactgggccattggacaccactgggccatcccagctgtccatagggcccctgataacatgcatttcccctgacacctcccagcagtgctcagcagccccactgaccaggtccctgctgaccagatcccgcacatcaggtcctccctgaccacactctcactgattaggcccccatcaccaggccccactaactagattcccgctgccaggcccacagtgtccaggaccccactgacaaggacctcactgacaaggcctcactgaccagggcctcactgacaaggcctccctgaccacattccaccaatcatgaccccattgcctggccccacagatgaagccccactgaccaggtctccagggaacaggctgccagtgaccaggtccctactaaccaggcctgcggtgaccagatgccccgaccaggaacctagtgactaggcaccactgaacaggcatgtaccgctcagacccccgttgaccaggtcaccccatagaccagtgctacaaaagccaccactgatcaagtcctctctgaccaggcccccactgattaggttccactgacctgaccaggctgccatgaccagggtcccactgacaagggtctcactgatgaggacatgccctgctgactaggtgccatgtgaccaggcctccactgaatagcaccccttgaccgggtcaccagtgacccagcccattctgacaaggctaccactaagccacagctgaccaggtctccactcaccaagccctgcagcccaggtttgcactgaccagacaccaaacatttgtctgccactaggtccccactcaccaagacctgcactactcgatccctctaatgagaccctctctaagcagaccctggctgaccattcccccagtaaataggcctcactgaccaagtcccaa

SEQ ID NO: 1883558 - DNA, 4001 bp, Homo sapiens
cctcaggagtgaggtagtacaggaagtctgtgcacaggcagatctgctggtgctgttacactatgagggcactgagctccaagatggtggcaatatattcactgggattcctgcacggtgaggttggagagaggaagcatctccataacacatatgaaaccctggaagcacttcccagccagaaattcaggaccacgttatatgcagatatgggtgccctctgagcacacttgtctctctgtctcccactctgagctgcctcctggccccacatgccccagcctggcccagggcttagcccagtgggtgttcagtccatggtgttgactgctccctgggccaggagagcccttggtggctctgtgactcctcctgtggaacccctacctctgccttgggacctcccaattcccatggaagcccccacagctctggattgccccacctgccctgtgatcctccagccccataggccttactcgatgccttagccctcccagaacatgacacgtttctctgaatgtggctgatgtccagggccatctgtagatgtttgctggggacctcttgctgttttcctttatggtctgtaggccagggccaagaggagaaaccagcccaatctcagaatggacaaaaggctcactgccctaacagcaaccaccaaacagtcagcagtgcttctggatggaaaagaggtttcattctgcagaaagctccttgtttggcttctttctgaagccaggaaggggtaccaaacccagcttacctgcggtgcctacgttagcatctgtgcctaggatgcatgatgggctcccactgcagggttgacattccctccagctggagacctgggctcctgacaccacctggcgtgtttgtcctgctctggatgacggtggaaaggctgtatctggtattttcctaggtccttggttttcaccttctagacatccagcaggagtgaccatacccagccccacacctgaaatgggactcccttgtagagcacctgagacctctacagacagaagagtgctctggtgagacaggccacagaggtccccgggggggggtgggatcaggggctggaggattctggaggtttccagccttgggctctgtggttcctcaaagagtttaggtttacctaggactaggcctcccctcccatgcttcaaagagtgggtgagtgctatgcatcacgaactctgatctggacctattttttcatttaggtcaccaagagacaacccctaacccccaagctagggatggtccaagctctggcatgagattctcttccagcaatgtgatgcttgcagggacagggagaaaagccggtgaccaggcctgctgtcccccaggtaaggacagtgtgctacccaccctctgagaggcaggtggtgccagctcactgcactgggtgcctgtacccctggctctgcagacaccggtcatggaggtcctcccctctccacattaccttcttgctgctcccagatttcttctggtcattaagcactttgagccatttttctgtgcagccgatctgatatttttgctatcagatgaaacatgacaaagtaagccgagccaccaggattcctggagggaaccttggatgctgcgtcttgggatccagagccctgatgggactgaaccagaaggagccagggaaggacaaacactggggctcaggccctatgacccaacggccattggtggcctgtcctcatggccccaagacaccctgtcctcaggccacagacaccatgggctttggtcaggtcccagcctcccagtagtgccctggcactggtgggtgctgacctccaaaccacaatagcagttctgggttatgggtttggtaaaaccacctcagggagaattctggggttgggtttggcaggaaccacggggcctcccaggaatgatgtgtcactcctacttgccacaaaatgtgcacagaggctatcccactgaccagcccatcctgctggacaggatggaggaaatcagggaaaaagcagggtggacatctggggtgcagggagaggcaggtgcatgctgggaggtcagaccctgcgagggctgtgggggcatcaggtggggtgggctccaggtgcaccctcaatgcactgggtgggtctcaggccaggctccctggaccctggttggctgatgtggtcactccctgggggactgctgtcaagccctggccacccaccctgggcagcaccattccatcccaagaccggattttctgagtcctgagacaggacagtgctgtccaggcctgacagactgggaggacctgccaagtcctccatccctagaccagcctcccacacagcagggacagtctcttccatttaccttcagggcactgactgatccatgtcactctaaggcaaccaaggcagagctgaggacctgtgccaggctgggagccagtcccctccctaaatgggcctgaggaaagcaccatccctgtcccaatgcgccccaagttttagcccaggagacacaaagggaagggaggacggagcctctctgctggctgacacttgaaaagcgggacctgggagtagagggagcgcagggctggcagggatgctccaggcccatggagagcttgggctgcaccaaggggctgcccctcctgggctggaggctgtgccctctgcaggatctgagaaagtccagtcctgagatgggacagtgctgccaagggtgggtggctaggcctgacagcagtcccccagggagtgaccacatcacccgaccagggtccagagagcctggaccgagacctgcccagtgcacactgagagtgcacctggagcccaccccacctgacgcccccacagccctcacagggtccgacctcccagcatgcacctgcctctccctgcacccctactgcccaccctgcctgttccctggcttcctccatcctgtgcagcccatagactgtgaccatctctctacccactctggcccttcctttacctttgttctttcagaatctctgagcaagatctcccaggtccatccaaacacctgctttgtccacttttgactgggccactggacaccactgggccatcccagctgtccatagggcccctgataacatgcatttcccctgacacctcccagcagtgctcagcagccccactgaccaggtccctgctgaccagatcccgcacatcaggtcctccctgaccacactctcactgattaggcccccatcaccaggccccactaactagattcccgctgccaggcccacagtgtccaggaccccactgacaaggatttcactgacaaggcctcactgaccagggcctcactgacaagacctccctgaccacattccaccaatcatgaccccattgcctggccccacagatgaagccccactgaccaggtctccagggaacaggctgccagtgaccaggtccctactaaccaggcctgcggtgaccagatgccccgaccaggaacctagtgactaggcaccactgaacaggcatgtaccgctcagacccccgttgaccaggtcaccccatagaccagtgctacaaaagccaccactgatcaagtcctctctgaccaggcccccactgattaggttccactgacctgaccaggctgccatgaccagggtcccactgacaacggcctcactgatgaggacatgccctgctgactaggtgccatgtgaccaggcctccactgaatagcaccccttgaccgggtcaccagtgacccagcccattctgacaaggctaccactaagccacagctgaccaggtctccactcaccaagccctgcagcccaggtttgcactgaccagacaccaaacatttgtctgccactaggtccccactcaccaagacctgcactactcgatccctctaatgagaccctctctaagcagaccctggctgaccattcccccagtaaataggcctcactgaccaagtcccaa

SEQ ID NO: 1883559 - DNA, 4001 bp, Homo sapiens
ccctcaggagtgaggtagtacaggaagtctgtgcacaggcagatctgctggtgctgttacactatgagggcactgagctccaagatggtggcaatatattcactgggattcctgcacggtgaggttggagagaggaagcatctccataacacatatgaaaccctggaagcacttcccagccagaaattcaggaccacgttatatgcagatatgggtgccctctgagcacacttgtctctgtctcccactctgagctgcctcctggccccacatgccccagcctggcccagggcttagcccagtgggtgttcagtccatggtgttgactgctccctgggccaggagagcccttggtggctctgtgactcctcctgtggaacccctacctctgccttgggacctcccaattcccatggaagcccccacagctctggattgccccacctgccctgtgatcctccagccccataggccttactcgatgccttagccctcccagaacatgacacgtttctctgaatgtggctgatgtccagggccatctgtagatgtttgctggggacctcttgctgttttcctttatggtctgtaggccagggccaagaggagaaaccagcctaatctcagaatggacaaaaggctcactgccctaacagcaaccaccaaacagtcagcagtgcttctggatggaaaagaggtttcattctgcagaaagctccttgtttggcttctttctgaagccaggaaggggtaccaaacccagcttacctgcggtgcctacgttagcatctgtgcctaggatgcatgatgggctcccactgcagggttgacattccctccagctggagacctgggctcctgacaccacctggcgtgtttgtcctgctctggatgacggtggaaaggctgtatctggtattttcctaggtccttggttttcaccttctagacatccagcaggagtgaccatacccagccccacacctgaaatgggactcccttgtagagcacctgagacctctacagacagaagagtgctctggtgagacaggccacagaggtccccgggggggggggggatcaggggctggaggattctggaggtttccagccttgggctctgtggttcctcaaagagtttaggtttacctaggactaggcctcccctcccatgattcaaagagtgggtgagtgctatgcatcacgaactctgatctggacctattttttcatttaggtcaccaagagacaacccctaacccccaagctagggatggtccaagctctggcatgagattctcttccagcaatgtgatgcttgcagggacagggagaaaagccggtgaccaggcctgctgtcccccaggtaaggacagtgtgctacccaccctctgagaggcaggtggtgccaggtcactgcactgggtccctgtacccctggctctgcagacaccagtcatggaggtcctcccctctccacattaccttcttgctactcccagatttcttctggtcattaagcactttgagccatttttctgtgcagccgatctgatatttttgctatcagatgaaacatgacaaagtaagccgagccaccaggattcctggagggaaccttggatgctgcgtcttgggatccagagccctgatgggactgaaccagaaggagccagggaaggacaaacactggggctcaggccctatgacccaacggccattggtggcctgtcctcatggccccaagacaccctgtcctcaggccacagacaccatgggctttggtcaggtcccagcctcccagtagtgccctggcactggtgggtgctgacccccaaaccacaatagcagttctgggttatgggtttggtaaaaccacctcagggagaattctggggttgggtttggcaggaaccacggggcctcccaggaatgatgtgtcactcctacttgccacaaaatgtgcacagaggctatcccactgaccagcccatcctgctggacaggatggaggaaatcagggaaaaggcagggtggacatctggggtgcagggagaggcaggtgcatgctgggaggtcagaccctgcgagggctgtgggggcatcaggtggggtgggctccaggtgcaccctcaatgcactgggtgggtctcaggccaggctccctggaccctggttggctgatgtggtcactccctgggggactgctgtcaagccctggccacccaccctgggcagcaccgtcccatcccaagaccggattttctgagtcctgagacaggacagtgctgtccaggcctgacagactgggaggacctgccaagtcctccatccctagaccagcctcccacacagcagggacagtctcttccatttaccttcagggcactgactgatccatgtcactctaaggcaaccaaggcagagctgaggacctgtgccaggctgggagccagtcccctccctaaatgggcctgaggaaagcaccatccctgtcccaatgcgccccaagttttagcccaggagacacatagggaagggaggacggagcctctctgctggctgacacttgaaaagcgggacctgggagtagagggagcgcagggctggcagggatgctccaggcccatggagagcttgggctgcaccaaggggctgcccctcctgggctggaggctgtgccctctgcaggatctgagaaagtccagtcctgagatgggacagtgctgccaagggtgggtggctaggcctgacagcagtcccccagggagtgaccacatcacccgaccagggtccagagagcctggaccgagacctgcccagtgcacactgagagtgcacctggagcccaccccacctgacgcccccacagccctcacagggtccgacctcccagcatgcacctgcctctccctgcacccctactgcccaccctgcctgttccctggcttcctccatcctgtgcagcccatagactgttaccatctctctagccactctggcccttcctttacctttgttctttcagaatctctgagcaagatctcccaggtccatccaaacacctgctttgtccacttttgactgggccattggacaccactgggccatcccagctgtccatagggcccctgataacatgcatttcccctgacacctcccagcagtgctcagcagccccactgaccaggtccctgctgaccagatcccgcacatcaggtcctccctgaccacactctcactgattaggcccccatcaccaggccccactaactagattcccgctgccaggcccacagtgtccaggaccccactgacaaggacctcactgacaaggcctcactgaccagggcctcactgacaagacctccctgaccacattccaccaatcatgaccccattgcctggccccacagatgaagccccactgaccaggtctccagggaacaggctgccagtgaccaggtccctactaaccaggcctgaggtgaccagatgccccgaccaggaacctagtgactaggcaccactgaacaggcatgtaccgctcagacccccgttgaccaggtcaccccatagaccagtgctacaaaagccaccactgatcaagtcctctctgaccaggcccccactgattaggttccactgacctgaccaggctgccatgaccagggtcccactgacaagggtctcactgatgaggacatgccctgctgactaggtgccatgtgaccaggcctccactgaatagcaccccttgaccgggtcaccagtgacccagcccattctgacaaggctaccactaagccacagctgaccaggtctccactcaccaagccctgcagcccaggtttgcactgaccagacaccaaacatttgtctgccactaggtccccactcaccaagacctgcactactcgatccctctaatgagaccctctctaagcagaccctggctgaccattcccccagtaaataggcctcactgaccaagtcccaac

SEQ ID NO: 1883560 - DNA, 4001 bp, Homo sapiens
ggtggaaaggctgtatctggcattttcctaggtccttagtttccaccttctagacatccagcaggagtgaccatgcccagccccacacctgaaatgggactcccttgtagagcagctgagacatctacagacagaagagtgctctggtgagacaggccacaggggtccccagggagggttgggggccagaagattctgaaggcttccagtcttgggctctgtggttcctcaaagaggttaggtttaactaaaaccaggcctcccctcccacgattcaaagagtgggtgagtgctctgcgtcaggaactctgatctggacctattttttcatttaggtcaccaagagacaacccctaacccccaagctagggatggtgcaagctctggcatgagattttcttctagcaacgtgatgcttacagggacaggtagaaaagctggtgatcaggcctgctgtcctccgggtaaagacagtgggccacccacgctctgagaggccggtggtgccaggccacaacactgggtgcctgtacccctggctctgcagacaccggtcatggaggccctcccctctccatattaccctcttgctgctcctatatttcttctagttattaaacaatttgggccatttttctgtgcatccgatctgacatttttgctctcagatgaaacatgataaaggaagccaagccgccagtattcctggaggggaccttgggtgctgggtcttgggctccagggccctaatgggactgaaccagaaggagccagggaagggcaaacactggggctgaggccctaggacccaatggccattggtggccgggacttatggccccaacacaccctgtcctcaggccacagacaccatgggcttcggtcaggtcccagcctcccagtagtgtcctggtactagcaggtgctgacccctgagccacaagcacaattctgggttttgggttttggtaaaaccacctcagggacagagttctggggttgggtttggcaggaaccatggtgcctcccagggatggtgtgtcactcctacttgccacaaaatgtgcacacaggctgtcccactgtccagcccatcctgctggacaggatggaggaagtcagggaacaggtagggtggacatctggggtgcagggaggggcaggtgcatgctgggaggtcagaccctgcgagggctgtgggggcatcaggcggagtgggctccaggtgcaccctcaatgcactgggcaggtctcaggccaggctccctggaccccggctgggtgatgtggtcactccctgggggactgctgtcaggccctggccacccaccctgggcagcaccgtcctatctcaggactggaatttctgcagtctgagacaggacagtactgtccaggcctgacagactgggaggacccgttaagtcctccatccctagaccagcctcccacacagcaaggacagtctcttagctctaccttcagggcactgactgatcctgctcactctgaggcaaccaaggcagagctgaggacctgtgccaaggctgggagccagtcccctccctaaatgggcctgagggaagcaccatccctgtcccagtccactgcaagcttcagcccaggagacacatagggaagggaggacggagcccctctgcttcctgacactgcaaaagcgggacccaggagaagagggagtacagggctggcaggggacactccaggccaatggagagctccagctgcaccatggggctgcccctcctgggctggaggctgtgccctctgcaggatctgagaaagtccagtcctgagatgggacagtgctgcccatggtgggtgcccggtgcctgacagcagtcccccagggagtgaccacatcacccagccggggtccagggagcctggcctgagacctgcccagtgcattgagggtgcacctggagcccactgcgcctgatgcccccacagccctcacagggtctgacctcccagcatgcacctgcctctccctgcaccctgctgcccaccctgcctgttccctggcttcctccatcctgtgcagcccatagactgtgaccatctatctggccactgtggcccttcctttccctttgtcctgttggaatctctgagcaagatctcccaggtccatcgaaacacctgctttgtccagttttgactgggtctttgggcactactgggccatcccaactgtccacagggccctcaataacgtgcattgcacctgacatctcccagcagtgctcagcagcccctgctgaccaggtccaggtccctgctggccatatcccacacatcaggtcctccctgaccacactctcactgattagaaccccatgaccaggccccactaaccaggcccttgctgctaggccaacagtgtccaggaccccactgaccaggaccttactgaccagggcctcactgaccaggttcttactgaccagggcctcactgaccaggttccactgatcatgaccccattgcctggcaccatagatgaggccccactgaccaggcctccagggaacaggctgccactgaccaggcccctattaaccaggccataggtgacaagatgcccctgactgtgaccctagtgagtaggccccactgaataggcacccactgctcagatccctgctgaccaggtcaccccacagaccactgctacaagagccaccactgaatgcgctctctctgaacaggccgccactgattaggttccactgaccaggctgcgctgaccagggccccactgacaagggcctcactgatgaggacatggccagcaggccctgctgactgggtcccatgtgaccaggcctccaatgaatagcaccccttgagctggtcaccagtgacccggcccatgctgacaaggccaccactaagccccagctgaccaggtctccattgacaaagtcctgcagcctagttttacactgaccagacaccaaacaagtggctgccactaggtccccactcaccaagaccccactactagatccccctaatgagaccctctctaagcagacccctgctgaccacaccccccaataaataggcctcactgaccaagtcccagctgactaggtccactgatgaggcccacactgatcagggccctcataaccataccagaaggacaagcgacaatgagatatttcatatggcaggagtaggagcaagacagagagagaaaggaggtgccacatcctgttatacaaccagatctcatgagaactcactatcaggagatcagcatcaagaagattaaccactggtgaaggaaacaccacccacaccaccacccactgtttgcaggcagaagcctcctgcagaggcagagcctcttgggaaacttctaccatggcagtgcagaagggaaacatgggcttggagccccgacacaggaggtcaccatcctccagaccccagattcataagcccaccaacagttcacatcctcagtatggaaaagctacaggcactccacaccagcctagcccatgagagcagacatgggggctgaagcctgcaaagctgcaggtgcactgccctagcagaggtttcccatgagcctctgcctctgaagcagactactcccccttcctactacccaccaccctcccaccaccctactgccaacctacttcccaccctacccaccccttttccttccaaccccaaacccctcctgccatgattacatcacctcccaccaggccccacctccaacattaaggagtacattccacaggagttttggtaaagaaacacagccaaaccatattattctgaccctggtaccccagaatctcatgtccttctcacagagcaaaatacattcatgccttgtcaaaagtttccaaaagtcttaactcattccagcattaactcaaatgtaaaaagttcaacatctcatctgagacaagtctacagtcccttgcacctatgagtccctgaattta

SEQ ID NO: 1883561 - DNA, 4001 bp, Homo sapiens
ataataatgtaaaattaaatttaaattgtaaataacgtccagatactagttgtttcctggctcaaattctttagcacatatggtgctagcataagcttgtgcctgtctgcctactctgggtaattttgcatgcaaatagttttagtgcctatgttgaggtgctaaaacgtgtttagtacacttgaaaatatttgcattgcaaaaggagagcgaatctcctgaggaaaatcaaattgatattttgtattaagagaccactttggacactgcgtggtattctgctagggagaattctgtttacagtgcagctagcatttttaattgacctttagaaaagaaggtctggcttcagctttgccaggtttataaaccgttggaccatcttctggcagcattcaccacattaatcagtcaagagagaaagagaaggaaagaatctccttgccttggctggactgtagtgtttcatgcctcaatttggtggattggtaggataaatatgttaattataattaaaagtttcagctggaatgtgcctaactaattagctaactaactaaccagctaactaaggaaaggctttagtacagtggagcggtggtgggtgctgggtgtgaggccccacacactcttccatttgcctcactcccatctgctgcatttatgggaaccagttcgttaagagtctgaattgaatccaaataaaatgcatttctgatgcaagcccgatgactggtgccattctccgctgcattatgtcaaattagagtttgtttggaaaagaggttacagggatcctacgtaaatgtcgcttgcgcagaacatcgatcaaataagagttatgcacaaatttgccatctaattcctataaataaattgagcacctccctccttgattttgctcctattcaccatgagtgattaaaaaattagcactcctaataataaataaaattcaagaggcaagctagtaagaggtttgtggaacttttcttataacagttatttcaaagtttttagataattttattacaagaaccagttcaggtgtagtatatccctataaaatgaaagtaagttcaaggtccgtaagagaaacagatgatactaggtctacaagaggaattcaaatgtgagacccctctgtctgcaactccctcctctgtcgagaaatgatgccagatggaatcctgataactcccattgttaaagcagctctatcgctttcagcccaagcaccatgcaagagttactactatagatgcttctattggctaaaacgtgctgcaggatccagatttttctgcatattttactccttcgtgcttaatattctttcatccctgccacttctcacagtgtgcaaggtgcagtattttgtgtcaatgaatagccagagacaggtagcaggcaagagccaaaaggaactcattatgaatacaaaccagtaaggaggagctgacttactgtgctactgaaactttgcttgcaatctagttcctttaaaacaatcttaaaaaaaaaaaaaaaaaagcctccgttgtctgtgggatcctagcacatcaatcaatccattaagtaagtaaataaggcaataactaaacaataaatcattttgaatttcacgcatgcacaaatcttttgatacataaatgacaaggtttaggttcggaggctaccacctctgttccagtagttatcatacaagataaagagttgtttttaaactgtggtgcattgctcattctggtccccacatgatggggcttctttcaccccttgggtggtggtgtgtgtatgatgcacggcctgggagttgtttgtgtgtgtgtgtggtgtgtagcgggggccatgctgttagggggaagcctaccacacatttctgccatcgcagacggtgggcaaacagctgtctccacagctgagaccactggagctgcttgcgctgctccagtaactcgagagcacacggctggtccctggatggcacagagcactgtgcctgcagcaaagtgcctgagctttcctggggctgagcgggcggggtctttgccaccagacacaataagcatgtgaaatggggttcatgaattattcatccttggtgtcctatgaaacaaagaaatgatatgtttgctggtagataactgtgttgtggcatttgtaaatctttttgaatttggagttgatcatgtttcttgtgttggtggggaaatgtgtgtgtgtgtgtgtgtgcgtgcgtgtgtgtgcgtgtgtgttttttccctaaaataaaaatttgggagttcaacacaataatcttacagcaaaggtcttccatgaaatattgcatggattatactattttggctcatgatttacggattttaaaaatctcattcagtgaaaagggatgttaaaatggtttcactgcaataaactacagcaagataccaggttctcaaggagtttatttttctccttagtaggcatccagcccacttttgttaatgcaagtttcattactgtggactagagaacagtggtgccttcagcatgacactacagcatcgggaggaatgattcttcactttcactaaaatattagtaaaaatgatactttggcgaattgagccctaaattgtgttagtgacagttaaatacccactaatttaacaccagttaaactggcaataaaatgacccccaactgagttaagccaccatcctattcctgcacaatagctccagccctaatgccagtgatctataaagccactgggtagagtttatgcatttgcataacaaatatttctggagtgttgtataaagtagctagctactcaaacttatcataattgttatttataattatcatctgcatattcctttcatttattctttaatatctcaaagaaaataaaatgatttaatagttcttcattatctttgaaacacaacctggtgaaacatatcatggtaatgttcactgtcatctcttcaataattatctcaggtctgtcttccagtagtcactcatgctttctccatcacacttttttttttgcagtatctcctcgcagtctccctacctttcaggttgcctgtgaagtactgtgtatccataaacctcccacaatctgatatgtttggcagagaaaatcagggaaaaggcacgttgattgtgctgaaagaaaaaaaacaagcaaaaacaaaatatggatctgccaattacatgctggagtgaaaatacaattccttcttgctttcaggtgagggagttggcaggtggggtgtgaattggtaggtagtaggactttcagtaaaaagaagtgtagcaaatgctgtatgatgggtgttttttggattttttgttgttatttgtttccttaagccccaatagtgtaccagatagtagactcaagatatatatatatatatatatatatatatatatatatatatatatgcacacacacacacacacacacacacacacacacacacgtaatgattacctgtctttaccttggacatgtaggattaattaagattacaaataaaattataataggacataaattgcttcttacctttttgaaagaaaatagatatccagtggaggtaaatggtaacaatgtcctggaaccaatgagataatcattaggcatagaagtgacaaccttaagaggaacaaaacagagacagagccctaaaggacttaggcagagtttaatggaaattttcctgatttctcattcactgcttgcatcacctctacttcctccttgtgtactttgttttagtgtgagacagcggaagtggctaataatatttcctcccctcagccaggatgctttttcagcttcagttggtcattgaaagagcccatattgctatgattttctggaatattatcacttggtcctccaaaattttgtttttagtatatagaaaaaaatcctttatgggaataacaggcaaattaatgtttctaattatgtatattattccgtttatata

SEQ ID NO: 1883562 - DNA, 4001 bp, Homo sapiens
actcaaccccttttacaatagctgtgaaaaacaacaacaaaaaacaaaacttaggaatatacctagcaaaggaatcaaaagacctgtacaatgaaaattacaaaacactgctgaaagaaatcatagatggagccaagcacggtggcacatgcctataatccgagctactcgggaagctgaggcaggagaatcgcttgaactcgggaggcagaagttgtagtgagctgagatcacaccattgcactcccacctcagcgacaagagcgaaactccctctgaaaaaaaaaaaagaaagaaaagaagtcatagatgacacaaacaaatggaaacgcatccccatgctcatggatgggtaaaaccaatattgtgaaaattaccattctgttaaaggcaatctacaaattcaatgcaatccccatctgaatgccaccatcattcttcacagaattacaaaaacaattctaaaattaatatggaaccaaaagagagccatatagccaaacaaagcctaagcaaaaagaacttggaggtatcacactactttatttcaaactgtacaataaggccatagttaccaaaacaccaacgtactggtttaaaaataggaacatagaccaatggaacagaagagagaacccagaaattaacccaaatacttacagccaactgatcttcgacaaagtaaacaaaaacataaagtggggaaaggacccccttttcaatacatgatgttgggataattggtcagccacgtgtaggggaataaaactggattcgcatctctcatcttatacaaaaatctactcaagatggattaagaacttaaatctaattcctgaagtataaaaattctagaagataacactggataaacccttctagacattgacatatgcaaggatttcatgaccaagaacccaaatgcaaatgcaataaaaacaaagataaatagctgggacttaattaaactaaacagcttttgcatggcaaagggaacagtcagcagagtaaacagacaactcacagagtaggactcctgaacctgaccctgaccccagaccccaacccctgaccctgacccctaacccctgaccctaacccttaaccgtaacccctaagcctaacccctaaccacaaccctcaccctcacactaatgcaaccctaaccccttatccctaacccctaacttctcttaacccctaactctaaacgttgactcttaactcctaactctgaccccaacccctatctccaacccctaaccctaaacttaacccctaacccctaaccctaacaccaaccttaaccctaggttcattactacgtttgtattgactatgtcaatgttgattattatgatctctgtcttaggactgcatggcagcaaggggattgcggatcttatattaatatttttgtattgaggcaatgcattagcattacaggtgcttgttacatgagcaatgggggtgtcatattttgggtgtcatctctgcattaggagtgctgcatttgtcttccaaggctgcggtgtggatctcgcactgcggccgcctcgccttggctggggagaacctcggtgggcaggattcagagtggcttttggtttcccgttttccacactgaacccttctaactggtctctgaccctgattattcagggctgcaaacgggaaggattttattcaccgtctatgcggccccgagttgtcccaaagcgaggcactgcccccaaggtctgttgtgaggagaacgctactctgccttcgcggtgtccccggggtctgtgctgagcagaacgcagctccgccctcgcggtgcccccggcccgcctgggtctgtgctgaggagaacactgctccgccttcgctgtatctccgaagtctgtgcagaggagaactcagctcagacctggcgatgctctcctggcgatgtctgtgctggtaagaatgcagctccgccctcgcaagggctcacagcgccggcgcaggcgcagagaggcccacagcgccggcgcaggcgcagagaggcccacagcgccggcgcaggcgcagagaggcccacagcgccggcgcaggcgcagagaggcccacagcgccggcgcaggcgcagagaggcccacagcgccggcgcaggcgcagagaggcccacagcgccggcgcaggcgcagagcggcccagagcgccggcgcaggcgcagagcggcccacagcgccggcgcaggcgcagagcggcccacagcgccggcgcaggcgcagagcggcccacagcgccggcgcaggcgcagagcggcccacagcgccggcgcaggcgcagagcggcccacagcgccggcgcaggcgcagagcggcccacagcgccggcgcaggcgcagagaggcccacagcgccggcgcaggcgcagagaggcagaaggcccatgaggggaaggtgagacacctggggcaaagaaaaaaaaaaatgcgccgcgaagcagtgtctgggtcatccacggacgaaagtttttttcccatcagcccttgcgctgggccccagggaccctggcatccctggttcgcgcccatggtgcgcctcgggcgactaggggtaccccaactcggacagaagccccatgagtggaagttgaagtttgtgggaagagaggtgaggcaccatgggcagaaaaaaaaaaaaagaggaccgcgcttcagagaagcggggcctgggtccaccacggatgaaagtgccttcccatcaggccctatgctgtgcccggtggaccctggcgaccctggtttgagcccagggtgcgcctcgggaccgcttggggtaccacaaagcgaacaaaaggtccatgaggggaaggtgaggcacctgaggcagagaaaaaaaaacgcgccaccgagaagcagtgcctgggtcccccacggatgaaagtgccatcccatcagccccttcgctgggccctggggaccctggcgtccctggtttgaccccagggtacgcctcgggccagtatgggtaccccaaggtgggcagaaagcccctaaggggaaggtgaggcacctggggcagagaaaaaaaaaaaaacttcgccacagagaagcacggcctgggtgccccacggacgaaagtgtgttcccatcagtccctgcactgggaccagggaccctggtgtccctggttcgagctcagggtgtgctttggccgctaattgcaccccaaggggggctttgggcgcacaaagcccatgaggggaaggtgaaatttgagggaggagaggtgaggcaactgtcatagaaaaagaaaaaaaaaacccgcgccgtggagaggtggggcctgggtcccccacggatgaaagtgccttcccatcagcccctgcgctgggccccggggaacctggggtccctggttcgagctcagggagagcctcgggccactaggggtaccccaacgcggtggaaagcccatgacaggaaagtgagctgtgagggaggagaggtgaggcacttgtggcagaaaagaaaaaaaaacctcgccacggagaagggaggcctgggttccccatggaagaaagtgtcttcccatcagaccctgcgctgggccccagggaccctggcatccctggtttgagcccagggtgcgcctcgggccgctggggttacccaaaggtggacagaaagcccatgaggggaaggtgaggcacctgtggcaggaaaaaaaaaacgcgccgcagtgaagcggggcctgggtcccccactgaggaaagtgccttcccatcagggcttgcgctggacctcgtggacactgcgaccctggttcgagaccagggtgcgaatagggcccgctaggggtgccccaaagcgggcaaaaggcctattagaggaaggtgaggcacccgggcagagaaaaaaaaccgcgccactgagaaacggggcctgggtcctccacgaacgaaagtgtcttcccatcagcgcctgtgctgggccgcacggaccctggcgtccctggttcagccacagg

SEQ ID NO: 1883563 - DNA, 4001 bp, Homo sapiens
aactttaagtaggttcaatattgattgattgaatgattgattgtgacagtctcactccatcagaggctggagtgcagtggcgccacctcggctcactgcaacctccgcctcccgggttcaagcgattctcctgcctcagcctcctgagtagagtagccgtgactgcaggcgcgcaaccccacgccgggctaatttttgtatgttttttttagtagagatggggtttcaccacgttgcctaggctggtcttgaactccgccctcctcggcctcccaaagtgctgggattacaggtgtgagcccccccacctggccccaagattaatttagataaattcttagagggtgaatgcatagttggttattgggaaaactgttaacggtctgtgatacataattacttttctgaggtgatggggaaccaaattcttcctacaaatgagaaacagaacttcttgtctacacattaaaatgactttggaaacttagaaaaatatcaatgtcaagatctggcagcagacctttttcaaccaagtgatgaggcccaggcacttgtttttttatttttattttttcctaagggtgccccagggtttagaaacaactaagtcagatatttttagagtaatttgtcttaactctttcatcttgcgtaaaatttccattctgtcatccacaaccggaattccactccgtcataccagtctctcctcgtttttttctgctggctcttttcagcgtgtttcatcgtggctgctgtctgtctgttacagccttctcacgtgggagcccctgccccgccccacgagaaaatacatgtttatcattcagtaagtattgcgcaaaatcgtaacagaataattactcgcgccaattccccccagattagatcagcagaaacacttgggctagaactacctcaggactatctaacaagtggatataccacagtggcgtggagagctgcagtgttatgtgttggccaaatgaagtaaagacaccaagtagctattaggcgaagaacgaagcgtcttcgcggcaagtcggctgtctgctttaaattttctgaatccttaatgttatcagtattatttatttcccccgagaaacaaaatctccaaataccaagaagctgttctgtattgccaaaagctgcataggggcaggctgccaacaggactacccgggcacgctgcagtggcatctctaggcagtttcctttaatctgattttccttgggctaactcctcactgcggtgctgctccacagccagcccccgcgcgcagccctccccgcaccagctcggctgcagagcgcgggtccgccgcccacgccgcctttcaaccgcagtgcgcggcccgggccttagacgcgcgtgcgcgcgagccggggagggcgggccccagccggaggaggcggaacagggcctcgcgatatgcagcccattggctctctcctgcagtccccgcccccgggcgttcgaggcggcggggcgggccacgtcaggcagccggcgctgggctgagcttgtggcagaagggaggtaagccgtgcggggcggcgggctgccaccgctgcacccctgctcgggagccgccgggtcgcgccgcctgcggcccggtcggcttgcatggagggcggctgaggccctgcggggctggggctgagctgggagacggggcagtggagcatgtggcggcagggccgcgtcgcggcgaggggcagccgggagggggctttttgccctcgtccggtcctgctggggctctcagcttctggaggactaggccttctgaggttacggagctccgagatacctgggcagggctggctgtggtgactgcggtgggacttagtgggatctcgactcggaagccggtcggcgcgatccttgcatacttagctgcagcaggttgcagtcgtcccactctccttcgaccggttccctagttgggggcagagcaggagattctggccgcgtcctgcctggcctggggtgactgtctccttctcattcccggtgactcactcagatcatgtccacttataatgcaaaggcttatgggtgagcagggcctgttttcagtctcctagttctctggctccgtccgcacttgcggcaattacttgaagaaagagtatgttagatgtatgttttgaaattttcgcagcagctaacgcgtggagacgtgcagttatgttgcatttacccttcatgagttttagtttcagctgtggcgtcctgatatctcagtgtggttcctgaatttggagcttttgaaatgaatgaaatcctgccaatttcatgcagtcattcattcatacattccaaacttttttgatggatgccttaatggtcagcctcataccaggtattaaaatcggcatttcctgcgttttattccagtttatatgttagttttattgtctagatttgagttggaaattttttttttttttgttattttcaggttctagtatccctgaaaccatcgtggctctgagggtgtaatcctgataactgtatcagtaatgactccaggtttcagtggcctatctgtaagaagaggaatgggattagtataattttgagattttccaggagaggagggtagatggcatgtttcctgaactgtgttaacaggaagtaactattttaaaaacacaggatgcattttatgattatgttttactgtgtcaacgaacattgtatctgtccacattcactttttgactaccaagcaagtgcatgtttacaattttgattcacatccaattcctgcgtagaaagcactgtgactcatctgaattttgaaatgaagtaatcatgagctttttaatgttacatacaaaggtatgatattgaaacaattgcataaaaatgcaattttcaaagcattttcacttgcttttatagattagtggaagctaaaacctctgccttgattatttgcttacttaatcaatgttaggtagttaccatctcttggctaatgtttatcaatattatatctattttaacatttgtttcattaaccccaaatttactggattttaactgattgttgtctccagttgacgcctgataaccaaaaggttatcaggaggagctggaggaggcggaacacagcctcgcgccctgtaataaatagtttgaaatcaaaattttcatggacgtataaccagagtttttcatttgttgattgattgatggtgcttaccggtaaatcgtttggcctttttccccgtttaaaatgatttatgaaacagtctgagacataatattcttagcttcatgatacttttgggatattgtccacaagtgattagttgaattaaattgttaatatcactattaggagtttggaaaatttaagaaaatataacttcttaaaattttgcatttgctatttttttgtttgtttggagacagggtcactctgtcgcccaggctggagtgcagtgctgcgatctcggctcactgcaacctccgcctcccaggttcaagtgattcttctgcctcagcctcctaagtagctgggattacaggcgcatgccaccacacccagctaatttttgtatttttagtagagacggagtttcaccatgttggccaggctggtctcgaaatcctgacctcaagtgatccctccgcgttggtgttacatctttcagttctagaaatggacctgatcaagattgcaaggttaatggggaaaattcaagagctgaggacattaaccttctagcgggaaaaaaccacaatgagaaataataactatatttggaggaagtgtaaggaaataatagtttaaggattattagtctataacaaatcttgatcttaatcagtatttcttgatgtataacaaagaacttggtttaagcacaaaaagaaaattagggtgataatttaaattttgatcaagtgggtagtaagtatttctttaggagatgagaaatctatagatctagagatgcatggtataataaagtatggt

SEQ ID NO: 1883564 - DNA, 4001 bp, Homo sapiens; identical to SEQ ID NO: 588399

SEQ ID NO: 1883565 - DNA, 4001 bp, Homo sapiens; identical to SEQ ID NO: 588419

SEQ ID NO: 1883566 - DNA, 4001 bp, Homo sapiens
aaaaatcttcaggaggctgggcacgcatgttcctgtagtcccagcaactcaggagactgaggcggggggatcactgagcctaggagttcaagtctagcctgggctaaatatagtaagacactgtcacaaaaaataataatcaaatcttcaggagaatgttcatgctcagccttatcatatgccccgccggcagaactccaacattcctattccctcccctttacagccacctaaaacagctgaaccaaaacttagactagcaatccctatgatgaccttccctacccctgtcccaattcctacataccccttccaatactccccaaataaagagaatttactggtggcatcttacactctggtccagttctgagttgcctgtgatacgacagccaaataatttgccaaggtgactgaggacctctcagatttgccgaggaattctcgacagtctgtacaagttatgtcctagagttttcaatttctatcagctgatacatttgctggtgggaccaggaggagggagacattgggcaaaaattggcaggatgggaaaatccttctgatgattgattgattgattgctttagatatggagactcactatgttactcaggctggttttgaactcctgagttcaatgatcctcccacctcagtcccctgagtagctgggactataggcacccaccactcacatttggcctcttatgatgatttaaatcaagatttgctccaagatatagaaaaagccaaagaattggttgacacattaattaaagttattctcatggcttttccaaagccagtagattggaataaaattttggcttgtgctcaacgagaaggcagactagttcatggttattccaacaaactagaaagtaatatttaaataaaattctggtctctcaaaagaacagactgatgccacttaagtagcacttaactccatgtttgtcaatggtctcaatgaagatttaaccgtattagttaagagagcatagaaaattaacaaagatattcaggacctgaactcagctttggatcaagtggacctgatagatatttacagaactcttcaccctgaaacaacagaatatacattattctcattgccacatggcatttactctaaaattgaccacataatcaggagtaaaacactcctcagcaaatgtgaaaggaatgaaatcataacaaacattctctcagaccacagtgcaatcaaattagaattcaagattaagaaatttactcaaaatcacacaactacctggaaatcgaacaacccgctcctgaatgactcttgttgattaattaaggcagaaatcaagaagttctttaaaactattgagaactaagatacaatgtaccagaatctctgggatgcagctaaagcagtgtcaagggaaaatttatacactaaatgcccacatcaaaaagctagaaagatcttaagctaacaacctaacatcacaacaaaaagaactagagaaccaagagcaaacaaaccccaaagctagcaaaagacaagaaataaccaagatccaagctgaactgaaggagatagagacacacaaaaaaaatccttcaaaaaaaaaatcaatgaatccacgagctggattttttaaagaaattaataaaatagaccactagctagactaatgaagaaatgaaagaagattcaaataaatataatcagaaatgataagaagaatatcatcactgaccccacggaaatacaaccatcagagaatcctataaacacctctatgtgcataaactagaaaatctagaagaaatggataaattcctggacacatacaccctcccaagtctgaactaggaagaaattgaaaccctgaataaaccaataatgagttctaaaattgaggcagtaataaatagcctaccaatcaaaaaaagcccaggaccagatggagtcacagttgaattctaccagaggtacaaaaaaagctggtatcatttctcctgaaactattccaaatggttgaaaaggagggattcctccctaatgcattccatgaggccagcatcatcctgataccaaaacttagcagagatacaacagaaaaagaaaacttcaggtcagtatcttcaatgaacattggtgcaataatcctcaataaaatattggcaaaccaaatccagaagcacatcaaaaaccttatccaccacaatcaagatggcctcatccccaggatgcaagagtggttcaacatacacaaatccataaatgtgattcatcacataaacagaactaaagacaaaaaccacatgattatctcaatagatgcagaaaaggcctttgaaaaaattcaacatcccttcatgttaaaaactttcagtgaactaggtactgaaagaacatacttcaaaataataagagccatatatgacaaacccacagccaatatcatactgaatgggcaaaagctggaagcattccccttgaaaactggcacaaaacaaggatactctctctcaccactcctattcaacatagtgttggaagttctggccagggcaatcaggcaagagaaagaaataaaggtattcgaataggaagagaggaagtaaaactatctttccttgcagatgatatgatcctatatatagaaaaccccaattgtctcagcccaaaagcttcttaagctgataagcaacttcagcaaagtctcaggatataaaatcaatgtgcaaaagtcacaattattcctgtacaccaaaaacaggcaagcagagagccaaatcatgaataaactcccattcacaattgccacaaaaagaataaaatacctaggaagacagctaacaggggaagagaaggacctcttcaaggagaagtacaaaccactgctccaggaaaccagaaatgacaaaaagaaatggaaaaaaaatccatgctcctggataggaagaatcaatatcttgaaaatggtcatactgcccaaagcaatgtatagattcaatactattcccattaaactaccattgaaattcttcatagaattataaaaaaactattttaaaattcatatggaaccaaaaaagggccccaatagccaagacaatcctaagcaaaaagaacaaagctgaaggcatcatgctacctgacttcaaactatactacaaggctacagtaaccaaaacagcatggtactggtgtaagaacagacacatagaccaatggaatagagaccacagaaagaagactgcacacctacaaccatctgatctttgacaaacctgaccaaaacgagcaatgggaaaaggattccttatttaataaatagtgctaggagaactggctagtcatatgcagaaaattgaaactggacctcttccttacaaaatcaactcaagatggattaaagacttaaatgtaaaactcaaaactataaaaccctggaagaaaaatctaggcaataccattcaggacattttgtgacaaagatgcaaaaagcaattgcaacaaaaccaaaaattgacaaatgggatctaattaaactaaagagcctctgcacagcaaaagaaactatcatcagagtgaacagacaacctatagaatgggagaaattttttgcaatctatccatctgtagtgaacctcctcatgggtcaccctttgtactgaatccctgagttcatccttttctttccccaatgcaattagaagcaattagcaaattttattctattcattagtttgaaaaaatattataacatattaaatatatggtcacccagtagcttgtcttttatgagcttttgattaagagtatctaatggtgacattgtgtgtgtctctattgccagatcatgccagtgctctcttcactaatggaaatagagtaattgatgtctttaaatctaatcagattagagaaccaattccagaaacctcagagccaatccagaaaatttattcttaagatttttttcctgtagagctattcttggtagcaaactttggatt

SEQ ID NO: 1883567 - DNA, 4001 bp, Homo sapiens
actccaccaaaaactggatcaggttggatctgagcaatctgacatcaaaaacgttctcaggagtttcccaatacatagaggagataaaggaagaacagaactggttctgtctgaaataagatagggaaggggccagagccctgtcctctaggttcccctcccctaccatggtggcccttgaggcaggatgccgggccttacaggacagagttgaaacttctggactgggcaatccctagggactcgttcagctctgccttattcagtcattgagcacctgttacatgtaaatgagataacttagatccacatgctgcccccatctggtagaggaggcaaaattcacccagatgtaactccgaaagaggtagaaagtgcctgatgtagtcaaagaagcacagaaatgcagcagaataaccctgtcctccacaccccccactcccagagccctccttcgccatgcacttgcatttccttactcagagactggaaggaaggtctccagtagtatccttatttcacaatcggggaaactgaggctctgtctgggaaggtggttccttactggcagcaagcggcaggccagggctgcaccctacatctcctgcttcctcagacacgcctgtttccaggtaaaggaaggaggcagcccggcctgctcaggagcccgaaggagtgcaaaggaagagcaaagcctcaaaacacctgcctcgggtctcggttccttcctgccggaggagcggctctcacaccctccgcgcctcccagtccctcccggccgccacagcgggaagatcgaggaatctcaaatccctctgcttctctggctctttgcgcgctgacatttttttcttcttctttttactgttttttttttttttactttcttcaagagtttgtgcaatcattgtgtttagccgttttcctgccatttccaaacgcggggtggtgtccttttcgagtaggagcaaggtttgaagagttggaggaaactcccgcctcccatcgccccagtgctgcaggcaccccggatgccaaagttagtgtcggaaactttccccatgctgggcgtctgactgagtcctcggctctccgaagctctctgacatctccctctctattcccttcctccttggggttcctgcgaccctcactttatccccccactcccagattccccttcccagaggcgcgcccttcctatcttgtcctgggcaagagccattcctctgtcctgccccacaggcaaggacagacccctcactcactgcgacttacttggtcgcatcctgtgtcccctgcgtctcccctctcttcccccaccccaaccccgcggacccgtgggggaacctcagcttgcagctcttcaggctccagtcttggaaggctggacagagggagggacggccacaggatggggacagagggacagaaactgggtccgatttggcaccgaggtagcgacaagaacaaaagcagggacacaggcagggcagacaccgggcagcgccggagcagcggcccgcctccactccctcaccaccctctcccaagcgcggagccccccgtccgtgtcctgctcgtggcctccggggacctgggcggctccccgcgggacccacctgatccgcagaaccagggcgccgagggccggcgcgcggtgagctgggctgagcaggaccgcgcccagctcccggccccggcgaagccctacgcgctctgatcagccaccgcgccgcctccgcccgagcggaggcgcgtcctcccgcccgtgggccggccggccgggcttctgctctgggcagagcgcagcgggtaggggcgcgaggagccggcgagcgctgacagcgggctgcgccaagccggtccccgccccggacacagacagctggaaggccggcgagcgagtgcgtgagtgagagtgtgtgtgtgccggggaggcggataaaatccccggtgagagtggctgggcctcttttgccttctcgggcctgcacgtggtggtggtggtgtaggtgatagagcaggaaccccgggcgttggaggatggggtggggtctgtgctgtgctgctgggaggggctgcgctgcgctggcgcacggccaaactctgggaaactcagagccttggagatctgatccaccgtttgtttcccgaggaaggaagagcgcgaatgtagacagcggcaggccggggctggagtcgctcttgcgagagtcctgagctctggaagtgagggctgggcgttgggcacctggttcagggtctgcccgcgtttgcgcactgacttcatgatctgtgagcccagagtgtctcaaacggggctctaaggcagcccctaggctgtggaataactctttagtagaattatgtagaaaggaatccaaacattcgatttcagagtgtgcgcttctgtgcccagtgtggcagcaattcactcagagagttgctgtggccacaactggctgccctcagttctcttgtcttatactgatagcgacaaggtcttctcactcccgctcatatcaatctactttacaggtggaaaagtcagaacttcattttgccatttgccgttgaacgtcattttcatagactaagaaattcgcttcttaaataattcggccgggcgcggtggctcacgcctgtaatcccagcactttgggaggccgaggtgggcggattgcttgagctcaggatttccagaccagcttgggcaacgtggcgaaaccccgtctctacagaatatagaaaaattccccaggcctggtggcgtgcacctgtaatcccagctactcgggaggctggagactgagaaagaaaagaaaaaataaaaaataaatacaaataaaaatcaaactgccaggccaggcgaggtggttctagcttgtaatcccagcagtttgggaggccaagatgggtggattacctgaggtcgggagttcgagagtagcctggccaacatggtaaaaccctgtctctactaaaaatacaaaaaattagctgggcatggtggcacacgcctataatcccagctacttgggagcctgaggcaggagaatcacttgaacccaggaggtggaggttgaagtgagccgagattgcgccactgcactgcagcctgggtgacagagcgaaactcagtcttaaatgaatagacaaacaaacaaacaaaaaaatcaaactgccatgaaaactactttacccaaaattttagttcacagccttcattggattatctattggggcaaacaaagtaaaaccagcgagcttgtattgctatctcatggctacagttccaagctattggatctttgtttgtgtcggtatatacatgtctagatgtgtttatttgtaggtacacttactgttatatcttgtgcctaccaaattggcatataaataaaagagtgctcataaattaactaaataagtctaagcaattttcaagttcatatgacttaagtataactttaataaacaggctggttttaaaattattggtaaaatagaaatgctttcagaattgtcagcatacatttttgtctggactttatatttgtctctgctaaatactttgaggtgtcagagtttggcatagaaggttataaaactataaacccagccaaaacaaaatgatcttggtttgcgtgctttttttttttttttgacaaatgagagttaatttaatactattagctaaatcttctgagttgttggcaaaaatagctatgtatttaactttgatatccttccttatgtttaggtgagcacctgatgctcactggctattaaaaacatggttaggccgggcacagtggctcacgcctgtaatcccagcactttgggaagccgaggtgggcggatcacttgaagtcaggagttcaagaccagcctgacctccacctactgggttcaagggattctcctgcctcagcctcctgagtagctgggactacaggcacatgccaccatgcccagttaattcttttatttttagt

SEQ ID NO: 1883568 - DNA, 4001 bp, Homo sapiens
gtattaacttgtgtaatcacacaactaccctatggggtaggtgcccttatttctccatttggcagagagggactaagtatcttaaccaaggtcacacggctttcaagtgccagagccacgactcagatctacacaggtctggctccagagcccccaatctaacctcttaacctctctgctttactgggctaaaccttcaccacctatcatatggaaaaagaaattcaatagaaagttatatggaaaaaatacaaccctgtgttaatattagaaaatccatagtaacatgtagaatgaggaagcttcctcaagcccaactatacaggtcagatcggttgaaaaaataaaactaacaaatttttacatgtcaaaatatgcaatatttgaaaatccaaggctaatatctttaaataggcaaagatttattaataccccttgacacacaaacaggaagtgagaaaatgggcaactgacacaaatcgataattaactgtgaggacataggtggtggagtctctcctaatcctctattcttggagatctgaatgcctgccattcccgtatgggaagaacagagacggtcatggaaaacagcatttaatctagaaaggaccacaatgaggtcaaagggcggtctcagggcagtcttaagagctccccatccccaaagaactggcaaggactctccaggtgctcgtatgcgactgctgcccaactcccatcacgaactcagaagacctgtcattttctgaaattttcatgacttctaagacactagttattggggaaaacttcaaattatttaaataatgagaggcgaaaaacattgctaaactcatgaatactctgtatttaaaacctccactggcgatcagggcacatagaatctctactactgatccctgacgctggccatcccccaacccgtcggcccacggaccccagccctgaccccacctcctcccagcatcttacacaaggattctcaccacactccccagagactcgcctgcccagggcccctctctaaccccatatagctcaggtctctgatccagagactgcatcaccgacctctccgactacctatttccagattagagtccctgatcccagaggcattgtctaaaataactagctcttacaactacgtccacttcaggaaccgccctgtgatgtcagaactttgaggccgcccggccagggctgcacatgctcagtgaggtcggcgcccgccagtaacaaacatggctccctgaagccgctcaggctcaagagcaacaaggaggtctgcacttaatcgctcctctccgggggcggccataccgaggaggcgtctcttccgtgcaggcaggctctcctggggacctcagagattctctccagcggcagcggaaaacgggcaatgggtggattcgggtccagattctggcaggagggagtttgggatcgagatctggaaaaaagcactagactggaagaggacgcgatggagtcggagccgctggcggggacaaaaaccagaggccggggaaggcgccggtgggaggcaaggcgcgcatagactttacctgcgcacgcgtcgcagccatctccgcccacagtggtggccaccgccactggtgctgaagtgtcggcgtgtgccgggcgctccgctgggacccgggttgctggccctgagtctcagctttctcatctgtacggttgggacaagtacagtaaccctcgcccgtcaagacgggccagggctgtggcgagggtccacgccttagagcaggcacctatcttgtgcagggccctgagatggggtctgactcagttcctgcggggaacttcaccagtgacccagtcagtgcccttcagttaaagactaccaggggcacacttgtaattaaatataattacattgcagcaaggaatggggtactatgggtcatctcagtgggaggagttagagagaaactattatacgatttgggctttaattggttgatttcggacaggatctcagaaagtgaagactttagattggatgctgtcagaaagcaggagcaatatgattattaagtattttgtgggtgacatcaagaccttgttttttatctgcacttagacaacattataaagtgcccttgtttttgtttgcacttatcacggtctcagattaaccttctgaagttgatattctgtgagattgtttatgtccaacaggaaaacaaaatgtcctggccatgagcatcagaccagcgtgtaatcacattaaggcctgtgacccaaatattgacagaattgaagttagaaatagttctacagtaacagagtcttcaatactccatttaaaataatgcatagaagctggacatggtggctcatgcctttaatctcagctacctggggaggctgcggcaggtggattgcttgaggtcaggagtttgagaccagcctgggccttttggcctgtctcggcttttaacataccttcctcactcagcttaatcatttctcactttagatttataataagagatgtgtgactcttactttcacttgaacacatagaggcctttatagagttattaattggcctaatttcaatattgctgtgtctcagaaaacagacctgaggagagggtgagatggaggaagggcagatcgatggaaccattcgaatacacatatgtatcaattaagctcattgtcttttggagcatggcttgtgatgccccaaaacaatgacaatagtaatatcaacgatcactgataacagatcaccataacagatataataataacaaaacatttgaaatattgcaagaattacaaaaatgtaacacagaggtgcaaaataagcacatgctaccagaaaagtggcactggtagacttgcttggtgcagggttgccacaaaccttcaacctgtacaaactgcaatatccgagaagcataataatgtgaagtgtaataaaacaaggtaagcttgtatatgtatgcatgcacacaccagtacacatccacctatccacacacaaatctttgtactaacaaagcctgtattttcaattccaacaatacatcatttgtaccttaaaaatctctgtcatccttgtagtgtccttttctgtccttgttatcagggtaatgctggcctcataaaaaatgtttggaagtgttccctcctcttcaacttttggaagagtttgtgaagaaatggtattaattcttctttaaacatttggtagaattctccactaagctatctggtcttggattttcctttttcaggagctttttgactactgactcaatatttttactcattatttatctgtttttattttctatttcttcatgtttcagtcttagtggatgtatgtttctagaaattattctaagttaaacaatttgttgacacatagttgtttagagtagactattattatcctttgtatttctatggtaccaattttaatatctccttttttgttctaattttatttacttaagatttcttttttcttagcctagtgataggttggtcaatttttattatcttttcaaaaaatcagctcttcgtttcattgatctttgctattgtttttctagtctatttcatttatttctgctatgatctttgttatttccttcttctaattttgggcttgattttttttctctattttttgaggtttatttgagatcttttttcttcatttagcacttatctgtataaacttccctctcttagaacggcttttgcttcatctcatcagttttagtatgtcgtgctttcattttagtttgtctcaagatattttatttcttttttgatgttttctttgatctactggttattcaggagtgtgttggttgatttccacatatttgtcacttttctaagttttctcctgtttttaattttcagtttcatgccactgtagtcaaaaagaatacttggtgagatctcaatcttcttaaatttgctaagacttgttttctggccta

SEQ ID NO: 1883569 - DNA, 4001 bp, Homo sapiens; identical to SEQ ID NO: 588434

SEQ ID NO: 1883570 - DNA, 4001 bp, Homo sapiens
taccattttaatggttgcataatagtccatcaaattgaggtaaaatcattgattagccctatttgtggacatttaagacattttaagttacattttctgattaggtattgctataaataatgctatttgttttatatatatatgtgtatattttggggggggtacaaatcttctttaacacctctggctatttccttaagacaagttctagaatcaaattatttcaattatggaccttgaaaaaatattcccacataccatctagactgtttgtaccaatattcactcctatgaacattgttgaacaatgcctctctcactgtaccttcattactgtttttttttaagtttttgataattcagcaagtaaaaagacgttttaacattgcacttctttgcaagtgtgcaaacatttttcacgcttattatcatttctgtttctccttttttttttttttttaacagtttctgttcaagtcaaggctttatccaacgtctccttcccatttccacctccccaccttttatctctggtttcatcttctatttctcttccccaggccccaggctcaccctgcttgactcttacttctccgcacaaccacagggtaggcaggttcttcccccataggtctgtacggcttattcctcacttctttcaaagctttttataaatgccatcttcaagaggctttccttgatctcctatctaaagctgccaccccttattcctactcactgtctcgcttctccgcatcacttttctccatagcatttatcaccatctgaggttgtatatgttttatttgttcatcatctgcttccccatctagagtctaactttgacaaaagcagtcagtattcctagggtctagagaagtatgtaacaaacacttaataaatatttgttgactgcataagcatactctagctctatatctaaaggtttagtcttgtctttataaaatccatttatacacacactctttaaataccaaagatgattaccatttgcaatatttgtaacaaatacatttctagattgcttttaaggtattatgtttttgtacaagcagaacgttaatatttttatgtcactaaatcttacattgttttttttttccatttcaattacacttaaaaaattcttattcattaaaagatcagataacttttcacctagtttattttagcattttttattgtttgattttttttttacatgtaactctttaatgtataagatctaaattgttctgtttttatgtaactgactgttggagttttgttactgttaatcacattgttttatctttgaatcatgccataatatattaaaatttaacttgagtattttcctttcatggaaaatctataggagttaaatctcaatgggcatttcttaatcatctctgggatgttttcatgacagtgtttctattttaaaagcactttccaagatggactaaatctacttgagtttgttgttgttatcgttacaagttctgataagatacggagcaaataaaaggaagtataataggaagttgagttgccagaagtggaaatatcaaggactgaagtcaaatccgcctctagccacatttttccagaagctcttgccaggtgttattaggattggagaactgatccttttattgacactctgttaagctctgtgccttacccgtagttgctgcttgataaatttttgtgggctgagttgcactgatagagcatgatgccttcccaggaaaatattccaaggaccggctctccttatcgatgtctcttccgttttgtcctcttagttgcggtccagcacagagctccatccagacctgctcacagattgcctcaccgtgcagtccctgcagccggccacttcccctagagatgctgctgctgaagggaccgtgggacgctcccctggacccgggcctgacctctattcaggtaaagacagcaaaggcagagccaaccacaactacccttttttaggccttttactctggttaaaaggaatgctcacgtgagaaaaattttcctaagatcgtctgtgttgttctttatcaatgggctgcaaattgctctccaccccttctgattcctgagctgggtgtggcagcagattgttttttctcataaagaaataaaataaaataatgcattacctcttttagttatggacttctgccagaaattcagtgtacccaaccctcgcagttatgttacatttactcacttgatttagactcgaaggaaatgtttcctccttaagcaggtagcaggctgcgtgtggatttcttaatgaaacagttgttgtcatctttatgttttaaaaggaagccccaggtctctaaggaaattttcacatcagcaaaccaacttataagaatgttcattcatgtttgccaaccattgtgggaaaggagatgggatgacactcccagaccaccttccatctgcctaggtttgaataataggtgactatatttggaaaattacatgtatgtagtaaaaaacaaaaaaaataagaaaagattaatataccataaggaagttatttttcttttactcagcctggatttttatgcattttctactctctgtaatggtgatatacttatgcaaacataattagtgattgtccttacatatggaacactcttacagtcatgctatgaagatgagaaaaaagatttaccagctccacattccagacaatgagaattttctattttctgtgggttgcagatactacccccacccccatctgattccagagccaggtttggcagcagactgtttttttctttcgaaaagtatgaataagccattagaatttaaaatttacagatgcattgcagtggaatgggagaaagacatccttgtacaacgttttaaatttgacagttctcagttgattcagatgcagagagaaagggcagtaagcaagtattgcaagagcatcagtcatcaaaactgggccttaatcatggcccattggacctttatcagttgctttaagcacttactgttggggacaacatagcctctgctttttgagacacagggagatgagacgaagaagggttgaccaaacttacagaggtttcaggtacaggttcatatacagacatcaaatatatcaatgtgcagtgttaccaacacatacataaatattttgtattaaatatatatatatatatgaaaaaccatgactagcttttgtttttgtgtgtctgatttgttcagtatttgatatatgaacatttatttcagcacattaaattagcaaacaattttaaacagcctataaagcattcccctactacttcagttcattaatctatgatcttactaagacctggaacccaatagtcaacagtcaacactaaccagaagtgattgaaaaatggcctaacatacaatataaatggtttctagtgatgggctagtctggctgtatttaatcctctcagaaatgggtttgggaagcaatgctatccatatctatggaaaacattagcacctttgttgtatgtagcatacagcatatggctcattttcgaaactgtcacatttgtcttggtgtctgtttttatatgtctggtagtgtttttaaagctttagagttttaaatattttaaggttcagcttgaaatgtttttgtcattccaagcaaatgtccactttttgtccatgactctattctatattcggtcctcaaaaagattttgagctctggaattagagcctccggctgtggtaggtttgcctcctaaggggcaaggatacctaagttgctccagccatcagtggagtgtcttcaggttgacccacattttccgtaactcttgagaacacttgaaacatgcagatgatcatgttgctcaactttgttcccagaattttacttctccaggtaccttatgactgtgaaagtttaccctctctacttctttttttttttaattgagatgggagtctcactctgt

SEQ ID NO: 1883571 - DNA, 4001 bp, Homo sapiens
aagattggggaggccactggtttctcttaaaagtcagcagcgccccagggagaatgtagggactgtccttccacagttgtcttggatttcaggctctctagaaacgtctggccactggttgattgacatggcatagactttgtaaaaacaaacaatacgatattgaacctcaggggaactagcacttgataacatggcttgcttaaggaagttataaagaagaaaaaagaaatggggaaaattctgttaatgggaatcagaacaattctaagattttccactgggtggcattttatttaatgttactacatacagtcacgcatcacttaacaaagggataccctctgagaaatgtaaagttaggtgatttcatcattgtgtgaacatcatggagtgcacttacacaaacctatatggtttagcctactacacacctgggctaccaggtctaggtacctgggttacctattgctcctaaggtacaaacctgtgccacatgttgctgtactgaacactgtaggcagttgtaacacaatggtatttttgtatctaactgtatcttaacatagaaaagatacagtaaaaatgctgcattataatcttacatcctatcataccattatcgtatatgcagcctgctgttggctgaaatgtcattatgcagtggatggctatacatgcttccagttggggcaggtccacaatctaaattatttctgggaattgccgtttaagacttctgaagagtggggaaatttgcttaggtgggattctcttgctttttacactaattaaatacatttttaaaaagttccttttccacactctgcacacttcttaccatcattcttaaaaagactagaagtttgagcataaagacaatatttttttcatagttgcatacgtctacctcgaataatgcctggcaaagagtttatgggtgctgcatacacgcatgcctgatgaatgaatgaattaggaattacggctgcagcagtacgctacttgtatgcatttaattcgaattatcagactatatagatgctcctagacttatgatgggatcatgtcctgataaacccatcataaattaaatggaaaatatcaaaagtcaaaaatgcatctaatttacctaaactgccaaacagaatagcttagcctggcctgctaaatgcgctcagaacacattagcctacagctgggcaaaatcatctaacacaaaacctgttttataataaagaattgaatatctcatgtaatttatcgaacaccgacctgaaaatgaaaaccagaatgattcgatactcaaaatatggtttctactgaatggttactgctttcacaccatcgtaagtcagaaaatcgttcagtcaaaccatcatgagttggggactgtttgtagcagggtcagcaaacattttctgtaaatggctagatagtacgtgatttagccttggtggaccatactggttttgtctcaacagcttgatgctgctgttgcaggtttgaaagcaggcagatcatatcacaaggcatagctgtcttcccatagaactttattagcaaaaacaggcagtctgctggatgtggcccatcagctgcagtttaccctgatctacatgaaagcatacactggcatcatacaaatgttagaaaccaatgtagtaaaagataaagagatttcaagactctgtgagtggtagacagcatgctctccattcaccaaatcccattccaccttccacctgaacacatgggaaaaccacatttcccagcctcccttgcacttagcgggagccttgtgactaaatctggccaatgagctgtgtccagaggcaaagtccaccatgtccagacctggcccataagacttcctgaacactgctccatgctctcttccctcccctgcagactgggtgcaaataatctagtgaaggactccagggcccttcaagttggtgtactcacttgctggagtgagcctggatccctgaataactctgtggaggagagtcctccccacccctactatgacctcataatggactgtgaagggttgtaaaatacacctgtgctgttaaggcactgaaattcaggggtcattagcctgtcctctctaataataccatgtctgggctcagatctggataaaggaaagaaactgaaaaagaaatagaattctctccagggctaacagcctcctgtctggtgtacctgcactttttgattggggaagagaggaacgaggaggtcttagtgctcgcagtcttagaaagtttatgtataagaagcagtactgtagtttgggtctgagaaacgggaccttgaagagagagtcactgtgaggtagggtggcagaaagggatatataacagataagtagcttttacagaaattgtacattgaggctgggcatggtggctcacgcctgtaatcccagcactttgagaggacgaggtcagcgatcatttgaggtcaggagttggagaccagcctggctaacatggtgaaaccccatctctactcggcgtggtggtgtgtgcctgtaatcccagctactcgggaggctgaggcaggagaattgcttgaacccgggaggcagaggttgcagtgagccgagattgtgccattgcactccagcctgggcaacagaatgaaactccgtctcaaaaaaaaaaaaaaattgtacatgaactgcaccaaaacttgtagccaggatttatacttggtgtgatagttcatctctgtactggttaaaatggatttctttaagctagcctagaacctcccatgctaacatcatttatctctctctctttggctgtataaagtaaaatttactaaagttaaaacagtcaaccagtaccacaacctcagtggcttagcaaaatgaagttgattttgtagtcacatccgtgtcaatccagtataagttggtgggggtgtggcacttgggctctgctccacagtcattcaaaatccagatccccatcaccttgagcatctccccccaccccttctccttcactctccctcacctgagaaatgggaaaagaaagatggagggggattgcatgggaggttttggaggtcaggcccagtcatggcatgcattgcttcagcctgaattccctcactcagaactcagttacacgggtccacctcactgccaggaaggctgagagacacagcatgactcgcgagcccaggaagaaagcaaaataggatgtactggacccgcggccatcctggcttagtgggaaaatactttgagctcccaataaccaagtgtacaagtaagtttctgaaaccaacctgttcttaaattgaagccttgctggtgttttgttgaattactgcaagcctttggtaatgcttccttgtctggaagggccgtgaaaataacccaacaccagaaagagaatgagatttctcacagctgattgtgccactgcaggaagcccacaggtggggcaaagcatttgttacttctctgtggaggggtcttttggtctgagagctcccgtgagccctgccgctctggtcactcacgttttctgccctctgcctttccctgcagagtccccgccttttccccagcagggccctggtcactggaaaattgggagtaaaccctgtcgtcctcccagcagcaggctccgcagattctgaagataggcacagacaaaagagatattcctcttgctaagttggactgtcagtgataaaacaatttttatgtgctaaagaactaagagaactctgtcaactagaggaggaagggaaggaacaagacagtgaacaagatggtgacagggacagaaaactctatcttcccacataacatgaccacgtttaatggcccctgggcacgtacaattaactggcccaaacaaatatatattttttaaagatggggtctcgctgttgcccaggctggagtgcagtggtgtgatcatagctcactccagcctccgactcctaggttcaagtgatccttc

SEQ ID NO: 1883572 - DNA, 4001 bp, Homo sapiens
caagtgatctgcctgccttggcctcccaaagtgctgggattacaggtgtgagccatgacgcctggcccagggccctgcttttcctgcctcagtgttccctaggattctgcccaccttcttgtcttgatttatgtatataggttcattcattcattcattcattcattcattcattcatatattcattcatttgagagatatttaggctctgagctgggtgttgaagaatcagcaaaaaacaagactttcccattcctcataggtcttcagtagatcattatttacactgaagattaattcttgctgtgaaggaaacgatcaggttatgggagcgtttgggattgggtgggagtggtgaggtcttatctggacagatcagggaagcctcccctaaaaagtgagacctgaagagggagagggaggtggctgagtgagcagggaatggaggagccccctaggcagagaggcgacctgggtaaggctttagtgagggggagtccttgaggaactgaaagaagtgagggaggctggccagggaggggggcgtggcaagaggagggcctgggggccaggcagcacctaggttatgtgggcccttgagtttggattttatgctagacctctgggaaccattggaagttttaaagcaggagggtgacttgcccagatttcattatcagaacccttgaaagggacagacacaaggaccatcctgataagccatgagggtgcaatttttggttcttccacatcagggtatcctgatgctgtgccttggtacggggcttgtcattgggcagtcctgggaaatgtgcactttcccaggattctctcagctctttgcattttttagtttacccggccagtccttgctaagctgctgcagtggagagggaggtgaagcagacaccaccgggccctctgagatccactctaatccaagacggagacagtggaagttaacgcccagagtgctctgtgataagtgccaaggggctcagggagacaaagagtgcttttccttacttgagagtcaaagaaggctgagaagggggagttgggcattccaggcaagaaggcaccgtaggcacaggcttggccgctggaagagcccactgcgcctgggggctagtgagcaggagtgtgagggttgaggtggggagctggttagagaggttttgaatgctgggtttctatcctctgggtaccagggagccatggacaggtcctcagctgaggagtgacttgatccatgggatttcagaacaattagtccatggcaggcagagcggagggtggatcagaggacagcagcactgggagctggttggagagaatgagtaccattgctgaagccttgtcactccccccaccgcacacacacagcaacatcctcaacgcccctttctgttccatacctctgttcggttatccccgaattggccggccagcctgagctgtccagagccctttcacagcagcactggggtgtgttaaaccctgggctccagaggcaaacaggtctgggcctgaaacatcaccgtagccctgacttgctctgtgcccttggacaagtcccttactcttctcagcctcagtttccacatctgtgaaatgggggtgataatggagttggtgatgattaaacaatggggaaatcaagtccttagcacatgtctggtgtataacgatggctgtgttagctttgtgtccttgttgattgtaatggcccagtccatgttgtaatctgcccctcagggagttcttgtctttggacataaatctgaattctcaactagaaacaagatgtccccagcagccccaaaggaagcctctagtgggacactgaggggattggacatgctgttacccactgggacccggcacagggctgggcacacagaagcctggactgggttttatttgttcctttatccccagcactcagcacaaggctggtacagcatggccaggtggctgggttctcaaaaatactaaacaaaaaaatgaaattaaaaaaaaattattaatcttggacatcatcccccagcacctttattttacagctgaggaatctggggcccagagaggaacagtggctcatccaaggccactcagctcctcagtggcaggccctgaacctgttcatttctccctgctcacatgtttattacaattctaatttttgaaatcctggtaagttaaaaatggcatcatgtcccacctccctaatttacctttggggaaactggggcccagagaatggtagtgactccttcaggtcctcagagagggagaagcaggaaaagggcctcctctccacaaagcatacccccactaatcagcagtaggcaggcaggttcttccccccaaaattgacggccttgtgcttaaggaagcaaagtggagtgtgaacaatagtttcctgaggaagtgttgggttttaattgtgttgaggagaagaaccatttccggaactgtgtgtgcctgtgatgcctgcggagttggcttggcacagctatttccagactaatcctgagtcctatttataggctgagatgattaggttggcctgtgtcaggagaggcccacatagctccccccagcctcgcgatggccgaggaagaagccctcaggggcaattctgacccatgggtgagtagcacgggatctggggtggtccccgaagccagctcagaggagggacgccagggagacccgagggaaagtcccgctcctgactcctagttcaacaccagccaggccccctgcagagatgaaaccagttccaattctattctctccctgcttaaaaatcctcagtgtgtccggtcaggccaggactccgtagcagtcagaccccttctccccgaggtatccactgtctcaaccccagccatgcttctccaaactgtttacgcttccttgtgcaggccacacccccaagcctttgcgtctgttgttcccaccttcccaaaagggaaactccatttatcctccaaggctctgccccaatgcccctcctccgtggctctgttgggccatgggtgctccctcctttgtgctcccagggcccacaactgcttgaatgactattggtgttcctgtttgtgtgccctctgggccgggaagtcagagaaagaaaggagacaatttgtgattgaacagccactgtggccatcattctccttacctgtctgatgagagctgatcttcatgccactgtgtacagtaggtattttttaaaggtgtgtagaagtgagagtcagacttcggacttcagagtcagacagccctgaattcctaatggtgtaaccttgggctgaacctctctgagcttttgttcctccgtctataaaaggagacaatgccagccatgggttttggggaggattcaacaagacaatgcttataaagtacttatcatcacaatgggcttctatgagcataggaggtgttatttgcagatggggacgttcattccggggacgtccctatctagggccccacacaagggagtggctgagactccaagtcttggagcctccgactccaccctgtgttctccctcccctccctctcttggccccctgggcctattctcttccccagatcagggaaagctttgtttggcgattgtttttcctaagaagtttcctctgtggggcctctgggtgactcagccctgagtcaccgggaggctgaggacagggggaggagtgggagggaggcggagggaatggagagacgagaagaggaaagggctctaattctagccctggctctcccactgtttgatcaactaggtctgaccaggcccctctcctgcctagcctcagtttccccaaatgtgaaaggaagatgtgggcccagtcctggctgagcctcagaatcagaggttcccgggccccaccctagacctacagactcagaggctaggggtggggcctgggaatctattgtttcctgagctccttgggtgatcctgctgcacacctggt

SEQ ID NO: 1883573 - DNA, 4001 bp, Homo sapiens
gcaagacagtttaatgcatacacaatgaaaacactatatttctcactctctctcacatgcacagattaaaaccccaaagttttcactatatttcctctttcttatacagctcaatttttaacatgcagcttccttataatctaaaaacaattttaaatatgattatcataaaaatattttaaaacagagatgaaatgtgtaaaggcagatatagatcatccatggttacattggttacatcacatttctttagaaacagaactgtttctactcctgtagacaaacttctctctcacacatttaaagtgaggttagtgctgacataaaattatcgctctactcaccatctgagtgtttgcactgtgtttgaggtacattttcttcattttcacagccccaccactcttgagagtatgagtcaacagaagtttgcaggctaaaaccattcaataatattttcatcaatactggaatgatagtaagtaacattacacaacatcagaggccaaaaatttttctttgttgaagcccaagattttaacttattcttcattacctgaaaatactgctcatttaacctcttcaggaaaaaaaaaaattctgtagatgaataattcctgccttaatgcttcacccaagacagttccttcatacttatcctccaatgctttgttcttttcatccatttgatgtagcaggcaacaagaatcacctttcctttggtgatctgacatagcgatctcttatgtttttgctaattgtttgataaatatttagtaaatttttccacggtatgtatgcactattttttgtagttccaattctaaaggttttattaatgaatgaacattgtcatcttaaaagaacaatttctcagtgcttcataaacagctctaaatgctggttgcttatcatcatggtaaacacctctgttcccgtgaaaaataaagattccttcttctgcttcttggcaactgcttccatatagacagtgatctggacgacacttccattgacacggaaagacaaaaaggctttctggattatgaaaaaacaggatatccaacagatcttgatcgcccatgtaatgtttaacttgtatattttaagccatgtcataagtatatctcctcattgtagtcacacagttgtcatattattcttgaaatacttccttctcattcaagtcatgtttgtcaacataactccagagtttactccagcttttccacactatggatgcctagcaaagcgactataccatcctatttgacattccttgtgttctggggccattgcagaatttgtgtggaattaaatttctttagtaaagaccaaatattatcagctggtcttttaaaaaggctatcagtgtgagagtcaacttctttcaggaataacggcaaggacaatctctgcaaaccacatggtttaaagagtttttccactctgctgcattctcacttggaaaggttatggagtatattgtataattaaatatttgtagaaatgacccctgtcaagccttcctttaaagctatgatgtagttgatcttcagcaaaaatctggaattgaagaggtttgatcctgaaaataatagctgacttcaacatggtcatagtttcttccagtctttcacctagatacattttctcaacaggctgtattttcagactacacctgtcccacctgcggggatgagcagcgggacaagcgctgctcgcgcctctcaccgcaccgcatccgcctcccgccagccaggaagccactgcggcctgcggcttcccgccaccacggcccgctccttcctccggggacacggggagctggctgaaggcgtaaaggagcgagcagaagcctcaggccagacacagagccaccacgcgcggtagcgccgcatggccccagcggcgttcctcggtctccgtctccgccgcgcccgcctgacgaactggagcacagggaccatagttctggaaatttatcctttttctctccatggattcagcagcagcgtctaaaagaaaaaaaatcatcaatcaatcatttatatatgttttaatataaagatataaaacagtggaaccagtggaactggatagaaagtaattcagttttacagaacacatctgtttttcaggctcttacttttcttaaacataaaagagccatatatatttctatggaattccccttttacttaagaattcattatcagcgaattagtgtaacgaggctgttttgttagaggctgtggttgcattcaaaaattagaataggaacaacgacttgtaaaaattcaacactttattttatttttgagacagtttcactgtgttgtccaggctggagtgcagtggcttgatctcagctcactgcaacctccccctccagggttcaagccattctcctgcctcagcctcccgagtagctgggattacagatttgtgccaccatacctggctaatttttgtatttttagtagagaaggggtttcaccatgttggccaggctggtcttgaactgccaacctcaggcgatcctccccgctcagcctcccaaagtgctgggagtacaggcgtgatttaacattttaacattttaaactaccacttactacattcactgtgtctgtgatttaatatacctttttcagtggccacaaaattataaaatggatacagaatagtctcttcaaaacattaaggaagttctttcttttttctttttctttttcttttttttttttttttttttttggtttgagacggagtcttgctctgtcgcccaggctagagtgcagtggcacaatcttggctcactgcaacctccgcctcccgggtttaaggaattctcttcttcagcctcccgagtagctgggattacaggcgcccgccaccacgcccagctaatttttttgtatttttagtagagacgaagtttcaccatcttggccagactggtcttgaattcctgacctcatgatcagcccgcctcggcctcccaaagtgctgggattacaggcgtgagccacagcgccccgccgcaagttctttcttcttgaaaggattataaatataattcatactggcatgacacttttactaatatagattgacttttcgcttcaaataacccattcgtatatcgaaattaattttggtcagtatgtgtgtgtgtggatgtatgtgtgtgtggatgtgtggatgtatgtgtgtgtggatgtgtggatgtaaatggcagtaaagggtaaaagggaaggtggaaaaaagggagatggtctaacattttccacacatttttaaatacacaaaatgtatatttaacacaatacacatacaataaaatatgtagtaaaacaatggtgtggtgaaaacaaaacattgcgaactagaaaaaagacttagccgctggtcctgtcggatccgccccgcggtggccctccagccgtaagctccacgcagttcaacaagggcccctcctacaggctcttggcggacgtccagaacaggcttctgcccaaatatgactcccagaaggaggcagagctccgcagctggatcaagggattcactggcctctccatccgccccgacttccagaagggcctgaaggacgggattattttatgcacactcgtgaacaaactgcagccgggctcagtccccaagatcaacggcttccgtgtagaactggcactagctagaaaacctctccaacttcctcaaggcaatggtcagctacggcatgatcccgtggacctatttgaggccaacaacctgtttgagagtgggaacaatatgcaggtgcgggtgtctcttctcgccctggcagggaaggccaagactaaggggctgcggagcggggtggacatccgtgacaagtactcagagaagcagaacttcgacgacaccaccatgaaggccagccagtgcgtcatccggctgcagattaccaacaaatgtgccagccagtcaggcatgaccgcatatggcacgag

SEQ ID NO: 1883574 - DNA, 4001 bp, Homo sapiens
gcaagacagtttaatgcatacacaatgaaaacactatatttctcactctctctcacatgcacagattaaaaccccaaagttttcactatatttcctctttcttatacagctcaatttttaacatgcagcttccttataatctaaaaacaattttaaatatgattatcataaaaatattttaaaacagagatgaaatgtgtaaaggcagatatagatcatccatggttacattggttacatcacatttctttagaaacagaactgtttctactcctgtagacaaacttctctctcacacatttaaagtgaggttagtgctgacataaaattatcgctctactcaccatctgagtgtttgcactgtgtttgaggtacattttcttcattttcacagccccaccactcttgagagtatgagtcaacagaagtttgcaggctaaaaccattcaataatattttcatcaatactggaatgatagtaagtaacattacacaacatcagaggccaaaaatttttctttgttgaagcccaagattttaacttattcttcattacctgaaaatactgctcatttaacctcttcaggaaaaaaaaaattctgtagatgaataattcctgccttaatgcttcacccaagacagttccttcatacttatcctccaatgctttgttcttttcatccatttgatgtagcaggcaacaagaatcacctttcctttggtgatctgacatagcgatctcttatgtttttgctaattgtttgataaatatttagtaaatttttccacgatatgtatgcactattttttgtagttccaattctaaaggttttattaatgaatgaacattgtcatcttaaaagaacaatttctcagtgcttcataaacagctctaaatgctggttgcttatcatcatggtaaacacctctgttcccgtgaaaaataaagattccttcttctgcttcttggcaactgcttccatatagacagtgatctggacgacacttccattgacacggaaagacaaaaaggctttctggattatgaaaaaacaggatatccaacagatcttgatcgcccatgtaatgtttaacttgtatattttaagccatgtcataagtatatctcctcattgtagtcacacagttgtcatattattcttgaaatacttccttctcattcaagtcatgtttgtcaacataactccagagtttactccagcttttccacactatggatgcctagcacagcgactataccatcctatttgacattccttgtgttctggggccattgcagaatttgtgtggaattaaatttctttagtaaagaccaaatattatcagctggtcttttaaaaaggctatcagtgtgagagtcaacttctttcaggaataacggcaaggacaatctctgcaaaccacatggtttaaagagtttttccactctgctgcattctcacttggaaaggttatggagtatattgtataattaaatatttgtagaaatgacccctgtcaagccttcctttaaagctatgatgtagttgatcttcagcaaaaatctggaattgaagaggtttgatcctgaaaataatagctgacttcaacatggtcatagtttcttccagtctttcacctagatacattttctcaacaggctgtattttcagactacacctgtcccacctgcggggatgagcagcgggacaagcgctgctcgcgcctctcaccgcaccgcatccgcctcccgccagccaggaagccactgcggcctgcggcttcccgccaccacggcccgctccttcctccggggacacggggagctggctgaaggcgtaaaggagcgagcagaagcctcaggccagacacagagccaccacgcgcggtagcgccgcatggccccagcggcgttcctcggtctccgtctccgccgcgcccgcctgacgaactggagcacagggaccatagttctggaaatttatcctttttctctccatggattcagcagcagcgtctaaaagaaaaaaaatcatcaatcaatcatttatatatgttttaatataaagatataaaacagtggaaccagtggaactggatagaaagtaattcagttttacagaacacatctgtttttcaggctcttacttttcttaaacataaaagagccatatatatttctatggaattccccttttacttaagaattcattatcagcgaattagtgtaacgaggctgttttgttagaggctgtggttgcattcaaaaattagaataggaacaacgacttgtaaaaattcaacactttattttatttttgagacagtttcactgtgttgtccaggctggagtgcagtggcttgatctcagctcactgcaacctccccctccagggttcaagccattctcctgcctcagcctcccgagtagctgggattacagatttgtgccaccatacctggctaatttttgtatttttagtagagaaggggtttcaccatgttggccaggctggtcttgaactgccaacctcaggcgatcctcccccctcagcctcccaaagtgctgggagtacaggcgtgatttaacattttaacattttaaactaccacttactacattcactgtgtctgtgatttaatatacctttttcagtggccacaaaattataaaatggatacagaatagtctcttcaaaacattaaggaagttctttcttttttctttttctttttctttttttttttttttggtttgagacggagtcttgctctgtcgcccaggctagagtgcagtggcacaatcttggctcactgcaacctccgcctcccgggtttaaggaattctcttcttcagcctcccgagtagctgggattacaggcgcccgccaccacgcccagctaatttttttgtatttttagtagagacgaagtttcaccatcttggccagactggtcttgaattcctgacctcatgatcagcccgcctcggcctcccaaagtgctgggattacaggcgtgagccacagcgccccgccgcaagttctttcttcttgaaaggattataaatataattcatactggcatgacacttttactaatatagattgacttttcgcttcaaataacccattcgtatatcgaaattaattttggtcagtatgtgtgtgtgtggatgtatgtgtgtgtggatgtgtggatgtatgtgtgtgtggatgtgtggatgtaaatggcagtaaagggtaaaagggaaggtggaaaaaagggagatggtctaacattttccacacatttttaaatacacaaaatgtatatttaacacaatacacatacaataaaatatgtagtaaaacaatggtgtggtgaaaacaaaacattgcgaactagaaaaaagacttagccgctggtcctgtcggatccgccccgcggcggcgccctccagccataagctccacgcagttcaacaagggcccctcctacaggctcttggcggacgtccagaacaggcttctgcccaaatatgactcccagaaggaggcagagctccgcagctggatcaagggattcactggcctctccatccgccccgacttccagaagggcctgaaggacgggattattttatgcacactcgtgaacaaactgcagccgggctcagtccccaagatcaacggcttccgtgtagaactggcactagctagaaaacctctccaacttcctcaaggcaatggtcagctacggcatgatcccgtggacctatttgaggccaacgacctgtttgagagtgggaacaatatgcaggtgcgggtgtctcttctcgccctggcagggaaggccaagactaaggggctgcggagcggggtggacatccgtgacaagtactcagagaagcagaacttcgacgacaccaccatgaaggccagccagtgcgtcatccggctgcagattaccaacaaatgtgccagccagtcaggcatgaccgcatatggcacgaggaggca

SEQ ID NO: 1883575 - DNA, 4001 bp, Homo sapiens
tatcgaactgtggaaactgggatttcaagcatgctcgtctaatcactatactaataatgcttcaacctgccaatttattttttattctgtaagccataaggagccaatgaaaaaaattaaggacagcagtaatgatcatctttacatgctagaacacactactcagccacgtgcaaggtggactgacgctggggtgaacaagggtcttgaaagagatagtcaaagtctgggtcaaaaatgctgaggaaattctgagcataagaatgcataggagaggataaaaacctaaaatctgtatctaataaacttagctagactttctgattgttttaagtatgggaagggatgaaggaagctacctcgcaggttactagctgggccactggttagtaattactgtccatcaattcatgagacaggaggaggaactggtgctttagttttgtgtagcaagcaggaagaggacaagtctacttaacgcgaatcaaaatgagagcaagcaattatacagaatttctctccctcgacaagataagcttctcatattacagagatcttaactttgaaatgcttttcaaaatagggagtcacttgggctgggaggggacttcaactaagtcctcattttacagaggaggcactgaggggcaaggctgtttcaataccctgtccagagtgcgcactgttcaggcaaaaccaggactaaaaaccagctctgccggatccgttctacctactgctccttctgcttcagctgccctcccaacctactaatagggatttacatccccaaatacgttcatgtaaacacttagcattcttcaactaaacacaaaatcagatatgtaagctaaaaatctaaagccaaaaacatgtatttaatttccataaaatttctacttttctttggaaaaactttcccattgtgtcagtttctattcactgtaacattccctatatttcaggtcctaagaccaaaaaaaaaaaatcctttttaaacttaggccttgaagaaacgacaaaccctctaggcttaatattccaccacatgaaaccactgacacagacaaggcctgttctgccgaaaccaggccagttaagtcagggctcaattgcttctgtattattgtcagaagccatctccacctcaagcaaaagtaaaactggagaaagaggccagcctaacttgctcctcggctggtccccagcaacgcccctggaaactctgctccccatcgctaggaccgcccctccgacgccgggagaacacggaaggagcagcaaggcgctgcccggcatctgccgccaacttccccgtcgacggtctgattcaaatgctccctgttttccatgtagacttggagagaaactgcgccaggaaaactgttatcaactgttacagggacggagaactccgaaataaccaaattactacttatattcactgtcccatgtctagcgccttttgaaacaataaccaaatcctgtaaagttttgtctgcgatgagcagtcactaggaaaaacctgtattcgtgatgaattcgcctcccccccagaaaaggaccgactttccaagagccgaagcccctgcccggagcggcgggctcgcgggccctgggtgcgaccccacccagcctccccggcattcaggccgccgggccccgcgcccgcgctcacccaggtgctccccgcggcctgcgcgcccgcgcgcttctccggcatggctcccgcctcgggctccgacgccgccttctcctccagctccggcggcggctccacgctcatgccgcggccatgcccgcgccagctcggggcgctccgggacgacggcgacgccgcggaggcggcggcggtgcccgcgccctcatgggctctgcggcccgcggcggcctgcgggtcaggcggcggcgccgagggctgaggaggcggcggaggctgaagctgcggatcaggctagcagaagaccgcagctccaggaaccgaccacttagcaaaccgcaccgaccccgactgtcgcagttaccggcggcgtcaggggcgggctgcacggttggaggccccaccccgcacctcagctcccgcctcgagaacgagtcccgcgcctgagtagcctccagcgacgccacgcccacttcagagacccctcctttacctcgcgactggccccttggcatcaggacttcgcggcgcgcgggaagtacgtcatttcgagagcccgtacgactaatttctttttccggagaatctggactgaggctagcaagcgaggaggggcaaactcgtgggggtttggtagtgattgcagttcagttttggtcttggtttgctccaacccgccaacctctcaagtttttctatggttctccaagaagaaaataatataatagcaatgtttcccaaacgtacttgaacacaacactttttattcttgacacatgattaatatcttgcagaatgtgtaggacacagttggaaaagcctggctttttatgtttatttattttgaaagatatgcacctaatactgaaatataaaaaagcctacaggcctggcgcggtggcccacacgtataatcccagcactttgggaggccgaggcggctggttcacctgaggtcaggagttagagaccagcctggccaacgcggtgaaaccctgtctctactaaaaaacaaaaacaaaaacaaaaaacaccaaaaaaattagccgggcttggtggcgcacgcctgtaatccaagctactcgggaggctgaggcaggagaatagcttgaacctgggagccggaggttgcagtgagccgagatagcgtcactgcactccatcctgggcgacagagtgaggctctgtctcacaaaaaaaaaaaaaaaaaaaaaaaactttttacaaacatcaatagaaaaaagaataaaattatttctattaacaggattagtaattttaattgaattaaagtcatttcatttaagaattttttcaggttgggcgtggtggctcacgcctgtaatcccaggactttggcaggcagaggtgggcggatcgcctgaggtcaagagttccagaccagcctggccaacatggtgaaaccccgtctctactaaaaatacagaagttagccgggcatggtggcggatgcctgtaatcccagctacttgggaggctgaggcaagagaatcgcttgaacccaggaggcggaggttgcagtgagccgagatggtgcactgcactccaccctgggtgacaagagtgagacttcgtctccaaaaaaaaaaaaaaagcttctttttcgcttcccacccaccacccccaaacacacacacacacacacacacacacacacagacacacacacacactttgcagaagtctttacttttatttatttatttatttatttatttttgagacagagtcttgctctgtcacccaagctacagtcacccagcctagatcagtggcgtgatctaggttcactgcaacctctacctcccgcattcaagcgactctcctgcctgagcctgcggagtagctgggattacaggtgcgcgtcaccatgcccggctaatttttgtatttttagtagagacggggtttcaccatgttggctgggctggtcttgaactactgacttcaagtgatccgcccccctcggctcaccaagccggcctggtcttttttttttttttttttttgagacgaaatttcgcttttgtcgcccagcctagatcagtggctggatctcggctcactgcaacctgtgcctcctgggttcaagcaattctcctgcctcagactctcgagtagctgggattacaggtgcatgccacgacctggctatcttctgtatgtttggtagagacaagttcaccatgttggccaggctgttcttgaattcctgatctcaggtgatccacccgcctcgacctcccatagtgctgggattacaggcctgagccactacacccagcctgatttgtctacttttctgaatgattgttttaac

SEQ ID NO: 1883576 - DNA, 4001 bp, Homo sapiens; identical to SEQ ID NO: 588474

SEQ ID NO: 1883577 - DNA, 4001 bp, Homo sapiens; identical to SEQ ID NO: 588476

SEQ ID NO: 1883578 - DNA, 4001 bp, Homo sapiens; identical to SEQ ID NO: 588477

SEQ ID NO: 1883579 - DNA, 4001 bp, Homo sapiens
tttattttatgaaggaagtttgtcaggttttactgacaattaacatagtactaatcaaaattataattattgcaactttatatgttataatttgatattataaaatattaagtatattaacagcttttcaatgcatgaaatcaatctgcagacatatatattttcaaacggataaaccatgcaggtaaaatgaaatgtgatccactttttttttcatgtctaaccttatttctttcctttatcttaaagggaaacctctcacaactatttcttatctattttgtcacagatttcccttctttgattcatgcttccacctactgcaatacggtttatagtgattaattctaccaatgcagctctcactaagatctccactgccatttatttttctgatgtagtggacagttttaatccatatttcccccaagtctattgattcttcttctaaatacatttattttcaagacacacatttatcaccattaagtctttccttcactaatgtacagttttccacccttgcttcctttgtgtctcttatatcccctctctttaaaggtggaaggtcctcagaatcaattttaggttcttttttcctttacttttctttttcctctccacatgactgcctctatttttgggctttccattgccagttatgaaccttcaggcattgtatttcttgaaaattgcaaattcatatatctgactggaaatacacatttgcaattgtatgtttagaagtcaatttattgaggatattgcttcttttatttttatttctggaatgcctaaatccatcctcttctatgagaaattcattgttttttttttcctatctcacattatagcatttaacataactgatatcaattgagaacgattattgtttataagtttctttcctcacaaaaatcaaaggtacatgagaacaggaaatgtatttgttttttcaattttatatcctgaaggcaacatacaacatacaatctggtatagaaaaatctattttgacttataaccaataataggtaactgaatcgtataatctattttttaatcaggttaaataatcaggcttggagtttcattttaaagaataaacaaatacaaggagttttccatagtaaaaatttaatgaaaaaagcaaagtaatatattgactaaatataaagaacatgtattgttatattaaccacaaagtaaaaatacatgatacatgaaaagaagattttaaatagtataaatagttaaataattatttagacaaatagataaacagatccatcagcatgatcatccgtaaggaactagtgcctgtacagctgaacatgatgctgcttaacattcctgaaaacattttaaaattttgattcaactcatgtcatggatatagcaaaaatgagaaatggcagaattcatgaacgtgtgagatgatgtattaatcatggaaatgtttctcatttccatgttgaaccagttttcattccttcctccttaatctttcctgcaagttcgttcataaagagaaggatctcatgatttctgctctgacagcctcccaggaacaagggctatacttcttctttgtcagataaagagtgattctttgaaagtattttctcacagccaggatggagtccacattcctcaggggagtctcttccactccaaccttctacatcacacaggcttccaggtcattcagctgctggtaaagttcagtgtagaatttgtctaaaagggtcgcatcccaagtatcagatgagtcctttgtgctgaagaggttgaaggtctgctgcatcatctcatggaaaaggaagatagcttgaaccttctggaagtggttgccatgaaacacctgatgatggaaaatcaaagtcatgtctgtccttcaagtaagaaaaaggagagattctcctcatttgtgtcaggagtatgaaggccctcctgttacccacgctgtgggcctgaggcagatcacagcccagaggcagatggacttgcagctgagcaccatcatagccatcagtaaactaaagggcaagtccattggggatgtttcagatgctactgggctggctgagagagtgactctgaactctggattttaggttatctgaagaccttattttgtacgtaaccttaaatagggaacacactagtttctattttctgaatgccccctctcttattttctatttctgtttttgttttcctttatgctctctctacagggctgtagagcagtttcttaactacttctttttcattattacctcctcttctccttccccatagtctttttagaaatgtctctgtaattcaaattcccactaatatttaataacatagatatactatatatctgctgatgttctatgcacacatctctatatataagcagtataaagtttaatgtttttattcaatggagggttaagaatgactaaacattttaagctaaaagttaatagttaaatttaaaacccatgaatatttaacttaactccatatctaaattttaaagtgatttttatataatttattcacttatataaattgtaatgtgtcaaattacatgaccaaattaacaagttataaaaacaaataataatacctaatataataaaatacttaaaagtcattcaaacctgctaaagacttaaaatttaaattattttttaacattaactgttagtgcacttaacttttaattttgcttcatggggaaaacttttgacttcagtagctgctagatattcatccagatattgtcaagattgttctcttttcagtgctgagacaattaatgatgtgttgaacaatatcagtataattaaataatataatataaagtatttttaattctcaaagcccacaacacgttcagaattgctaaggatcagacataagcaacatccacgagatggcaaatgacagcacatatgtatgcagtggacacctctcatgatatgacttagtcatctagtaaaccttgaaatgtcctctactcacagcacccatttgccataggtttgcagcactgatcttatataccttttgtgtatcttccatggactcaatgtcaatgcttctcatgtgatacacaagaatactcaattaaaaaatgctaagggataagttttttttcagatagagttgagctttaaagggccacaaaccattgaaataggtaagatttgttcctgctcccaagaattaacttattgttcctttgagagcaatatcatacccaatgagactacacaattgagaaaaaatcagttggattaaaaaaatttgtacattaaaattcaaatttccaaagaacctgcaaaggttccaatactagttgattcttatctaactaaatgaaacaatttttgtcctaaatgttcatgatgggaggtaaatgtgataacatatatgggctgtacaattgttttacatgccatgccagacaccagagatatttgtttctaattttcattttcattgaaaacaaaagttgttacttttgcatcctaaagaatggagacaagaagaaaacaaacgtgtatctaaatgtgattaaaatgttaaaaggaaaaaatatcttaatggaaaaaaataatgatgaaatagaatttacctacattaattccagtcacgatggaaattaaaggaaggggaagagcagaagcaaaattgtggaagagatgtagatcaaagggagcaaatgagcatgggctggaagaatagtaatcattcctggtcaggggtgtgttttcagctttgctgaatccagccttcacagagagtcatgggacacacaccaaccacaagagtttatacataaaaaaggcaaaaatttgagagtacaatatactctctgcataataggtaagtgatgatgtaccaagttctcccttagtgtataaataaactcaagagatcaatatttttcttatcacatctcttacaagaaacaagggaattgataatgtcaaaggaca

SEQ ID NO: 1883580 - DNA, 4001 bp, Homo sapiens
atcgtcttgaacttcccacaagaacagtccaaataaggcaactgctcaaactttaaccagtcaaataatttctttgctgtgctctgcatttactctctgaaagctttcaactacctctgggggagccccaaaccacttatgatttggagctgcctaattcatgaattgctgtctgttcaaataagctctttaaaattttaatgtgccaaagtttaccttttaacagataggaatagtacagggtgcactgaggacatataatgaggtggggggccagaaggagttggagcactaatctagtatggactggcagagaagacctctctaataaaagacatttgggttaagacctgaatgatgaacaggactttggacagtgaaaagcagagggacaaagattccaggaagagagaattgcagtgaaaaggactagagacagaaaggaacttgaaacacaagtagtcttacaataaacttaaaatttgacataacctaattactaaccaaattacaacttgatataacctaattccaatttgatataaccttaaaagcaacagaacctaatacataatgatccaaagtcaaataagatatggtgcctactctaaggaagctcagaggcaaataagtgagatgtattcctattctctattcctttttcatcatgaaaaagaaatggggacagggatcaatacttactacctaaatgagcttaagcaaattatttaatctctttaaaacttggataatagtatctgtcctgccaatttcaactgttaatatctgtcagggtccttaagtgcaaggaacagaaatcatctataaatgatataaaagctgaaaatgaatttattaaaggacattaagcagctcacagactctcccagaagctgaagaaacaagctagaggttctcctcccaataaagcctctgagtacctaacactgcagcttgcaacaacacactgatgctggacactggttgctggtgatagaacattgcagtctcggaaacgatgtagttactgcggctgtcacccttacttcaacagactctctgaagtcctgcttctggttgtcattcaagtttgagttgagtccaccaaattagattggagagtctagcaagcaataatactcatgtcccagtaataaggaagactaggaaagccagtatctgtcactttcagttcctgtaagggtgttggggggcagggtaagggagaaactctgccaaaaggatgacaaatggccactgcaaatagggtgagctcaaatgagataattacatgaaaatgtttcacaaactaagggagaattcagccacataacattatctcattttgtgttgtattgatttttaactcctcgaaggcaggcaagttggaaataatgtgtaaaataatgttaaaatcccaatacatatgcaatcacatttaagctgttatcaatgaagattggaaggaaacatacagtaaaagttattttattagagaagtgggatttaaggtgaagtagttcttaaattaaaaaaaaaaaaaaaaaggacactttccattgaattcacagtcttccccacaaacttggatccaaattctaatgaaaggaagcttaaagacgcaaagcttctggtgaaagcaggaacggaacagttggtgccagaatcgcatccatacttcatgatgcgttgtgtacgctatgccgtcctaataggaaggaaaactaccacaaattaggagtttagaaaattgcacaatgctgcctaccacttaacttcaaatgtaacctgttaacaacgttagccgacgtgaggttacctagggacatagcaaaactcgctagagttacttcaagtaaggcacacggaggttgctctgattatcaagaaaaccaaacgttcacataaaatgtttgtcttccagccgccccgctgttttccactttttccaaaaagcactgaagcgtggtgaagaaacaaacatatcctcaattctcgcgagagctccgtgtgtaaccaagggctgaggcggaggattggtcactcaggatgaggagcctccgctatcccgcccccgttgccgggatacgccgcggcgcacggcagttagtgggtaggcctgagagccgaggaaaactgagcgtgggcctcagaaagaagttaaggcacccgcgagccgggcaactgccctccttccgcgccggcggaggtgagaatccccgggtcccatctcttcctccctccctcccacgtctgttctcttgccttggagatgctgatccgctccaaacaaaacaaattcaaactcggtcttagctaactgttaccgtcgggcctgtagccaggccaggcatgtaccaattctagtcgagcgaaggttgcgaacagacctcctccaacagcccgacccctccccgaccccccgcaggagacccgccaagcacagagcagagggaaggaccgcgatgggctgaaggattttagtcaaagcaatacatttctgcctcttacagtggaagggacttatttctgtctgttgatcacagtgcgggcagttagcaactttccacttattcacctgtgtgagaatggttggcttagggaggataacgatagtaataataattagaagcagatgttttaaatgtaatacttatcgtcttcacaacagccctgcaaggtagatgtcacccttctgttttacagaagatgaaatcctgaggggttaattaaggtggcaagattatgcagccgctaactttgtcagcactagtttgtatcgctaatcattctggatccaaaggccaggctgcctctctgtgtgaataattggaaattgtgtgactctttgattgaataaccccgaagttagtggtatatttgttgctaatgcccgcctcttaatcccactggtaataatataatggtaagctttttttcaccacagtaaaacggtggcaaagaaaattgggtgaaattttttatgttgtacattttctcaaagttagcaggaaacctagagtaatatcttttccactggaaagagatgtttattgtactcgttttcttctggaaaaaccattttgatcatacaccgtcttccttttcaaagagtcatttcatgaaattcctttttccatttgaaattcttttgctttgtacatagagttcaaaatggcaaggaattagaatcagggagctagtggggtcaggaagattgatgtgaacatattcaaatgagatatctgaatggaaatttcagataaacaattgaaaactcaaaattggtgcccagttgaaagggcagaactgtagacattgattagtgagccgtacacatagttggagttataaagatgcatgactgtagaaaggatagaagcagtccaaggactgattacgagtaatgctaagaaaagtcagaaaagtagtactggacatagagtgtagaaacagagaaatcattttagtccaacacacgctttgtttgccttttttttttttgagacggagtcttgctcagtcgcccaggctggagtgcagtggcgcgatctcggctcactgcaagctccgcctcctgggactacgcccgccaccacgcccggataattttttttttgtatttttagtagagatagggtttcactatgttagccaggatggtctccatctcctgatctcgtgatccacccgcctcggcctcccaaagttctgggattacaggcgtgagccaccgctcccggtcgctttgtttgctttttaacaatttagtaaatttttgtaattggcaatacctttatgtacgaggaaatttaaaagatacaagagagaacaaagtttttgcttatcactgagacagattttggggatataaagatgattaagattcagctcttgccataaagggtgagaaatacttaagcagatcatttcaagtggtgtgataggttctggaataaagtaatacacaggatgcatggtagcatgtagaacaggcctat

SEQ ID NO: 1883581 - DNA, 4001 bp, Homo sapiens
tggcattagcactgctgtatcccagagcctagaatagacctggcacttggcagatgctcaaaacataccagttgaattttctgttgaataaggatagttagacggttaggacagatagagaggtgaggattacggacagagcgggcaaggatgggaggggcgggacatgaggactaggcagagtcaagaaagggtcatgagtgtcagaccaacaggcaggtggggcacttacccggcagtcactccaggacaacacagcttcacggacctgcctggctgcccatactggacccctgtggagggcacttctgaggtaaggctcttcctttacccccctccccactttgtgagaatgacagataagaagcagactgttaaaacctgggtggtggggggctcactggatcaaagcatcatgttataatctggagacagaggtcagagaacagggtagagagaggacccaggttggatgacaggagcaggggtggtgtcacaagttaggcatgggaaggggccacagtgagggtggcaagtcacaagtcagagttgggaggttgtagagcagggttcttctcacctggggggccccaggcctgggggcagggggaggaggcagacaccagggctgtagccacggccaccaggaccctgctcagccctgagcagctgctgctcatctgtggggagaggtagagtcaaaaatccccgacccctgagatgggaggctaaagcctggctcttcctctccaaaactgaggcttcctaggagaaaaattgatgcaccaagtggggtaaggctgttagaaatcactgcgggaactgacctgaggtcccctttcccactgtatacccagtgctttgcatgtgcgtgcgcgcgcacacacacacacacacacacacggacacacacaccccctcacaccctccatctcagtcctgggcttagggcccagaacaaaagccggaggcaacagactgtgccagcaactccccctccactgcccttggcgcccacccctggcaccaagcactggcaccagctcagccactcccattaacccctccagtccagctgttgggaattctggtatttacccccacctggtccagggcttatcactgcctctgattaacctaggcagaccttatcaccctgggggaagggtgtcatcatggatctgagcccatcctgcactcccaccctgaggcccacccctgccctggctgccaggcttctcgcctgaacctggctccttggtctggctacttgggccactcagctgggcctggctcttgacacttcgttggtctccagtttgtgaagctggatggggctagggtgcaggctggggctgtgtagttaagcagatccagatgccctggctgctgccagaggctgggggtgggcgaggagccagcagatggaaatggagacagggtggcggggaggggaggggagggaaggggatgagaggctgagaggaactgggagcctgcagggacaggcatgggggccacagcaccaagagatactcagagatcaggactaggaggtgatggggcagtgtgggaagtgttggaaagactggattggggtcagcggaaactcaaaaagctaacagtgtgtctatatggcaggtgggggatgctaggagagagagattctggacaagggggagcagaaggaggaaggcagtggtgaagtggatggagaacgaaggggcaggcggggaaagggctctgggaacaagaccagaagaggaagagcacggacccttcaggagtaggagtagagcagagcagggcctccacctgtctgtgtgtctgtctgagtgtgtccagttggctcacccctggccacccagccacacttaccctgcttagccccaccctacctcggtgatcccagcagcagagtgtccatagcctctaggacttcctctcaccagctacagcccccgtctcctactccactcagttctgggaccccagagccatcccctccttccccttccctgccccgccccctctaagccctggagctctgccgcccctagccaggccccctccctgctcctgcctcctccctccttccctcccacccaaggccctgggaagggaagaggcctcccccaagtctggaaaggaagccacagacacagccaaggccagcaagagggaaaggagggtggctaatacttatgtccctgtcagtgagagatgccctgtgttttcacacagccagacacagtcacattcacacacagactcaagaggcacagttaacaaaagggcatgcctttgaacacacgtggacacaatcaaatgaaaaatcagatacaaactccccctcttttcactcctcaccaaatgtttccttagggtacagctggctgtgcttccaggggaagggaggccccaggttgggggatataaggagaggccaaagagtccagttccccctcccctggaagttccagccatttctcacctccccctccattctttgggccccagcaccaggaaatgcctttggtcccttggtgccagatacacaagacccacagttaccctcagactcatacactctcacatgcggtcactcacagtcacacgggcacagccacaccgcctcagactcagacacacttacacatattcatacactcacgcagtcacacacgcacacagcccctaccagggctcacagcaccgcctaaaagcaactcttcatcatggtctaagccccctctctcagggagctcttagccggggcagacccgcatctcatcactgttacaggcccccaactagccagagatcaagatcagcagggaaggcaggcataggggcacagagagagacagagagaaaggaaaggcaaaactggaaatgcacccacacagagagaccaggggaacaaagctgtgaagaaacacacagaggtatctctagtaagacagcaatagggacagaaaacggcacgtaagggaaactgagccaagcagggaaacagaaaataaggagcagtagacctgatgctggggattcttgagcagaggaaggaggggaagccacgtgtgttgtgggtgtgtctgtcaatgctggacacttaagagaaaggtcagtcccatgggctcttgaggtaggtcccccaatacatgaatacagctgtactcccacacggtttaagttaggacccaggacacacacatagtcacaaacctcacttttgctctgctactgctgaagtcacacattggcacacacaaagccagccacccactctcacgctggcagacatggtctcaaaccccacagagaccttcccaaaacacattccctcatgtggtcacagtccctctcacacaaacacacaacccagtcccaccaaaaatgtgcattgacagatacacacataatcccacacttgcacagccacatgcacctccagctccatgcacactgacacacgcagtcacattagctgacagctgcaccaagtgacactcagaatcgcacacaatgatactgtcacacagacacagcctcacaggcacatacacactgacagtcgttagtcactcccggcctttcagatcatacatcaccctgccccgcccactcctgacaagactttggcgtctacaccaggcctcaccttccgcggccgctgccgccagcgccctctgccctcgccctcgccctctgccccggcctctactccctcccgccctgggcccccgcagcgggggtggctccgcccaggcgccaatggaaggagaggagtgaaataggggggctcctggcccattggagactccaactgccaatcacctccacccccacctccgccggacacttcctgtcccgtcccggactgaagaggctgcttgggacagagtctggagctggattcctgggtctccgcctgaaggcctatccaccctggaacagcaggactggaaacaagagccactggccaggtgattggagaa

SEQ ID NO: 1883582 - DNA, 4001 bp, Homo sapiens; identical to SEQ ID NO: 588507

SEQ ID NO: 1883583 - DNA, 4001 bp, Homo sapiens
aaaacagataaataatgattaaaaatattgagtcagtagtcaaaaagctcctgaaaaaggaaaatccaagaccagatagcttagtggagaattctaccaaatgtttgaagaagaattaatacgatttcttcacaaactcttccaaaagttgaagaggagggaacacttccaaacattttttatgaggccagcattaccctgataacaaagacagaaaaggacactacaaggatgacagagatttttaaggtacaaatgatgtattgttggaattgaaaatacaggctttgttagtacaaagatttgtgtgtggataggtggatgtgtactggtgtgtgcatgcatacatatacaagcttaacttgttttattgcacttcactttattatgcttctcggatattgcagtttgtacaggttgaaggtttgtggcaaccctgcaccaagcaagtctaccagtgccacttttctggtagcatgtgcttattttgcacctctgtgttacatctttgtaattcttgcaatatttcaaatgttttgttattattatatctgttatggtgatctgttatcagtgatcattgatattactattgtcattgttttggggcatcacaagccatgctccaaaagacaatgagcttaattgatacatatgtgtattcgaatggttccatcgatctgcccttcctccatctcaccctctcctcaggtctgttttctgagacacagcaatattgaaattaggccaattaataactctataaaggcctctatgtgttcaagtgaaagtaagagtcacacatctcttattataaatctaaagtgagaaatgattaagctgagtgaggaaggtatgttaaaagccgagacaggccaaaaggcccaggctggtctcgaacgcctgacctcaagcaatccacctgccgcagccttccaggtagctgagattaaaggcatgagccaccatgtccagcttctatgcattattttaaatggagtattgaagactctgttactgtagaactatttctaacttcaattctgtcaatattttggtcacaggccttaatgtgattacacgctggtctgatgttcatggccaggacattttgttttcctgttggacataaacaatctcacagaatatcaacttcagaaggttaatctgagaccgtgataagtgcaaacaaaaacaagggcactttataatgttgtctaagtgcagataaaaaacaaggtcttgatgccacccacaaaatacttaataatcatattgctcctgctttctgacagcatccaatctaaagtcttcactttctgagatcctgtccgaaatcaaccaattaaagtccaaatcgtataatagtttctctctaactcctcccactgagatgacccatagtaccccattccttgctgcaatgtaattatatttacttacaagtgtgctcctggtggtctttaactgaagggcactgactgggtcactggtgaagttccccgcaggaactgagtcagaccccatctcagggccctgcacaagataggtgcctgctctaaggcgtggaccctcgccacagccctggcccgtcttgacgggcgagggttactgtacttgtcccaaccgtacagatgagaaagctgagactcagggcgagcaacccgggtcccagcggagcgcccggcacacgccgacacttcagcaccagtcgcggtggccaccactgtgcgcggagatggctgcgacgcgtgcgcaggtaaagtccatccgtgccttgcctcccaccggcgccttccccggcctctggtttttgtacccgccagcggctccgactccatcgcgtcctcttccagtctagtgcttttttccagatctcgatcccaaactccctcctgccagaatctggacccgaatccacccattgcccgttttctgctgccgctggagagaatctctgaggtccccaggagagcctgcctgcacggaagagatgcctcctcagtatggccgcccccggagaggagcgattaagtgcagacctccatgttgctcttgagcctgagcggcttcagggagccatgtttgttactggcgggcgccgacctcactgagcatgtgcagccctggccgggcggcctcaaagttctgacatcacagggcggttcctgaagtggacgtagttgtaagagctagttattttagacaatgcctctgggatcagggactctaatctggaaataggtagtaggagaggtcggtgatgcagtctctggatcagagacctgagctatatggggttagagaggggccctgggcaggcgagtctctggggagtgtggtgagaatccttgtgtaagatgctgggaggaggtggggtcagggctggggtccgtgggccgacgggttgggggatggccagcgtcagggatcagtagtagagattctatgtgccctgatcgccagtggaggttttaaatacagagtattcatgagtttagcaatgttattcgcctctcattatttaaataatttgaaattttccccaataactagtgtcttagaagtcatgaaaatttcagaaaatgacaggtctcctgagttcgtgatgggagttgggcagcagtcgcatacgagcacctggagagtccttgccagttctttggggatggggagctcttaagactgccctgagaccgccctttgacctcattatggtcctttctagatcaaatgctgttttccatgactgtctctgttcttcccatacgcgaatggcaggcatccagatctccaagaatagaggattaggagagactccaccacctatgtcctcacagttaattatcgatttgtgtcagttgcccattttctcacttcctgtttgtgtgtcaaggagtattaataaatctttgcctatttaaagatattagccttggattttcaaatattgcatattttgacatgtaaaaatttgttagttttattttttcaaccgatctgacctgtatagttgggcttgaggaagcttcctcattctacatgttactatggattttctaatattaacacagggttgtattttttccatataactttctattgaatttctttttccatatgataggtggtgaaggtttagcccagtaaagcagagaggttaagaggttagattgggggctctggagccagacctatgtagatctgagtcctggctctggcacttgaaagccgtgtgaccttggttaagatacttagtccctctctgccaaatggagaaataagggcacctaccccatagggtagttgtgtgattacacaagttaatacacttcaatcagtagcaagaaagtgaatgtcaagctgtatttgttcaggcagccatatggtagccccacgtccttagtaaactgaggtattgaagtatcttctttttctttcagaaaatatttgtcaagcaccttctgtgttctaagaactgttctagagctttgcatgctatggaggtctagaaattcacattatggtggcaggtgacagacaatacaaagagataaagcaatttcatatagtgataagctagggaggagtgctaaaaggagccaaggtgtagtggtgactggaaggtgaccagggaaaccactgtagggtttctaagtgatgagatctgtgacaaatccctgtggtcagcagcaggcattggatatgtaactttattctgtcccattgatcttgtagtcaaccctggtctgttctgtattgttttaattacataatctttgtaataatctttaatacctggtggagtgctctgtttacttatttctgcataattaaccacccctaagcttaacttactcatggttctgcagggtgactgctctccatgtttctaggtggttctgcatggggcctctcacatgtgctacagtcaaacattagccggggccacagtcatctgaaactcacttacatggctgacaattgatgttggctgttgc

SEQ ID NO: 1883584 - DNA, 4001 bp, Homo sapiens
atgtttgaagaagaattaatacgatttcttcacaaactcttccaaaagttgaagaggagggaacacttccaaacattttttatgaggccagcattaccctgataacaaagacagaaaaggacactacaaggatgacagagatttttaaggtacaaatgatgtattgttggaattgaaaatacaggctttgttagtacaaagatttgtgtgtggataggtggatgtgtactggtgtgtgcatgcatacatatacaagcttaacttgttttattgcacttcactttattatgcttctcggatattgcagtttgtacaggttgaaggtttgtggcaaccctgcaccaagcaagtctaccagtgccacttttctggtagcatgtgcttattttgcacctctgtgttacatctttgtaattcttgcaatatttcaaatgttttgttattattatatctgttatggtgatctgttatcagtgatcattgatattactattgtcattgttttggggcatcacaagccatgctccaaaagacaatgagcttaattgatacatatgtgtattcgaatggttccatcgatctgcccttcctccatctcaccctctcctcaggtctgttttctgagacacagcaatattgaaattaggccaattaataactctataaaggcctctatgtgttcaagtgaaagtaagagtcacacatctcttattataaatctaaagtgagaaatgattaagctgagtgaggaaggtatgttaaaagccgagacaggccaaaaggcccaggctggtctcgaacgcctgacctcaagcaatccacctgccgcagccttccaggtagctgagattaaaggcatgagccaccatgtccagcttctatgcattattttaaatggagtattgaagactctgttactgtagaactatttctaacttcaattctgtcaatattttggtcacaggccttaatgtgattacacgctggtctgatgttcatggccaggacattttgttttcctgttggacataaacaatctcacagaatatcaacttcagaaggttaatctgagaccgtgataagtgcaaacaaaaacaagggcactttataatgttgtctaagtgcagataaaaaacaaggtcttgatgccacccacaaaatacttaataatcatattgctcctgctttctgacagcatccaatctaaagtcttcactttctgagatcctgtccgaaatcaaccaattaaagtccaaatcgtataatagtttctctctaactcctcccactgagatgacccatagtaccccattccttgctgcaatgtaattatatttacttacaagtgtgctcctggtggtctttaactgaagggcactgactgggtcactggtgaagttccccgcaggaactgagtcagaccccatctcagggccctgcacaagataggtgcctgctctaaggcgtggaccctcgccacagccctggcccgtcttgacgggcgagggttactgtacttgtcccaaccgtacagatgagaaagctgagactcagggcgagcaacccgggtcccagcggagcgcccggcacacgccgacacttcagcaccagtcgcggtggccaccactgtgcgcggagatggctgcgacgcgtgcgcaggtaaagtccatccgtgccttgcctcccaccggcgccttccccggcctctggtttttgtacccgccagcggctccgactccatcgcgtcctcttccagtctagtgcttttttccagatctcgatcccaaactccctcctgccagaatctggacccgaatccacccattgcccgttttctgctgccgctggagagaatctctgaggtccccaggagagcctgcctgcacggaagagatgcctcctcagtatggccgcccccggagaggagcgattaagtgcagacctccatgttgctcttgagcctgagcggcttcagggagccatgtttgttactggcgggcgccgacctcactgagcatgtgcagccctggccgggcggcctcaaagttctgacatcacagggcggttcctgaagtggacgtagttgtaagagctagttattttagacaatgcctctgggatcagggactctaatctggaaataggtagtaggagaggtcggtgatgcagtctctggatcagagacctgagctatatggggttagagaggggccctgggcaggcgagtctctggggagtgtggtgagaatccttgtgtaagatgctgggaggaggtggggtcagggctggggtccgtgggccgacgggttgggggatggccagcgtcagggatcagtagtagagattctatgtgccctgatcgccagtggaggttttaaatacagagtattcatgagtttagcaatgttattcgcctctcattatttaaataatttgaaattttccccaataactagtgtcttagaagtcatgaaaatttcagaaaatgacaggtctcctgagttcgtgatgggagttgggcagcagtcgcatacgagcacctggagagtccttgccagttctttggggatggggagctcttaagactgccctgagaccgccctttgacctcattatggtcctttctagatcaaatgctgttttccatgactgtctctgttcttcccatacgcgaatggcaggcatccagatctccaagaatagaggattaggagagactccaccacctatgtcctcacagttaattatcgatttgtgtcagttgcccattttctcacttcctgtttgtgtgtcaaggagtattaataaatctttgcctatttaaagatattagccttggattttcaaatattgcatattttgacatgtaaaaatttgttagttttattttttcaaccgatctgacctgtatagttgggcttgaggaagcttcctcattctacatgttactatggattttctaatattaacacagggttgtattttttccatataactttctattgaatttctttttccatatgataggtggtgaaggtttagcccagtaaagcagagaggttaagaggttagattgggggctctggagccagacctatgtagatctgagtcctggctctggcacttgaaagccgtgtgaccttggttaagatacttagtccctctctgccaaatggagaaataagggcacctaccccatagggtagttgtgtgattacacaagttaatacacttcaatcagtagcaagaaagtgaatgtcaagctgtatttgttcaggcagccatatggtagccccacgtccttagtaaactgaggtattgaagtatcttctttttctttcagaaaatatttgtcaagcaccttctgtgttctaagaactgttctagagctttgcatgctatggaggtctagaaattcacattatggtggcaggtgacagacaatacaaagagataaagcaatttcatatagtgataagctagggaggagtgctaaaaggagccaaggtgtagtggtgactggaaggtgaccagggaaaccactgtagggtttctaagtgatgagatctgtgacaaatccctgtggtcagcagcaggcattggatatgtaactttattctgtcccattgatcttgtagtcaaccctggtctgttctgtattgttttaattacataatctttgtaataatctttaatacctggtggagtgctctgtttacttatttctgcataattaaccacccctaagcttaacttactcatggttctgcagggtgactgctctccatgtttctaggtggttctgcatggggcctctcacatgtgctacagtcaaacattagccggggccacagtcatctgaaactcacttacatggctgacaattgatgttggctgttgcctggagaagacatatgtggcgtggtggaatggaatggtgactagattcaagaaagagcttcccaggaggaaggctaccaagagaccgaagtagaggcttc

SEQ ID NO: 1883585 - DNA, 4001 bp, Homo sapiens
tgctagttctaaggcgagtgctggtgcttctttcccgtcacagccagtccgtaggaactgatcctaggttcctttggcagtagggaggtagatcaggaggacttgcttttccagcaccagtaaggctcctgctgatcaaaaacaggatgtagcagagaaagctgccagaaaccagaagacggcaaggaaagcaacctctgctctcaatgatcattattaaagacactcccaccagagccgtggcagtttacaaatgccatggcaatgcttggaagttcccttttatggttccaggaactccctgccccttttctagaaaatttaaaataacccgccccttgattagcatgcaattaagagtgagtataaatatagcagcaacccatgctgtagctcctgctctgggctctccatttgcataaaataatgacactcccacccgtgccaagacagtttacaaacgccatggcaatggcagaaagttactttatctggttccacaaactccctgccccttttccagaaagtttgtgaacaaactaccccttacttagcctgtaattgtaagtaggtataaatatagctaagccggcagtccacaagtgctgctctgcctgagggagccctgctctatggagccaccactttcgctgtacaatgttactctttaaaaacttgcttgctttcactgttggctggctcttgaattctttcctgagcaaagccaagaaccctcccgagctgagccccggttttggggttcacctgcatcactgtgagtagttaaggtagaggaaaacaaagcagcaaaatacacctacggggatgggggaacagaattgaaagtcccctttgaggttttggggaagaggatgattagggagcatcagcaacaggaaataagagggagtttcagaatgggggagagactgataggctaaaaaggaaccggttttatgatgccttccagggcaagcaggtcagaggtccagaaaacctgttcagaaaatgaaggtttagttatggatggcatagagggtcagcagtgagaaacaagaagacctctcccaaccagcactggctgtgagaccctcttctcacttttagagcaggagagggaggaaaagagaccacacataccagtacctcctgacattcttcctgtgcccactccccttccatccccctcaaaataccttcactgcactttacaaggcaaactatgccaacggtctaaggatgagtagcccatttaaaaatatatagctaacatatctcttttggccattttagatattgtagccagagtaatgctgtactcaactttgtacaatgctttactttagtaccaaagacaagtactactactactagtactactactactttttacatgattgaaaagtggctcttccacccctttccaatcaggaaaattcttggtacctcctaaggaggggtggagagaaaacgtgggaatagttggttatcaacctcgctccaagcccacctgatattctcatgtccctttctcacctgtggactcaacacaactcctttgcacctggagcatctccaagcaactgcaatcacctccctcacttttccaccagatctgcaggtgcctgaactggcagtacaaatgctggcaccgatccctggagctgtcaaaagggcacagagaaatggcaaaataaccggcagagagtagcatgggctgctgctccaggccacctccactggctcagaaactgtgagcactgttgccagagagcaggcaaaggtgagcgcctgacctactgccttttccctcaaaggtgccgtcttttatagcccatcactattcaaaggcggagcttcgtagctttcccaaccaatggtgagtgagactgggcgggagtctgcggcgaaatttgggagtgaaggactctaacaatggatagtaggggaagtggcaggtgagagtaaaatgtgtgtttattctcgtgaggaagaagaattatagatacccaagctaaaggaaaggaaaacagtttcccaagagctgaaagaacacctgagttaaggaaccttatgtgtcttgggtgctgggcctgtgttgatcctaaagacttttgctgcaagtctgactattcaccttcatggatcatggagagaacctcagattggaagcacatcacagcaggtgctcttaggcaatttatctgatttacctgaacttctgttttctgatctgtaaaataaactcacctttcataagatagtagaatttaatgtgatacaatgttctaaagtgcctattataaagtaggtactcagtaaatgaaagctattggtatggtaagaattgaagagggcaatgaaacatgccctaagttcttctcccatatccatacatatccagaaaagacatgatgcatgtcgctaaatccctccacttgaaactaatttcttctttttttttctttctgagatggagttttgctctctcgcccaggctgtagtacagtggtgtgatctcagctctctgcaacctctgcctcccgagttcaagcaattctcctgcctcagcctgagtagctaggattacaggcgtgtgccactacacgtggctaattttttttatttttttagtagagacagggtttcaccatgttggccaggctggtctcaaactcctgacctcgtgatctgctcacctgggcctcccaaagtgctgggattacaggcatgagccaccgcgcccagccgaaactaatttctaaaaaggaaactttatccctattttctgtctttgtaaattgaaatacttttggtatggatagccacaaaagtcactaataaacttgaataagtctttgaaaagcattgcttttctttcagtgaaacataataatcctggatgcctgggggaagagagaaagaagggcacttcagctctaaaagactcaaggtccatgagtccccagctaggaaattaccttctggaattcccctcttcctctctcttcttctggaacactgtgttgtctcaaacgattatggatactttagaaatggaaaaatatggccgggtgcggtggctcacacctgtaatcccagcacttcaggaggccaaggcaggcggatcatgaggtcaagagatcaagaccatcctggccaacatggtgaaaccccatctctactaaaaatacgaaaagtagccgggcgtggtaacgtgtgcctgtaatcccagctactcaggaggctgaggcaggagaatcgcttgagcccgggaggcagaggttgcagtgagccgagatcgcgccactgcactccagcctggcgacagaacgagactccctctcaaaaaaaaaaaaaaaaaaaagaaaagaaaagaaatggaaaagtatcttttctttcttaccttttgtcatgtgagagcaacccctgacgacttttaaacagttcaagaatgctaagagttcctaccattaatttagtttcatctcttgatggcacaactgttttgtcaataaaacatgaacaggtgtgttctttttgcttcagcggtggtgagggggcgcataggcagtggtgagttccctgatgttctcaaaatgcccctggggaaggtaaatatctaaatgtccttgttttaaagtgaaccagcctagagaaaatatctttcaaagtcactctccaggaatgtttttacttgatgagtttctcacaccttaaattatcttcttgtgtattttccattaaattttataaccgagagataatttgtattgagtctgtcctccttttaagacaccagaatgtttgtctcggcagtttcaaactcatgacattaacagaagacataaagaaaggtcttttgatgacaaaataattaaagttatttattcatcaataagatttcttcaccgggttccttgatttcttcaccgggtaaccgactcatcgttttcatgcatctcattatctgagcctatggaaatgatatccgtcattat

SEQ ID NO: 1883586 - DNA, 4001 bp, Homo sapiens
gctcacagttccttatagctggggaggcctcaggaagcttacaatcatggaggcagttcacgtgaagggggaagaaaggcacctttctcacagggtggtgagagagaggaagggggacggggaaagccctttataaaagcatcagatcggctgggcacagtggctcacgcgtgtaatcccagcactttgggaggccgaggcaggcagatcacaaggtcaggagttccagaccagcctaaccaacatggtgaaaccctttctctactaaaaatacacattagccgggcgtgatggcgcgcacctgtaatcccagctactcgggaggctgaggcaggagaatctcttgaacccgggaggcagaggttgcagtgaaccaagatcgcgccactgcactccagcctgagtgacagagtgatactccgttaaaaaaaaaaatcttgtgaactcactgtcacgagagcagcgttcaggaaaccacctccatgattcaattacctccacctggtcccgcccatgacacgtggggattattaaaattcaaggtgagatttgggtggggaaacagagccaaaccatatcagggggccaggccttcagcaggtggataagatgggaggagttctgaaatacacacccgggatgctccagaggccaaatcatagggcaggtcatcccaaggacagcagttaattcactgacatgccagcaaagggcaaaccgaatcggccccgcggagcccaggtaggggcgccgctcacctcctaaaatgccctcaaagaccccttagggcacagccatatgctgagacatgttggggtggacaagcaggtctcaagaagcttagaatgtcccctaggtggacgctaagggacaaggcccaccgaggaaggcagctgcagatgatggaatgccctcccaatggcgggaacaagcaaggcttccgcagctcaaaaggagaaacatgctttgcgctggagtcctcagaaaaggccacttccaaactgtggggatggggagtggacgggcctaagagaatgggaaggcagaacaccccttctccagtctcccttggccgttaaaaccccagagcagcagcaacgtgggctgtttggtgcggaggttcctggtttgggttggccaggcgtagagtgcttccgacaattcacccaccctccaagacgcgcgggccggggagcggggagagggcggagggaacggcgcaccgggccccgtcggactgttggaccaaaagtcctcagtgtcgggggctcgcagcgccgccgcggcgaacccagctagggggcaccgcctgcgccgggcacagggaggccgttcggctttccccctcgcgcccattactctcaggcgtcccggggaaccccgcgggccaagtgtcgggctgcgtccgggcagaggcggcttcgcctggtgtcagcgcgtttccgaagggcacccgcggcggggcccacaactcgagctgggagccgccccaagcaacccgttcctccgaatcaggctgcttttctctgtaaagaaaagagaaagcaagcgattaactgatggcttggccggctggaaacgggaaagcgagttctccaggagccgcacacctcggggaagcccagtccctcccgggcagggagcgaggggcggtcctgggggctgcttcccgcggggagagaagggagggcggcgcagccctctgcggggtccgcccctcggttctccggacccccgcggcctgggggacacggggcaaattctcggatagcgacgggcaggaaggggacccgggctggcgatgggccgagtgcctcctttgctctcacccccgcgcgaagacgaggccagtgggcgggtggcgtggggcgaggcctccgcaggccgccgggggcccaggcacctggagccgggagggtccgctcccttccccgccctggatggcggcctatgggaaagcagtctccactggatcccgcgcgcgtcgcgccgaggtcgtgggaaaccgagggcgggagggcgggagggcggaggcgccggcagggtcggcgggactggggctcggacggaggacaggggcgaggaggaggcaggaaggacgccgggtactgcggggcgcctagggggttccgagcgcagcggctgcggggccgacccgcccaggatggaatcagggccccggcgcccccacgccgctcctccaggccgaacccctgcggccccaatcccccggcctcacgcccaccccgcaggtcggccctgcagctgccttcccttcctccacctccctcccgcctccgaagccggcgcccccggccaagtggccgctctcaacctgttaccaagtcctagagagaatttctccaaaatatttcctggatccccctgccaagggccctgtcccgcccttccagctcccaactggatgcctgcagacctctccccgggttccgaggctctggcctcctccctccctaatccattttccacaccgcttccccgggagcccgttaaaatacaccgggaccgcggcgggtgcaagcctcctgtatctccacatagcaggctaaggggaattgggtagggaataaaggctgcaggggacatcggctggcaggtatgaagcccgtattgtgtgtcgtttgttaaacacttccagtggattttctcgtttaatctgcccaacaacgcttctgggccggtattcgtattgttttatagagggagaaactgaggcacagaggggcactcggcttgtaagcaacggagtaattcagagcccgtcagccccacgccgagtttattcaccctggcaggggcttccgcgggagccatgacccttcctaactggggtggaaggacccgcagcgccagccgggtccgggccagacggcagcgagtgtctgttaatagggatgctgaatgggtcaggcagtggggcacaggttcagtgtgatctggaatgcctgcgaggcccccttgctcatccacctgcctttaatggatgggtggtctgagtttctggagatgggcaagatggagcagtctccacacttggctcttcagccccggcgccccccacagccgcctctgctttcctggagataccgcaggctcctaacctcaggccggcttgtgctgctccaccctctccctcccccacagacacaggccacttagcgcgctctcccgtccctcacccctgccaacagcagccacttctggccacttcctttacatgtgaatgagtccaggtctgggctgcctttgtccggggaggccggtgggatttccatcaataattgttggttggtgagtcaggggtcagcagtggtctcctttccaggacccagaaatgacaccacaagggtaactggccactatttcctgcctaggaactagcagcatcccacccccaccactccatggcctagataagacaggccaagaccccagagacaacaggactctggaacagggaagggatttatgattagcataggctctagttaaattcctttttttatttctgtgcattgacctattatgtaatatgcttttttcttcctggaatacagatcctaccagtggttttattccttttttatataatgtttaattcatctgtctctgtaaatccatcacatgaaattgaaagggtctcaaagagcagactgtttcccccctaactcttccactattcaacccaggggcaagcactgtcatccctcactgctaccagcttctggtcagtctttctggccacacgtatgtagacatgcttcattcttttaactgtgtttttgatgttttctatattaacaccaaaaaaaagtacactaagaaatcagtgctatttccgaatggagcccggagtttctcagcactgcgctcctccagtgccagaagcaccctacttctcttcctcagttgcttcatcaatcacatggggctggggcagtgaggaggatgtatttgcctcacatagagacttaaaggtt

SEQ ID NO: 1883587 - DNA, 4001 bp, Homo sapiens
atgcgacaaagctcctggtgagatgctgctgctactccgccatttatgctaaaaacaaaaaactaaaacctaaaaaacttgaaaaggtggtttgtaatggggatgggagggttactcttggcctggtttaaaccaagcatctagcagtgcccgggcctatgctgtccctagcagcacctggagaattcaaatgtcacaacagctgaccacggaggggactctagaggggaagtgtcctgtgcaccagtcacaccgcggctgtgctgaggggttcgggggccaattctgcgcttcttgggttcttacaccacagtttgatcttcacgttcattattcaaaatcttccagcaaggattggaaatcaacaagacaactgaatgaaactcaggtctgttttcctcaaagtgtggtcctgggttcaggtgctcacatcggaattacataattgtgcaaaacttggactgccctgtgtccctagagacctcgagcttgtttttgtctcggaccaagatggcctcatttccatactgtgagtaccacatgcttcggctcctgctcaggtacgtcccaggtggcaccgactccaacttctgctgttgctgctgccagatgagcaaggaggtgtccctgtaccggaggcgggcgtagccttcagacaaggccttctctgccagggggacacggccactcatcccctcccccgtcccgctggactcctgggaaccctgctgttctgagacggcccacgcgcactaaattaacggacagctttcccagctttggggcttaaggatccctcgtttaactgaatggtagaaattaggaattccgcccatttgcaggcaacgtcctcaggagggttgtgtggtgaggaaatgaggcggcctcaccattctgaagacacctgagacccattcaggggaccgcacacaggtcagagcggcgcccggccacagctcttccgggtgcagctgtgtggaattgacagggacgaggcgtcacaccctggggggtgattctgccaccatggcctggaccactgagcttgaagagatggatccagtgccctgaggaagggacatggtggccccagacgcaagctggaaggagctccggtggcacgccccgcacgcatctgtccgggccagctttcagggcaacggctgttctgacccaccctggggatccagccccagcgtttgttcaggtctcgtctctccccaaaggtgctgctgcaaaggaacgaacgtgctgtcaggagaggggaagtcaagcgccccggcagcggcggcagtctgcagcgcagcatcaagtctctgggggtcagcggcctagatcgagctacttacgtcccgtggggcagcctgggagctgggtggagagtgagacgggcgcccagtgccagctttttcagtcactgggaggtgctggggaggctgcttgttggggcttcagggtctccatctgtgaaacaggagccagcggcgcttgaaagggcgcgggttcccggagacgccgccaggcgtcagccccgggaccggaaggggcccccagggccgccttgctgctccgagcatccagctcccgtgaggcccctggacccaaacaaaaacgatgtcaggagaaaacaaacagggaagcatcgcaacccactcccgaacgccttcccagctgcgcagcgtcagggacctcccctcctgggatgcctgcgctaggtcagcctcagcttcccgggcccccatcgcgcgtccccgccacctgcgcgcaccctggggtccccgtcgcgtggcccgcggcccccatccccgcgccccagaccccgcgcgctctgggtcgccccatcctccagccccctatcgtctgcccgcatccccgggtcccccacgtcgcccgccccagtcaccgctcgtcgcgggcctcggagatgcgggcagcggcgcgacgcactgcggggctcccagggcggggccggcggccgctgggccgtgtctccatggcagcgccgcaggcctggcgagccgagcgcagaggctgggcaggcgtgtgcgacgagcccaagccatcgatcgctccgcgaggaggggctgggcccgccccgaataggaactggaagaggaggaggaggggctggaggaggaggggctggaggaggaggggctggaggaggaggagggaggaggaggaggagctgggagaggaggggctgggagaggagaaagggctggatgaggaggaggggctggaggaggaggaggggctgggagaggaggagctgaacgagaaggaggagcagaaggaggagtggaggagaaggaggagcaggaggaggagctgggggaggaggaggagctgagagaggaggaggagatggaggaggaggggctggatggtgaggggctgggaaaggaggaggggctgggagcggaggtgggaggaggggctggcagaggagaaggggctgaggaggtactggaaaagaaagaggagcaggagctggaggaagacgtggaggaggagctggaggaggatgaagagaaggagtgggacgcccacaaccctgttagtaagacactgccggactgtatggtcttatcatcttggttttcgtatttctgcttgtgtggttacttttgccactgctgttactgcttttattagtattcttactctcagtaattgatacaattatttttaattaattaaatgtccgggcttactatctcaaaaataggtcttgaatttctccatctcatccaaccaagccaggcctctatactgctcatttggactcctcaacagccccatgaaagcaaggtctatttccttttctcactccacctccaatcatactccaatagcactcttttagtatctacccttttcccctaattttatggttttctccaatgccaattaagaaaactagcataatggaacctggtgtggtggctcacctctgagtcccacctacttgggaggctgaggcaggaggatcccttgagccaggagttcgaggctgcagtgagccataatcatgccactgcacttcagctgggacgaaacagcaaaaccccatctctaaaaaaaaagaaaataagcataacagacatccaaggaagatgcttagtgtgagcactaagcccacagctgtggaacgcacattctttttttttttttttttgaaagggaatctcactctgtcacccagggtggagtgtggtggcacgatctcagctcactgcaacctccgccccccaggttcaagcgattctcctgcctcagcctcctgagtagctgggactacaggcgccggcaaccacgcccagctaatttttgtatttttagtagagacagggtttcaccatattggccaggctggtctcgaactcctgaccttgtgatccgcctgcctcgcactttcttcacaagtacctacacaggacgtttagcaaaactgatcacatgctggaccataaatcagtttcaacaaatttgaaaacgtttaaatcttacatgatctcccagtcttccgacctgggaaaagacagcaaccgaagttatactgctttcaagagacacaagaacaggcctgtattcaaagacccatttaacacttttacctctatctggctgggtgcggttttcacgcctgtaatcccagcactttgggaggcctaggcggtcacatcacttgaggtcaggagttcgagaccagcctagccaacatgatgaaaccctgtctctaccaaaaatataaaaaattagcccagtgtggtggcaggcgcctgtaatcccagctactcaggaggctgaggcaggagaatctcttgaacccaggaggcggaggttgcagtgagctgagattgcaccattgcactccagcttgggtgacagagtgagaccccatctcaaaaaaaaaaaaaaaaaattgcctctaagctaatataatttgttctatgccttgaactaaataatttgaatatttagttacctgtaagctt

SEQ ID NO: 1883588 - DNA, 4001 bp, Homo sapiens
ttgctgcttatatttatggaggctgggaagtccaaggtcaaggcactagcagattcagtgtctgatgagggcctgttcctcttagatggcactttctgtatcctcacatggtggaaggggcaagatacctttcttgaaccttttttataagggcactaatcccattcatgagggcagagccctaaggacttaataacttcccaaaaggcctcacctcctaatgctattgtatcatgttggattctaacatgaattttgcagtttgggggagtcacaaacattcagaccatagcaactactatatgcctggcactgttctaggcagtggggtgtacaggtaagcaaagccaagcctcacactcagtgagcttctattacagatctttcagtgagggaaatctgaaaagccatgaagtttacaggaggaaaagccttattctgcctatggtgggagtttagatctggcttttatgaggatatgacatgttcactgcgcccagtagagcaaatgcagtactaactcttaagggtgaaggaatgttcatttaactatggagcatctaatgcatgatgaatgtggttgtaggagcagagttcctgtcatgaagtaggtatttgataaatgtatcatatttggatcaataacccaaatccaaaaatgagtactcatttgagggtcccttccctcaaggatcatgcagtccagtggagaagttcattcactctcattcacttataacattatggtgcatgaaaagagaagccaagagtggaaagaatggaaactctaaaactcatacattcctctcctatcaccatcctcccaaacatccgctagtccctctgtttcctcctctgaaaacttatactgttcttgggagttctgagttgtctggtgtatctgtttcttttgctgggtgcttcaccttggcttcctcccaaatgcctccagcaactgtttatttttataaatgttgtatacacagggcagaagatagagaaaggggtgagccagagtcatttacgaaagcactttggcattctgctctggaaatcatttccgcaggaggctgccctggacagagtgcacttactctcagacctcccatccccacttccaagcagaagtcaatgcaatttttatttacagtcagaagctccatgaaattctgagccaaaaggcttctttcctgaaaagctggtagtggcctccaacattcagctatcacctttaacaggaactctttgttgtttgcaccaaacaaataaccagacacctgggtcagaagcagaattaaggacctaattcgtctccatccatggacatttaatggacacctactcgtgcaaatactatcacagccactgagaacacaagacataggatcctaaaagagcaggaagaggctacttttattgatgacatatcatatattgtcatgatttacatacataaaaaagatactatcattctgctttacagattggggaaaggaggaaagaaggaaggggatggaagggaaggggatggaagggaagggaaggtaaaggaagggaagggaagggaagggagtgggagagggagaaatggaaggagggaggaacagagggagggaggaacagagggagggaggatttgaggttctgtaacttgtataaaacccatagctgatgaataagctttctactcattttctcttcatcactcttaaatcacagtttcaccttcactctccaccaaaattgttgttatcaaggttattatatataaacctaattattataatgattgacacccacattgctaaacacaaaagtcaaacatcaattctcatcttggtttgctgattagcaacatataatacagttgactgcctccttgtccttaaaatgctttcttcacttggcatctgagacatcttacatgatctgttgattttcctggtgcttcaccaccagcactttctcagtctctttagctggcttctgcttctcagcatcatcttctgctattgaagtatctcagaactcagcccttggacaccctctttgctttatatacattcactctcttggtgacctcattccgtctcatgcttcatatcccacctgcataccaatagctcaaatttcctctattctgtaccacttctttaaacttcagcttgatatatacaacagcatacttgctatctctccttgggtgtctcaaacttatcattttcaaaattgaagtccccatttttctccattaaacctactcctctgatggactccccaatttcagttcatggcaacttcatctttcccgttgctcggaacaaaaagcctcttttgattacaccccacacccaatctgatggcaaactggtttgtgttacctcccaaatacatcctggatccagcaatttctcatcatctgccctgtgaccagcctgctgcaactctcagtcttctctcacccagattacttcttggaggctcttcctttgtatttgccccatacagcctggtcttaactcagtcaccagtgtgatcctaataaacctgttagacttgtggttccggaactgacagctctccaaaggcctctcgttttattcagagtaaaatccaaagaccttaaaacaactgacaggaccatactccctgttccctccctgaactcaccacttataccccacccccatccctgccactctgctctggccacactagcctgcctgctgtcccctctgtctgaaattctgtcccccagaaacctacacggctgatttccacatctccttcaggtcttcactcagatgagactttctcagcaaagacgtacctgaccccttttcttaaaattaaaatcctatcccaacgtttattttctgtttccctctcgtgttttctttttctccatagcacttacctccatcatgtattctatatatcttatttattttgtatattttatctcatttcccatactagaaagtaagctcctacgggcaacactggtcctctccactgatatatatgtaactaatctaataatacataaataataaatattaattgacagcgaataattgtgagacatatatctcacagcactttagagaagcatatgtcatgagtatgggaccttcaattaatattgattaagtaaataaatccacacaagaaagaaaaagagaggcatcactgaggcttggcataagcaaggagggctttgtggagaagaaaataaaaataatttttgagtacttactgcgtgccagatactatgctaagtgtcttagagctattatctcattaaaccctcttaatgactctgtgaaataagttcataaaattattgtgtccattttacagattagaaaactgttgtgtcaaaaggctaactcactttctcaaaatcagtgcaacaatttatataagaggccaggagccagacctttatctctctggttgccaaccatggggtaccattttagaaatctcttttagatatgaaactatcctacttgaattaaagagagaaaaaaaatcagacagttacatttgaaaagaacaattaagtgtttattaatatatttctttgtttattcaataactgttattattagttccttatagcaatttattatactgtgtgctgtacccataggacggaaaaatgaatgaaacattgcctgctcacagtgagcttacaatctagcgcagcctagttagcgtaaaattatcagtattttaacagctttgtgctttaagagcacagaggagggagcaattgatttccttagggatgtagttatacaaagaatatctcaaagacagatggcatctaaacataagcctacagaatggattaaaccattgctaaatgcagaaagtggtcttcaggcagaggctgtagcaagagtatgagatctactcaaggaaaagagcttagcaggtaaaaacaaggagatgaagatgccttaagggtggtaggaagccattgccacgtt

SEQ ID NO: 1883589 - DNA, 4001 bp, Homo sapiens
gaaaaccccacctccactgaacccaaatgcagacttcacagctcccagggaattgtgacaagttagtgggaaaatcttctgccagcatggatggtaggatgcttgaattccaaaggtgacagtgtacctcctaccccaggtccttctagaaaaaggatcattaatcagtctaggaagacttaacactgggaaaggaagctctggaaggccttatctcccctgccccttcaacccaggcaagggaccttccttcagctcacccagagaaaggctccacagaagtcatatctaaactctttagccacaggaccctgtcttccaatgaaccaatgtcacatactcccaggatagaaaactgctgaaagcagggctggcctgggtgtgggctggggccggagcctgccctgctttgccagatgctgagcacccagcctctgtgcagttggtagctttattcccatgactgcctccgccgtcacctgctgcactgtgaaggattccatttgtccttctagaagatgggcattatttttctcttctcactcccttacctggcccacagcctgtgccttttggagtggaggaggacatcccaacctagggacagggacatttggagaggagccccatgaagagttgccatctgggaccctctgcctcccaccaggacactgccaacactgagcatccttttagttccacaaattcttgctaggcccctataaagattcgcccagcgtcctcttcctctaagctcccacgtgctagaactcccacatgctagaagccatgaggggtctctctcaggccagaaggagctctgggatcctagccctcagcagaaggccccaggctttcccacctgctcccagctcctctgaggaagttgatggagcctgcagagctgggctggaggaggtctcctttccccagagcggggctgggggtgcgggtaggtggcctggaatgtgctctctcaccctcctcctgcccatgtggtaagcagcgagagcccccagccctccagctctgaggggaagctcctgtgagccagacggacaggacagctgcccccaatagggtccccttcacgggccatctcaccccaactcagacgctaaaaatggttctccgcttttcagcctccgcgcctgcccacaaattagtgtctccaacacagcctcttgggacatgactttagggaggcccctgggggagccgggaggccccagtaaagggagatggtgctggcagagtccctttctgaggagacaagagtggataaggcccccctcccagcttctgggaccccccccccaaagaaggccacccagcctcagtgtgacagccctgttgtcctcaccatggcagaagaacagacattatttccaccccactggggcacgctcccctcacctccacctccagttctgtcagctttaccctcagccaccatcctgggcactgctctgctggaagagaatgcagcaacaggagatgggggagccagccccgcgccctcccgcttagggtccagaacccaccttgccaaacctgggctcccgcagtcagcccacaagcacggaggccaatggggaagccaagtcagggaagcctggtctccctgctcgcctgatatttagtctcagactcttctcccctccccagtcccgcaacggtcaacttggaagggggtgaaccctctccgggatgcccacgccccagggcaccaagcaagcaggtgtcctgctgaggccaggactgggtgcaagccagcagcccgcagtaccaggtggagacaggcgggcagtactcacaggtaagccgtcaggggatccaggtcccccggtatggcggacagcccaagctcaagagcagtcggcagacagcatgatgccgtcctcctggcagtggcagggggccgggcaggcggtaggccccgggccgggctggggggcgcagccggcgctcggggaggcgcacacagcggcgcgaagtcacagcgcccggagcctgggcgggttgggcatctcggcggccgggctgctgggtcacctggcggccaggcgcgcagacgcacgggcgcggtgtccgcagctgctttctcccggtcccggcgggctgcgccgtcggtggggaccgccccgggggctctactgggcgtcggcggcggggcggtgcagtcagagaggagcaggcattgttgagtgatcttcgttattcagtttcacaggctgggcttggcaagggagggagacccagccggaggaggagtcaaggaaactttctacgctgcggctagctcccttccctccttccttcggagctggcaggaatttcattcaggaaagataaaaaaaggaaaaaagcaaagaaacccaagcgagcaaagctcagcccgtcagagacctgcacttgtttagaaagggtgtcccagggccttggctgcagggctggggaccctcttgcctttggggatagccacggggtcacatgggacccagaggagatctctgaaagaggccttggggctctcatagcccctcatgccttcaccacgtttcacactggaggaaacagagacccaagaggagaaatgatttgttcaaggtgacacagctgatagggcatccccagagctggaactcgtcagccctcctcggccttatcctaggacaagagagaggggagtgaggggctaccctggaagaggccaggctgcggagggttccactgcaagctgggatgacccggcagtgggcaaccaggagcagtctcctccctgagaggtcgcgccttgactccaaagaaacgggtgtggagttccactcgctgagtgcaccctgggtggaaatgcactcctgcagcctctgtcaggtttactgtcaggtttacggggaccaccttgatccctgctcccaggacctcggcaggctgagggactgcgtgcagctcagctgcttgtcaagaggccacctcaaagtaagcagattggcgccacctggaggccgggtgctgcacctgcagctcggccaccctgaggctggaatcccaccaactggctgacctggccggccccagagccctggtgagcaaagggcacggtggttaaaactgaggccaatccctgttctctccttagaccatagtgagctggctgtgcttccttcacgcagcctcttgctgtctctggtctctcccatgctgagccaagccccagtgcagagctagagcaggctgtgggcacccctccttccttttttgccctgtctccccatggtccagccagagggtataccagaaacctgggacctcagaggcatccaggatttcttccaccctgtccttccacatgccagaatcctctcatcaacacctctccactctccgataacctcccagggctagaggggctgcatagccggaccaagaaatgagcagaccctgaccctaggcctcccgttggtgccatggcgctgaaagtagaagatgagcctcctaagaaggctagaggatgggcctacatgaccagaaagactcacagatagagccacctttgccctatggcagaaagctaccacaggccagcctgcacttccttcactcaaccatagccttggctccatctcatttgcagctcctgctgctccaatgtgagattttcccagagtggaaaagccatggttgagccctgttgcaacctcagcagcagctgcttgagacagacttgggcagctcagagcagagcctccagcctgcttttgtgagggtcattagggggcccaccctcagctcctgataaacatggcatatggaggacaccggcatttagtcctcctgggagggcaccagtgctttagtctcgttctgggaaagctcccggctgagcagccagcacgacctctgtacccttcttcaaccaggcctgagaaggaccctcctgacttctgacccgttgcaccttagtaggaactcaggttggccaaagagctctccccgct

SEQ ID NO: 1883590 - DNA, 4001 bp, Homo sapiens
ggattacaggcatgagccaaccgcgcccggcctattagccaaaatattaaactgacataatggctatgtagaatgcaactttcaagtggatgcattccattgataataatagtaataacaacacatatattccttactatgaccagctactgttttaggagttttacttaattatctaattttttacaattaccatttttaggtagtttactattattagcttcactgtaatggtgataggtgagtacaataaaacacggagaagtgatctggccaacaactcacacatagatggctgagttagatgtttcacttaggcttaaagttattgcctgctggtaagcaaacaagtcatattttaaatgaagcattttatgaacacatactactagtttttagtatctgccatagaattgagatctatttgcaaacagccatattgttttcttaagacactactgtaggcagaataatgatcccccaaagatgtttatctcctaatttccggaattcgtgaatatattagcttacatggcaaaaggattctgctgatgtgatcaagggcagagacctggaaatgggaagatgatcctggattactcaggtgagccctcagaatcttttccagctgcaatcagcggtagacttgaggatggaaggttcagagagatggcatatcactggctttgaagatggaggaagggaccaaagccaaggaatgtggacagaagctggcaaaggcaagctaaggattgtcctgtggagtcaccagaaaggagtgcagcccgggtgacacccaggtagcacttctgatctacagaaccgtgagataataaatgcattgtctgtcagatgataaatttgtgctgtttcaagctacaaagtttgtggtttttggttattgtggcaatagggaacggatacaggccctgtcaggtatttcactcaatccatgaaataccttacagtatacaaattttaacatgcgcgggagccacttacggatccgtctatctgtgctgcctgggagtgtcaagaggccgtgtccttcattcacctcgcgcgtgggcggcgctgccctgaagatgctcccgggctcagtgcagacggctcagcgttctctcgcgttcaacgaaccgccagaaacgtcagatggtacggaggaaaacactttacactttaacagtatttttacgtttatttgcagcaaatgttgttggctttgtatttaaagtatttatgactcactataaagtgtaggatccaagaaaacgcgctagtttcacttggcccccgtggctgtcccggggagctctccaaggaaggactggttcctgaagttcctggggtgctgcaccaccacggaagaaccaagctccacagagaagccagaagccgcgaccgcggggacgctctctgccaggcctccaccgcctcagcggccctttacagccaccgcattctccatgcccccagttatttctagcttcgcacagcgcccggcccaccgagcgacctcaaacctcgcgacactcgcaactcccgaggcccttcctgctactggcctcagagggaagagacatcgggaagattgctccgcccacagaaaggaagatttcgttctcgcgagatcccaatgacaattcgggagcccgttctcgcgggattttccaagaccgggttggaatttgcgggggttaggagacggaagtcagagcctaggaagatttgggggtcgccttgccggcctcctgtcctcctccggcggcggcggagcccgagagaactaggtgaacaccgctttgccagcctcacacagcgtcccctggctctgccgccgctccggacgtcgccctcccgttctgcttgggtccccttagtcgctacctttgctgggatccccctcctccatcctgtggcttcgggttgccgaagagcgatgctcggagggcggccggaagtggcgttggccgccattggcctgccggccagccaccttgctgtcctccgccgccttccgggtgttacatgcagccgggctcggcccctccccctggccggatggatccgtcggcgccacagccccgcgcggaaacctcaggcaaaggtaccagctccgcgctcgccccttacgcagaggcctgtgtactgcgtcgcgttggaccagttcttgccggtgcccttcgggttggggttttgccctgtagatcctcttcagtgacagctgcagattgtgaacccctccaggcctggaaccaaatctccgattcagtgttgagaacctggactcgggagtcagcccctgggatctagtgctgcctctgacagttacttgctgagcaactttgggcaggctcctcatctgtaaaactgggttcattactaggttcttgcgattattaaatgacgtggggaatacgcaaagtatttatgtgaccccgcgtgtggcccatattaagcactcagtaaatgttattttcattctttattcttgtatgccccagttgttagtgaatggcagaagtttgttgtaagtagataaatgaaggttgagatatttagttcagttgagttttattgcctattgagtcagggcattatattctgccttaaataggaggtttaaagaaggtgtgattatctaccacaagtcacctgggatgccttctggcacccaaatgagtagttttcattaataattgtgctgtataacaaaagctaccaggtattgagtgattttcctgagcccagcaatatgctgattgtttacttgctttcctttgaggaagatatcgatctcattaaatagatgaattcagagctaaagttcagagagggcaagttacaagcctgaattctgaggtctaggaattgatgacgctgtaattcagggaccaaacatataaatacctataggagactggcagctaaaaatagatgaagctgccgagtggatattgtgactgggaggctcattccttttgataaatctagtcactcttggtatttagggaaattggtggaaggagcagaaagctccagggccccgaggtgggaacacccttgaggaatgcttgaggaggcctttggagtgaaagagggagagagagaccctatcaccagaatgagttgagttggtaattagtttaaaccaaaacaaatgatttcgactcattaaattttaggacacttaacccatttccctgttaaatccaacaggaaatcttaacaatttaagcagttgttctgtagtttggatactgagagattccatttctaactcaactgaatttatttcgtcctagaaattatccgaactcaaacccaaaatactccaataagttgtgtgattcccttaaggcttttttttttttgcacatgctgtacacttatctgagatacagttcttagacccctttcccttttaaattacatttctcaatactcccttctcatagcactcttcttccaatgcagtttttacagttatgtatatgttggtgtactttttagttttctcgcaagatatcaaggatttgtgagattgataatttgtaataggccaggcgcatggctcacacctgtaatcccagtactttggggaagcttaggcgggaggatagtttgaggccagcctggacaacataagcgagaccctgtctctactaaaaataaaaaatttagccaggcatggtggtgcacacctgtagtcccagctactcaggaggctgaggcgggaggatggctgagctcaggagttggagtttacagtgagctataattgtgccatgacactccagactgggcgacagagacactcttgtctaaaaaaaaaaagaaaaaaaaaagaatgtgtaataaattcgcatgttcactgaatgtctgctgtgtgactctgtgttggtcctggggataaaatttataacagtacaaacttttcttggaaaggaaattactctctactggaaggaaaagacaaaaaaccagtggacatgataatt

SEQ ID NO: 1883591 - DNA, 4001 bp, Homo sapiens
aaagtgagatgcaatatcagtgatgatgtgattggtcctttggagatgtcccactcaagcattcaaataatttcctgtgttatgtcttgggccaaaaagctattgaaagaatataatttcaaaaatgcaatgtttgctgtgagaatgtcaactatgacaattgtattcagcatacttatatactgatttgtatttcattcaggttcacatacttgttcttaggtatttttaattgcgatcatattagtaagtgtttctagtccctaagtggtttttagttgattatatatgtcaataaacatgtggatgttagattgagccatatgatattaaagataagcttctttgtacttattttgataaatcataaaatgtttacattttgccccatgtactttatcatttctttatgtatttacatgtatttgtacattttatgaactatttgatataatttggggacattgtgccctcttacctctaaatgctataatttgtatttcgtaagacaataagaagaaattagaaaagatttcctaagaagagatattctcttttctacccacagaaccattacaaaataagaaaatctgacattaatacaatgctcttatttaattcatagtccaaactcatatgttctcaattgtctcaacaacatcctttagaaaaattttttcctggcccagcatccaacctggggtcatgctctatatttgtgtctctgtagtctctgttgatttagaacggtttcttggcctatctttgtctctcttgaccttgttattcaagagttcaggccagttgttttgcagaatgactctcagtttgggtttgcctgatgtttccttatgattagagtcaggctatgctttttataaaaaatatcacagaagtgatgggtgctgttttgcccttcgcagataatcctaacaggaggtaaaatatattagtttgtcccagtgttggtggtaacttgcatcactgattcaggtggtatctgccaagtttctccactctaaaattctattgtaaagttatcctttataagtaataaggaatttgtggagagttactttgaaaccatgtaaatatcctaatcctcctcaaacgttcacgcattcattggggattttctaactccatcattctgtttacttttgttgattggcattgtactgtaaggaagaggtttttccttctccactctgtgtttatttgttcattaatttatttttataaatatagtatttaatatgtttcagtcttcacttgatcttagccaaaaggcggagaagtgatcgttttgatctttaacatggcagttttaagtggttcagccaaagacgtcatgctatgcatttagactggaaatatatcaagcatgtatcttcgtagcccattgtattttcaataattaaaaaaattattcattgactaattttaaattatggcatgttctttacttggtgactatgtcagtctcaattttgattgtcagtattaaaacctctacccatcccctttactcacaataacacatttcactaggcctgtgttgaaacagctgtaaggtgagcccttagtataatctaatctatatttaaggcaatgtgagttgtggatgtataaatatgaacaatgtttttaatgctcattcaaatattttgttttcataaagtccgtgttctgtttttaaaacttaaggttgataaccatgattttagggaggacagaaattgaactcatctggtaataaatgcagaatacaaacttctccttcagccagtttacctgcacatttatggtagatagttgacattttttatgacagtgaaaaaatcaaagtattatatataattgttcaaaagaattgtccccaaattgaatatgttttaaattccacttaccttttgttttatgtctattaggcatttaaaatattagaagatttttgaaacttcaacactttttgaatattctacatgtggccttttgagattctgcatgttgccttcaaagagatcttgtcagagttacacttctttaatagtgaagtttatatacttaagaaaataaaggcaaaaaaatagtcattcataatataaaaataatacagtcatacatcaattaatggcattctggtcaatgacagttcaaatatatgacagtggtttcttaagattataatatggcatttttttctgtactttttctatgtttggatatacgcatacttacttatggttacaattgcctatagtactcagtacagtaacaggctgtataggtttgtagcctaggaccaataggctataccatatagtctaggtgtgtaggagggtataccatctagtttgtgaagatacactctatgacgttcacacaatgaaacacctaaggacacatttttcggaacatatcccatcgttaagtgacatataacagaagtacctacataataatttttatgaggattaaatgagatatttgtaagacacatagctcatgcttgatacttactacataaaatgatagctatttattattactctaattcttaacatagtaattgctatggctcttaatttctttaaagaaaacctcaaaaggaaatttctgtgtgatataaaaaggaactgatgcgaataactgtcccatggagtagttgaaagaatacgaagtttcagtgttagcttgtgtgttccattcatctcaatgggttttaattccagtttcaacactgattagttgaaagcaaggccagtttcatgatttctcagctaatctatctttaaaaggtggggcatgaataatggtatcactttcctatgaaagaatgtctcaagtggtctagtgagaaaaggttaatatacaagagagcccttggtgaatatgtggagtggaggtcggagaatcagagaggagacaggaggaggaggggcagagtgtccttgtggatggcaggaggcggtcctgactaacatggcttgtggagacattaaagtgaaatgctatacaactctttcataattttcagtggtgggctaactccatttaaagagactggccaggacaggtgtggtggctcacacctataatcccagcactttgggaggctgaggtgggtggatcagttgagttcaggagtttgagagcagcctgggcaacatgggaaaaccccatctctattaaaaatacaaaaattagctgggcatggtggcaggtgcctgtaatcccagctacttgggaggctgaggcaggagaatcgcttgaacccaggagacacaggttgtagtgagctgagatcatgccactgcactccagcatgggtgacagagcaagactccatctcaaaaaataaataaataaataaataaataaataaataaataaaaataatacagagactggccaaaattacactccaaggacctctgggcctcagtttcctcaactgtgacatggagaaaatttctatttacagagttgttgtcaggactgtgtgcttgataccttttgggtactcagaaacagtcctgtcaagcacctactgtaagtcaataaccgagattgttttctgactctccatttcctgacatggctgatgtcgtagctctataaacagacacaggtttgggttggtttgttggttcagttgttgcttgtccaggctggaggcagtttgcatgggaagtagtagcttctgttcagggaagaaattgtgaagggatcacaggtggcactaggcaggaacttggatgagcaacacgttaagatttgatagtggtttggcagcattcccacaaaagaggaagatttgattgttggaagggtccttggaagatgaaaatgttcttcgtaaggttgtttacaacaataaaatgggaagacaaggaggtagaaagatatggagttggatgatagagaaaaaaatcttataactgagcgagggagttattgaagggaataaactaaggaacagaaccaaaggagaggaa

SEQ ID NO: 1883592 - DNA, 4001 bp, Homo sapiens
gttaaatatctgtacactgtgatgaactaggtttgaaggatctaatctaatataaacagtgcctgtcttctgggacaggggagcatttagtgtccaagaatcacattttattgaatctgactgtggtttctgaaaagatggaaaaaagaaaacccacttcagggtttcgaggaagccatgaaaactcatgctaaacagaccgagggtaactttacagctttgattaacaggttttggaatgtgtttaaacatagaggttttactcataatactcctataatcctagagtagcaaagacagaagatgctctacttatgaatacaagcctttaatagaaccagagtacagtttgttctttcatgactcatgaaacagaggaaatcatttcctctctttattctcagcctttgcctatgttttggcctaagacaagcctgtactttctataaaataaaaaacacaattctatttttgtttcctcccttattttacccccaccattatgcaccacaactaaattgactgtgcatcttattcattttgtttgtttgtttgttcgtgacggagtttcgctcttgtcgcccaggctggagtaaaatggcacgatcttggctcactgcaacctcagcctcctgagttcaagtgattctcctgcctcagcctccctagtagctgggattacaggtgcccgccaccacgcctggctaatttttgtatttttattagagacggggtttcatcatgttggccaggctggtcttgaactcctgacctcaagtgaaccacctgccttggcctcccaaagtgctgggattacaggcataagccaacactcccagctttatagatgtttgaatctgagcattcaacccagtgcctggcattcagtaagtatttgatgaaggctttcattcaattcagtttctggtgatcagctcaataggcatttgataaattcttactgaagcaatgtatggtactgtatatatacaaaatatagataaaacaaagtaactacaattacctaaagatgtcttatttatgttattttagtttattttattagattttgatgattatccttgtttttctggaaatttcataattggatatttattaacttggttctaattttgttaagtcatattttttcattagtaagcagacaacatttaaaagaatagacattactcatggtcttaagatcaaattttgtaatccaatttattggtaaagtacctgtgcccagtaattattttgagtagtatttatttaaaatatttttgatgaattatatgatggtctcagtctaaattaagtctcaaaaccacatagtgttaagtgtttcaacttccttattttgcaaaattgttttcactatattaggcctttccaacttttatatgtttttagaataatcaatttttacaaaattgctacggatatttgattgagaccttgtgtaattataaaaatccttttggagaatatagacatattgaatatcaaatgataaaatgataaaatttatgaacacagtatgcctcttcatttacttagttttttaaattttacttatgaattcttattttttattgcaatcttgtatttttttgttaatttttttcctaagtattttgttttaataaaattgtaaaatgtgttttttatttttaattgtttgctaatatataattggattttttgaacagagatgataattatcaattgcaaatgctaattttgcaacactatagtgtatttgtacaagaatatttactaaactaattcagtgatgatctaattgaattattgatactgagatctaaaataatctaaaaccaattgtattaatccattctgacactactatcaagaattgcctgagactgcataatttacaaagacaaaacagtttaattgactcacagttctgcatggctggagaggcctcagaaaatttataatcatggcggaaggggaagcaggcatgtcttatgtggtggcaggcgagagagagagtgtgtatagttggaactgtcaaacacttataaaaacatcagatcttgtgagtactcactatcatgagaacagcatgggggaaacatcccatgatctgattacctcccgccaggtcccgcccttgacaattgggaattatggggattacaattcgagatgtgatttggctggggaaaagagccaaaccatatctaaatattctaaaaaaattagaaatattttcaacaatgtctatctctgtttattagaacataaactgtatatactactattattttgaatatatttaatttgaatttggtttgatgtggaaccacagacacaggggaccaactgtatgtatgtgtgtgtgtatataacgcacatatatatgtcaaaattattaaattgtacattttaatatgtgtagcttattatataccagttttacctcaacaaagtatttgtgaaatttaaaacttactacaaacaaaaaaccatgaactgtataaaaatatttctgtttacttccatattacctattttttgctacccagttaaaatttctcaaaattcataaattaaaacattttaatttagtgaaataattgtctttctaaattatcatttaaggatagaattttccacattatgtggcaacctcaaaaagctttaaactatgtatcttgcctgagaatttttactgaaattacctaaactcaaagaattcaagggatgagaaacattaaaggttaaaatctatttaaataatgcaaatattaaaatatttatttattagaagcctaaactcctttattcatcacaaagtttttgtatactccttttaaatatataaagcattggccagaacactatttacagactacgaacttccattaattaccgtgtctttagttaaaataatagccatattcacaggagatacgagtgaaaaggagtgaggttctaataaccacaataaatagagattctaacaggattaaaccaggaaagcacacttcttgcctgctaagcataatattataaattttccaaagtacagggggataaataacatgattagagcgtttggcaggcctccgaaatgggtaagcaaacatttgtgtttactcgagataagtacgctcaaatgacatgtatttggaaccaggatatggaagagtcaaactagcagaagctttcacattttaattttaaaatttccaggtttttcaatagagcctgcagtacactagcaaacagcatgtaaaactattacagaacagattgttttttaaaaaacaaattggcaggttacagctatgtacttaatatatctttggtttaagaagactagaataatgattagaggccaaagaatccccaaaatgtaaattgctatttggattctacatgttttattttatttgtcttagtggttttgagttgcttgtttggcttagaagttttgaggctctagttggagcttgtttatttgtttttgtttgaaagaacctgaagggtggcagagcttagatgctttcagattccgattagttgtacgatttttttttcttacttgatgttgactgaagttctgctgaattacatgctgtgattatcaaagacttcttacaagcagcagtcctgcttggagatgattcagaagctggaggaggtatcacagaatcaagatggatggttttaaaagctgcggggacatgaggtgacatgtatagcttctaactctcttagcctggtctactgtactagactggagaggtgtctgaagaaaagtgggtacaaacggcatgtcactaattttattatttgccaaatgataaggctcttgagcatttacagtcatgtttaagtttgcttcagaaaatgtactcttagccacatccattgttaatgtgggtttgacgccaaagggtggtcttccaaaccatagttgttttcttgttgcaagtcatatgtaaagctttcatctagatatg

SEQ ID NO: 1883593 - DNA, 4001 bp, Homo sapiens
tcagagatctaaagcctggagagaggagggggaggtgtccaaagtcaccgagtgagtgaatgaatgactgcaaactccatgagggcaggagccaggtctgtctctgctgtattcccagcacctggcccagggcctaacacatagtaggtgctcaataactatttgttgaataagtgaatgaatgaggcttcacacttggggaattctttactttttgccaaacatcaccaagaaaatccctaactgtagatgttcacatggatgatagttaaaggtcagttactgaccaagattacccaagtgcccctatatgttcctgaaactgtcctttaagaatcaccctgattcagggtagaggaaggaaatcctgcacaggctctggagaaagctggtgtcatggaggacactggagcccttgtccaggaggtggctagtatagatggagcaggaacctgtagatagaggaggcacctgtagctgatgatggatgccatcctccatccagcctcagtaacaggtcattgcaccccccggggcagcaccttcaggtgtatgtttcctctgagctacatagcatcccagtcttcaaggaggaagctgagtctgagagaggtcaagtgtcttggtcagtgtcacacagctagtctgaactacagccaggaggcaaagctgggttttggagtcgtgcattcgctatctgctgggtgcctgctattggcagcacttgctgcatgaggtgctggtaggaaggaggcagagtcctgctcttaaggtgtagtagagaagacaggtgcaccacagcgcacaatgacacagagggatggccaagggcagtgggagcacaagaaggcagcaggtaacagcaaggggaaggagagggaggaaaagagatggagcagtgctgggctctggagaatgggcagaacaccccccactggggatgggcgggaggacacgcctccatctcggacaaaggtgcggagctgggaaaagagatggtttcttcaggaaagggtgagccctgcaactcgacaaatcgtggatacaacgaaacaggaggaataagagaaagaagaaatctagcccggaaggacagacagggctccactgctgtcacaaagcactgtcctcacaaccaacccaggagcgaagggcaggaggggagaggtggattatatcttctgagtgataaaagttcacactcagctcctatttttccttcagaccaggggccacctggccataagacatttttccagttctaacaagactactgttctctggacacacctgggcttcctcctaggaatacctgacgctggcctttcccgaggagaagtgagagcagctctgcatggcgatggaggtcacctgggagagaccacagcctcgcccaccgctccctttgcaaagctggtcacaactgaccgcacctccaccagattcgtgcctggcttccctcctcgtgtgacatcattgtcagtatcatttctcctacaaagcaatatggaggccagaaagtaagttgcttggctttcatgaccacagttcagtcctgtgaccagtaactctattgagacatgtacgttcttatgtgtccttttaaacaaaataatgaatggtccatgattccttaaggagagatgaccagaaatcaagcttacacatcctatggggctgaaatatttgatcttcatggcccaaggaacactaggtgagcatcatccattacccacctgccttccggagctcatctcacctgactcagggagtggggcagcgcctgtgacaggtgtggaatccttttgtccacttactttccttactgctatagccccagcacctgatacctagcacagaataggtacttaataaatacttagtggatgaataaatctgaaatactatggccataatttggtcacatgaaaccgtaatgtagaaaagatgcttcctgttaatgaccaaaaacactttggattccaaacgatcattttaaacatgaatctttctctgctgtctcctctgaccccatcctggggagagcagagaggagcctaggggactagaatgtgccccatcctcccctcagtgacgtccacagaactgcagcgctgagaaggccagattgcagatctgaagtccaactccctcattatacagatggtgaaactaaattccagagagggaggctgacctgctgcagctcagacatcaggtcactgggctcccaggccagttggagctttttccaaaaagctgggtggtccagatggaaaaggagagagaatgagatgaagtgggcaaaccagacagctgtgacggaatacgtcctgatggggctacacgagcactgtaacctggaggtggtcctgtttgtgttctgcctgggcatctactccgtgaatgtgttggggaacgccctcctcatagggctgaacgtgctgcaccctcgcctgcacaaccccatgtacttctcagcaacctctccctcatggacatctgcggcacctcctcctttgtgcctctcatgctagacaatttcctggaaacccagaggaccatttccttccctggctgtgccctgcagatgtacctgaccctggcgctgggatcaacggagtgcctgctgctggctgtgatggcatatgaccgttatgtggctatctgccagccgcttaggtacccagagctcatgagtgggcagacctgcatgcagatggcagcgctgagctgggggacaggctttgccaactcactgctacagtccatccttgtctggcacctccccttctgtggccacgtcatcaactacttctatgagatcttggcagtgctaaaactggcctgtggggacatctccctcaatgcgctggcattaatggtggccacagccgtcctgacactggcccccctcttgctcatctgcctgtcttaccttttcatcctgtctgccatccttagggtaccctctgctgcaggccggtgcaaagccttctccacctgctcagcccaccgcacagtggtggtggttttttatgggacaatctccttcatgtacttcaaacccaaggccaaggatcccaacgtggataagactgtcgcattgttctacggggttgtgacgccctcgctgaaccccatcatttacagcctgaggaatgcagaggtgaaagctgccgtcctaactctgctgagaggaggtttgctctccaggaaagcatcccactgctactgctgccctctgcccctgtcagctggcataggctaggttgtgctgtggtcatgacctcaaaccttgagaggcttaaagccattaaggtttgtttcttgctcctgatgcaggtccaccagaggctggtggggcttctgctccgcatcatggtcttcacccctctgggactcaggatgacaaaacagctaccattgggaacactgctggtcaccatgacaaaaagaaaagggaaagtaacaaagcctacactgactcttaaagcttctactcagaagtggctgtgttgcctccacctacatttcagtggccaacacaatggcaacaggaaggcacaggaccacacctattgttaagggggaaaagcacactatcgtgtgtctggatggcaaacgagagggacagagagatttgtgaatggcctaatgactaccacaccagctgacagtgtcaacccaagagctatgggaggtttggctttctttatcctgaccatctatccttcacgggctgctgccaagttaatcgtcccaagaaagctctggttagctcacgtgtggtagctttatactgagtcaaccaaactaggttagagggtgtgggttagggttggccacagagaagtttgcatgtgatttggaaggcaaaagtgggccaggtgtggtggctcatacctgtaatcccagcactttgggagaccgaggtgggaggatcacctgaggccaggagttcgagaccagcccgggaaatgtgatgaaaccctgcctct

SEQ ID NO: 1883594 - DNA, 4001 bp, Homo sapiens
ctttcagttcctgatttttctgtcactccgaagtgacacaagtcattcacattctctaagaataggagtgacctgttggaatatagcaataaagtctcattaaaaatatgtttaaaatatcttatttctggctttcctgttaataaaacatattgtactttctgtggctcttattttctcttctgtttccttttgtggtttttctaatcagatttggaaaggcccataaaaggatatacattttcaattctaaggtaaataacttgttctcaggaagcagctctttggtttcagaatttcagggctgatttcaggcaactggcagggagcaggcctcgaggttgggttctgtgcaatgtgcaaaagtaatcaattaggagcaagtaagaagcggtttctagaaatgtccacttgagggtgctgcgtgcccaggtggcaacagaaccagcatcataggcacaccgtttacaataaattccagtgatatttcagttcctggtgtagatcagcagagccggcccaccgtgcactccggcgctgtctgttcactcactcctcagagctctcctaagccccatcctgtgggtcaaccccagctgggctgtcccaataacaaggatccctgaggctggagggcacagaaggctggaatgggaggagacgggaagttcacaggttactggaggggaaggacagggagaaggccctgggaggaggggaaggccagggaaggcttgctgaggagcgggtgagtctgacccatcagcacagcaaatcctggggactcgggcgtcacatgaaggtccagaagtcctgggcacttggcactggctgggcatggcgaacaggccccgtgaagagagaagcttcctggcgaaacgtggccaccgtgaagctgcggccaggacccccctgaggatcctgggcccttgagtcacagctgaagcagcagaggacgcaggtgatggccacagtcaccacgaacagcaccaccaccaccccaatcactgccgtttccatggcccactgagcaaccttaggtcctctcggagccttcgctcccatccagaacaggaggctcttcgcgatcgcaggtgccccgtgctcctccggcggctctccttccgtctcctaagaagatgctgctctgagtccctgggtcgctcctgctccaggccttcgggcgctgccacgtggccccactgctgaaatctcagatgatctctgtctattttctaagcctcaggccatgcctccaagagctgtggtcagctccatgtcagcttctagaagaagcactgtcctggaagacgtgagcacagattccctggacacagagaaggtggagaggaggggtcagaagacgttgcacagagacagcctagccagcgctggccctccggtgacgcctacagatttcaagagcaagttacgcccagaccaaagacaaaatactccccctactatggatgcaggaggagcccggctcctccccaggagggaccttgggccagtccttcaattggcctatctgctgcctccccagcccctggccctgtgctgggggcagggacatgaggagggaggaaggcatgcgccagctctgggcaaggcaggggacactcacgggtcaccccaggtgccagggcctttagtgggggctggaggcaggggcaggttgcatttggcgtccttttctgcatggcgctgggatcatgcagtttagatagagtatcaggtgcttccccgggaatccctgccctgtccatgaccgtggggctctttacccggaggtcccggaagagccttcttagatgccggcctcacccaccctctttgctgcctgcttagcccgttgctcacattcttgaactattaagatttaccctgggctccccaaaggccagccctggctgtacctggtgctgcagcctcctggcctggtggccgtcccagggaccacggcgttcctccctgggtgctgcagcctctgtcctggttggaacttggctccgagatgtctgagcagctgtgagcacttcctgaattctttcctccaattgtgagcgagggcccaggacccacactgcagccctccaacccccgctcagcagttatcccgtcccgccatgcgcaccccaggccttttccaccctcctccctgccaggaggtcaggggaataagctaggcccaggcaactgagttagtctgccaggtgagagccctttcacacccagcacctcctgagacccccaccacttccagaaaggagactgggctattagccccactttgtccatattctgggaaacagagtagtgagaacaataactccaggcatgggacctcaccagacatgatctcatataacctccccagcaaccctgcatagcgatatagcctccattttatagaaaaagatcctatggtcatagaagttaaatgacctgccccccattctgaattagccatgttaacaggcacgagcaatggccgaggagggaccgccctccctccactcctagctcagtgcactttccagttaccatgggaccacagagcgaccatctgattctgcggttttaatgatctgggtgcaaagtgccagaaagggcagagggctggcccaagttcacatagcctgggtccttttcagtttctccaaggcccaagggaactttctttagtatcagcattaggaaactggcactttgcacagaatgggagagcaacttttcagagcaaacgatagcctgtcatattctcaatctgtcccttttctgagatgatgagaccatctgggccctgggctcctcctccacatggagcaggctgtgggccatgacaggaagccaattccttggattgtttgtattaactgggatgaccaggaggaaggagacgacgggctgatctgcagggcctgtggtttcaggttgagttaccaacatcacctccttaactggggtgatagagggcaccaggagactatgcctcaagctttaacatttgttcctttgatttctcatcgcctattcttcctgtgtacacgcagccataggccgcctgcagattgtctgagtggttccgcatttttgaactggaataaagggcaattgctcagcgggttctctcctgccctgcataggcttccttttccgtttcctgctttcggggaacctcctccccatctttgattcatctgtgaaatcagcctggagatgcctgggaaaggggcagggctgcagggagcaggctggcaggaatccaggagggggatggagggggctgggctaggcagggcatgggaatggagaagggggtggatttgaaggacactgcagagaaaatcgacactgcacggcagcctagggtcaactttcccaacccagaaacctcaggtgggagaaatcagtgtgaatttgcctccctctctctctcactccctcctcctgcagccctcacagagaatccactgggaaatagaaaggaaagaggacattctattccagtgagtcaccaggtccctgagtctctggcctgctctccagcccctccccactgcctctcctggcccccagtccttgtcttcccccaattcccacctcagctcacaggcacaggctgaaggcctcagagccaggcttccttcctcgctgtggatcccactagctgttcacagagcatattccaacgagcctccaggcttcggcacgtgggcatctctgttatccaccccattgcagagaagaggaaagtgagaccccagcattctcccaaggccatccaacaccctgcaccccagcaccacagcctccactttaaagaactccactcgctgcctcccagccctcccaccacacacaggcaccagctggggcaggatggctgaaaacgcaaggcttggagaagaaaccctgatccaattaccaaggaaactggattcaaggcagcctgtggatggggcttcctcgagtttcagagctcagtctgccctgga

SEQ ID NO: 1883595 - DNA, 4001 bp, Homo sapiens
gtccctgccctcaatggggggtaaatgctgaggctgggggcacgagcccagaggagggcaccagggcagcccagacatgagctctgtggtctgtgtgtgtttactgtgtggccagagcgtgtgaggagtgtgtggaaccgtctgtgtgatgtgggagtagggggataagtgtattggcatatggagtgggagtgtgtatgtgtgcacgcatgcacctttgtgcctgtgatctgcgtcatgcagtgtgtctgtgcctgtgtgggatgtggtccctgtgatgtggggcgtgtatgtcggtgtgtgtgtgtgttgtggggtagtgctaaccgggacactctccaggggaagatcctagctcggatggaggtggaggagttaaccaggagaatgggagagggaccagcacgtgcaaaggcctggaggcatgaagatggagcctggagcactggaggacttgaaagtggtccagtgaggctgggagtagggagggagaggcaggggctgggagggacagggcaggccttcctccaccagtttgaattccgttagcttgagggtgtgtacagccaggaggggtggaggggctgagaggaggccgagccaccactgaccaggtggaggggtagggggtgagcctggaccggggcaggtgctgggtggaggtgggggagtgagagccagagctctcaaccaagcctctgggaggccgcagggcctgggatcgcagacccgagcctaatccctgctcagcccaagagctgtagccagaaggttcttagtttcccctcagtaaactgaggttcaggacatttctggggcacttgctctgtgtgactgggcaagggctgggcaggcatttccagcatgaacacgctttcccaggcccactggttggagggcaccgaggggagaagggggacagaggaaaggagccggaagcaggatccagaatttgaacctaggtggtctgactccaagagggccctctctctcacttgacttcaatagtgacattagccaacttcaatagtgaccccaggcgcggtggctcacgcctgtaatcccagcactttgggaggccgagacgggtggatcatgaggtcaggagatgagaccattctggctaacacggtgaaaccccgtccctactaaaaatacaaataattagccgggtgtggctgcgggtgcctgtagtcccagctactcgggaggctgaggcaggagaatggcgtgaacccggtaggcggagcttgcagtgagccgagatcgcgccactgcactccagcctggggaaagagcgagactccgtctcaaaaagaaaaaaaaaaaaattgaccccagtagtgacaacagtgactcacctgccccatgggcttccaactgcgatggttgtgctctcctttgaccctgtatcctgggggactgcatacggtaattatattgttactgcgcctttttagagatgagaaaactgtggtcagtagcagagtggcctgaccagggctccaactcccccgtcctactgcagatgatgtggggcagttttcttagcacaggctggaaagctctcttaggtaacacgtggatgacagcgtgtgacccggcagaaaagaattgtaattccgggtggctgtacgaccttggacggtccttttgccatctctgggcctcgatttacccaactgtacaattcgccccgtgagtctaggaagatttgctgagcgtctgccaactggcagatgaggaaccgaagttcagagagttgaaagcacttgccccaggtcaggcggccggcttcgaagccggattccgaaggcgtgccctgccctcggcccccagcggtgtcgtcctgcccccagggggccgcgatgcggggccgttccaggccctgccagcctgacgtcaagcccggccggcggggcctcgctctgcacaaacagacgccgcaggccagcgtcggggccgggggcggcgatgactcagggccccgagacgggccgggaagcggaaagttgtgtgcagatgacatcagccggccgcgagggcgggagggggccggctccgggaaacggcggcctggcgggcggcccggggcagggcgtggagaggcggccgcggggcgggggcggggacgccgggacgggacgctcgggaccacgaaaaatgtccccactcccgcccgccccggacccaggccccggagcccggccccgcttttcgccggcgaggagcgggcttcacccgcctgcaaagactccgcgctcccccgcgctccggaggcagccgcatccatcctgctgcgtccctgcattttaattaccgccgtattaatattcatgagccgggactcgagggggaccgcgggctgtcatttccctcgcccgcccttcccccaccgcacccctcttcccgggctgagtcgtgggcttttttcctcccgttctcaaccccgctcgcaccaaccgttggtgcgcagcagatttgggggaggggggttggtgtgagtgtgagcatgagtgtgagcgagtgtgagtggggaggggccgagtgtgagtctgtgcctgtgtctgtatgcctgtgtgtacgtgcctatgtgtgcctgtgtgtctgtcggcaatcccagggccgtgtgtgcacatgtctctgatgtctctgtggggcttggagaagggccaaagtctgtccaagttagcagggcctgactgtacaaatggggaaactaaggcctggagaaaggctgggccttgtccaaagccaccccataggtcagtagcacagggaagccagagcccagggtcttgcgtttggccgactctgctccccgactctcccgtgctgttgtttgtaacaatggcagacaggatgtgctgagccggcacctctcatatggccttcccagcaaacctgtgcagcacgtggtcctatccgtcccccgtgcacatagggaaactgaggcaactggtccagccagtgaggggtggactggagcccagaagtgtctgaatcccaagtccctgggtttaacggccccactgtgatgcctcctggggaattgtggagtgtcctcactggggtgatccgggggtacctggaagttcctgggtgcccgggcatcaggggggtgtttccccagaaacacagcccacattctgtttccctcccaagtcagtcatcagatgaggctgccttcctgtggctctcccagtccctctctgtcctctccccatccctgaagcctcccaggagctgccctgcacaccaggccttcctccctgggcctgaggtcaggcaatcactcattcattcatccaacaaatgcttcagtgccagtcactgtgctaggcactggggattctctgctccctactctggtcatctctacctggcctaggagcctccaggcccacaagggggctgttcacctctgtgtgtgaatgctcactagtggtgggggactaggggcacctgtgcacaaaagacagctctcacccagccttgccacagaggtctggggtgcccacatattcagtggccagaaaggggctgcgatcatcttagggctgatggggcggtggccacactaggcagcctgaatctttgattctctctcctgcaacttgtcctcctctgactgccaagccaaataaccccaggggctggtcagcctgccttaccccgggttgagccaaggccgtcctccctctcacgtccagcctagaatagatggactgttccctcctctctgcccacgcagggctgggctggaagttgtgtcccagccatgtcccctgagccttttctcccctccctttgggagctccgcaggaacacagagaagaggacaggggtgcagccagaggactcgggagaggaagcgataatttaattgggcttcacgggctaaataggagtttgcctaggagaggcggcccaaggacaggggactagctcagaggggtgcctacctgcagcccccattctataacaggaaccagagcagg

SEQ ID NO: 1883596 - DNA, 4001 bp, Homo sapiens
caccattagcgccgatgccaaaggaaccagcgctgctgtcaccctccatgcacctgcccaccctccaaggctcctaccacttggcctccacgggtaccctcctaccgctcctgttgagctgccgtctccatcaccgtggccgccacaacagcaggagatgaatcacagagctgtgccatcttcaggctccaacctccagtcaccacaggggactcctccttcatcagcctggcttggagtagctgggcagacaatgccagaaaaacctacaacaggatgcagaaagtggcagtgttagagcctcaccttgtcatgctggccactgggtggctggggccagtttcagcaaaggcactcacacccaccctccaaagtccagcctctcctcctagaccaagctggcctcctgacctggggtggggactggagacaccacagtgcccggggctccttggggagcaagaatagcagaaactcagacccagccagtcttccccacccaagtaccagttcccattcctgaatcctccacccacaggaccctgagcctccgtggtgcccactactccatgcctggggctcccagatagtctccacaacacagagcaagagggcaagggctgggtaaccatggtgggtgtgagggccctgcggtggtcagaggattgctgcgaaaactctgtgcaccctccgtgctccaacacgagcagaaattgttcaccctctagagccttgagtccgggaagaggagaagggccccttcctcagaggccaccactgtcgtggccacctccacaacctgctgctggcagcagaagtgcaacctccccccatagcgcccctaacctgcccccccccaccacaaacttagcccctggattgtgcacacaacacacccagagactgctgcaggcagtgtaaccctgatagcgcccccaaaccacccctctgctcctggcagtgtaacactcgatagtgtccacaacccatccccaccacgggtgttgcagcaccaaatagtgccccatcaaacctgccccccacccggaccacaagcagcacagccccagatagcacccccaatctgctcctgtcgcgggcagtgaacgccaggggtagtgcacccaaccaaccccccgaccccaccttcccctttcccccacggacaatgcaacatttgacagctcccctaaagcacccccgactgcctgccagttggcattgctgctgacattgtagctcacgatagctcacccaacccgccccctggatcggccagtgcagcagctaataatgcccctaaccccccgccacttgccgctggtagtgcacgacagcacacacaacctgcctccaaccccccgccaccttaggcagtgtagaccctgatagcgcagcaaacctgccccactgccagcaattcaacacccgatagcgccacccaccagccacccacggcaggcagtgcagccccaaaagcacaccaaacccactcccccaccaccccacaagcgggcagtgcagccgcagagagcgcacctaccctgccacctttctactacttgacagagatgcagtctccgtcgccaccaccaaccgcagccaggcgagccgccagggccaaggctccagccgccagcattgggcatggtccccaccttctcctagacctctagctggtcaagagcagctccagctgccagccacccccctaccgctccggctgccagccacccccctaccgctccggctgccatcttactgctccagcctcccgcctagcgctccggccgccatcttactgctccagcccccctcctactgctcagactaccctcctaccgctcaggccgccctcctaagacttcagccgcgctgccatctctgttgccaccaccatccagagcgagacgagccatggtgttacaggctccagcctccagctcccccttctcctggtcctctaagccgggaacagagcagctcggcaggagatactggagagcctaaactggcgtgaggcctcctcaacatgcacatggggttacgtgggtggtttctggactacatgttctgattgggtgagagaaaacctctaggccttctctgattggactttattttcatactctgattggttgtcctaagactttctttcatccaatcagaacataacaaagtccaatcagagtaggcctccaggctttctcttatccagtcctggaacgtgtagtccaggaacggcatatgcataacttcagtacataagtggtgctgaagaagagtcaggccactccaggttcttctgtgtctgctcactgagctgctccaagcccggcttagaggaccaggacagactggaggctgtagcctgcagcactgtggcttggcctccctgcagttggtggcgacagagactgtagtgtggctggagcggtaagaaggggaaaatacttttgggatagatggaagggtaaagagggtggttagtgccaaaaggaaaaaaggatggtgagccggagaaggcattgcataaagacagtaaggaaaagatgttggggggaaaaaatggggggtagatggagggggaaaaacagggtggtgaacaggagggagagaaggtttcacagaaaggcagtggggaaaaagtttttgggtagatggaagggggtaagagagggtcgtgaggggggaacagggatgagcaggaaggagagaaggtttgcaaaaatacggtggggagaaaagaaagggaaagaagactgtgggtaaaaagattttgagtggatggaggggggaaaagggtgacaagtgggaggagaaaagagggtgcagagagggagggggaagagagagtggcgagcaggagggagagaaggttttgcgaaaagacagtgaggagagaagcttttaggtagatggaggggggaagagggtggccattgggagaaagataaagagggtggcgagtgggaaagagaaaaggttttgcgaaaagacgataggcagaaaagaaagtgtagaaagaaaagacagtgggtaaaaagtgtttgggtagatggagggggaaaagagggtagcaagtgggaggagaatagaaagtgtggccaaagggagtggggaaagaggactgggaaaaaggcgatggggaaaatagtttggggtagatggagggcaaaaagagggtggcaagcaggatagaggaaagaagagggcgagcgggaagcagggaaggctttgtgaaaagatggcagggaaaaattggggaggtagatgggttaaaagagcgtggtgagcaggagtagagaagaggctttgcaaaaagacggcgggaaaatgtttttgggtagatggagaagggaaagggtggcaaggaggaagggagaaaaagacaatagggaaacagtttttgggtagatggaaggggaaagagggtggcgagcagcaggagtggggagaaggctttgggagaagatgagggaaatgtttttggggagatgaaggagcaaaagaggatgatgagaacgggaggcggaaaaaagggtggccagggagagggagaaaagacggtggggaaaagttttggagtagatgggtggggaaaacggaagtgagtggtaaagtatagaaggctttgcaaaaagacagtggggaaaaaatggtggggaaaaagttttggggtagatggaggaagaaaaagggtggcaagagagggagccaaagacggtcggcaaaaaaattcctcctgttactgattttttaatacttttccactccggtcagaaaaaataattgatatgatttcagggtttttttgttttgttttgttttgctttggtttggtttggtttggttttttgagatggagtctcgctctgttgcccaggctggagtgcagtggtgtgatcttggctcactgccacctccacctcccgggttcaagccattcttttgcctcagcctcctgagtagctgggattacaggcatgcgccacaacgcc

SEQ ID NO: 1883597 - DNA, 4001 bp, Homo sapiens
ctgtccagaatctaaacccgaggtatgacggtgcctgcaagagagaagtcaccatttatctcgcggactgggaaacaagcagagatacattcttaggaatgcgttgtccacaagagaaggtaataaacgacgaggaagagatcagaaagaccagtattggcctctatcagcatcacaagcatttctgcgactcaatcaatcattaatccaaactgggcgtaaaaatgatgcctctctttcggggcgtacagcgacatccttctttctcctgcaagagtacatcaatggttacctggcaccgaaactcctagttagcatacaaatagcctgttgatatttctgtgtctagtgccacctattctcgaagtgccaaatagctcctcattaaccttcaccgagcccgtgtggcaggtggccaagtcgactacaagtcacttacatttttctgttatatcagttgctattacagttaatgtagggaagatcagaaatgcatgctattaagagaattaggtaaatccattcacactaagcatgcatttaaacaaagttatttttaaaaagatgactactttttagtgtgcgtagttgtatttatagactttctaacgactccctcaaaaaatcctttacaaaatgtttaacgataaaaaattttcaacatattaaaagaaggaattagtcttctaattcaacgctgcattctatttcttgaactcaattaaaaataatatgggcgcttttctaactgcatctgtaaataatcaagacctctcgagtaggatctgtttaggagactacaaaattgggtatcattgcactgagtacatagtaggcccgcaacaaatatttgttgaagggtgggaattcctgacgtaatcccaacgttacttttgtccgagtttgtcagaatgttaaaagttaacctggatcagagaagtgggaacaaaggcagcttaggaactaccgcgaccagccagaagcactattctcaaaccttcagtgatgttgtaaagttcctccccggtgaccaggcactgggattcccatttgtacgggtgcttcttcccagagcctcttgcgaagcccaatgaaggaagtagagaaacagtcctgcttattcccatcggcttttcggtagctctggcgactcagagggtgacttgggagcggtgcgcgctccgacaagcgacagggaggtcatacagacttttacttcctctcccttgacaccaccttgtaacgccaggttctttttgcacattttttatacccagtcatcaaagcacatttccttcacctgcactggagcgtttaaattcttgacagcaacagaaatatgttcctatccccgtttttccaacgacgaaactgaggttcagagaggagccctggatcacccagtagtctcgggaagagcaatggaccttgtcgacctctgttctgaagtcccagaaattttgcagagcccctcactcccagcaagaaagactcgccatgggtttgcttttttaaattttattcccctgcaccccttctgatgtgagtacctgggactactcccagcagccctcctgtaacagggcccagcacgtttttatcaaatcactctgttttttcagcgtcttcccctgctagctacatttcagcctttgcaaacaggcttctgccccgcgacgtgtatgcaaactacaaacccccaccaccgctggccgtgtgtgcatgcggttggcaggctgggcttttattttatttattgcttttaaggttaggggtggtggtaaggagatgaaatcattagcccttcaccagttgttttaaatgttaagaaacaaaatcaagaaagtaggtttgctaactttgggaaactagattgaggggaagagggactggaggagaaacaggaggagaaaggggtgtaagcctctgttcccaaaactgaaagtaaacgagcagccgagcagctcttgaactagttcgaaattttaaaactgctgcataaggaggaaacaagcgggatttgggtacaataaaccacgctggctgaggccaaatgggagatgggactgcaggtcccagcgtaggcagagaacaaggccctcagaatgttccggcagagccaccagccttcctcctgtgtgtcctccatccgtactgacatagggaaagctgagccccagtgcttcctggaggacctcagcccgtgggtcccagcggggtgggctcggaattgtttcctccctagctctcaaccctcacctctagcaaaaacgtgcacaacagccccactgctctctccagacatcttgcccatctccacgtgccccaccctccctacacacccgtctgcggcacaggggaaccagcagctgtaatcataactcagttgaattacactcaatcaatccgcccggaatgcctccagagaatcgggatcccagcaattactgggaagcgaggtcgtggggcggggcaagggggaggagaaagaggatctttatcctgggactaacttcaggaagtccgagaagctccgatattgaatgggaaaataagtacattttggggaaggggaggagtaattatagattttaccggattgtgaagggaatctacggctgctcaaacagtttagtaaattaaatattcagagggaataggagccagagagcctgggctcgagctgtttgttccactggctgggtgatcttggtcagttagttttctgcggctcagttgcctcagttgcctcatctgcaaaggggaaagagtagccttccttggccccactccgcaattatgaggacagcaggtcttcacaggttaggagttcggtacagacgttgatttcctctggaggtagcagcacagccagtccgggagggcccggccaaagcgtgccttgaaaacttgattgaaaggcgagggctcaaggaattcagctcccctcttgaggtccctctcttaaaaggggtcaggccgtgactgaggacctggtgaggtgaggaaacagaagtcctttgccttgtaaaccgacaccaaattacaaagtaccattcggagtccctcttgtaaattacaaagcaactgggccgctgttgactcagcccgtggagctcggccggcggggctcgcctcttggaactgaccggcctggggcccccttccccctctgcctccctctccctttaccccaaatctctctcaccctgtatcccttccctttctggcgctgctcagacccacccggtgagaatctctctttgggcgagtcacgtatgggaacctcaacaagaaaagaaggaggcccagcactttgggaggccgaggagggtggattgcttaaggccaggagttcgagaccaacctcgacaacaggacgaagccccgtctctactaaaaatacaaaaaaaatagccgggcgtggtggaatgcgcctgtagtcccagctattcaggaggctgaggtgggaggatcgcttgagcctgagaagtcgaggccgcaggtgcgccgagatcgcggcactacactctagccttaggcgacaggagtgagaccctggagactgagagagagagagagagaaaactctttgttgttgttgtttcctggatgagggtggttttcttgttttcttcaaacaccctgccacaaatttaaaaataaaataaataaaggaggaaagtgagtttcaaactggctccctctcacccacccagttctttttacgaatcccatcccacccagttcgccccggagccacgcagcccaggtggcttccccctcgcgtagccacacgggctcggatcccattcgagggtcccgacttctgcagccccgccctgccccttcccacttcgctcccagagctaatcgcgggagcggatcctgccccgagcattccccccacaccccccagctccgcccggactctgcgcggacggcccggcttagaggcccagcctgacagaggcgggttggagtgcggatccgcccctccc

SEQ ID NO: 1883598 - DNA, 4001 bp, Homo sapiens
gttgtttgacgccaccaagtttgtggtgatttgttacggtagcccttggaaaccaatacatccatctgaagaaataataaatgaaacacaataaggcaattttatcaatgattaatattagcattaccataaagatttcataaaggatttgttatgaagaacttcagaaaaaaattaggtcccttctacatgggccagttttgttcttggctgtaaactatgtgagaggagcttgaggaagcactttatattctgagtcacttgtgcttttgagagggcccagctctgagttcaggaaggtgagttagttcataattaggcagccttttatttttatgaccagatcctgacttacatccaggcagaataggtgaaacactgtgtatgattggatctgagaggctgggaagcccatgagccaaaatacctcgtctaccaagaatatgtgacctcaaagtcaacggtattcattctttggggttaaggcaggagctctgaacttagagagattatttagtagttactgggatctctttgctaagcaccctaaaaaaggcattgttattgtaaaatatagtcaaatgttgttatttatggcagctatgttctatgaaggtgccactaacattcctcctaggggaaatacctagggttaggttcctgcaagcttctggtcacaacatgtcatccctccgtcaataggtggaaggtgtgtaagggtgaagtgggatgcagtgttttatggcctttacgccagactgagaaaatctcattcctaagagcttccagagcctgaatcaaagccatgcagcaacagaatgtgagaatgagaaaaagggaaaagagtacgtagatgattgagaaagatgagagacagagagaaggagggtgaggaggaaaaagtcttaaaggaaaactggagaagccagagaggcctgatcaggaactgggagaaagaagaaggtgtgggaggcagataaatgagacccaggatttcatacagcttggctgggtttaacagtcccacttgggagctctgaagtcatagaacccaggacttctagggaagctggttcttctaaagtcaacctgctcagttaagaggaacattgtcttcagaggatcagaatggatttacaaaccttgcttcctccctgcaattcattccattaggaggtcacagactgggggcacacagaaagcagttcagcttttgaagaaaaggtccgtttatggcacatgaatctgtaagtgtgggggattcttgtcaaaagaagaactgcttcttttcttaactctgcagcagatcagtttctctgcaaagaggactaaggacctgcgaatcggttactcagagcttggagagcccaaccttttaagctggagccgagagactatgctgggtagctgctagagatcggcatcaactttgggacaagagtccctggctctgctggcccacttctagggaaatggttcacaatacagcagcgagtaaaccttcaatcccaagttaagtaatggaagacgaatatggtcttttgggcccagccagttgacaaatgtctgcgggctttcctatcacgttgctgctgctctctcgaccctgtcagtgaggaaagaactcagcacttaggactgctgctcacacttgggtgccagttgcgccagaatcacaccaagagcgagtgcccactcaccaagcagagctcaggcaaaggacgtttccaaaccgacgcccacacccgcagagcggtcccagcgaacagcaggtgtcacccttttgcttccaaaccccaaccactttcaggtgcctcgcgcgctctccaaacttgtgtgctcagggctgccgccccgctgggtggctgggcccatctgcgcgtctacggggcgctcctgtgcggagggtggggagttgcagctttccagcgtgccctccagggggatgagggaggtgatgccgagggcagcaggtgccagcagaagtcaccgggcgtctcggaggtcgaagactgaacttgcaacgggagctggggaaggtggtgcgcgcttccaaatccctcccccttgccccagcagtttctcggtgcccagagcagcgcgggggaggcactgctagggctcaggagcagaggcgcttggaccatggctgcgaccccggctccggcccgggtccccgcgcgcctgcagtacagtgtgcaactgcgctttgtgacggaggagcagctctttcggcctggacagttctggtgccccagccggaaatctctgcggctggaggtgcaaccagcaggggaggaggcggacgcgaaggtgactgatggtgaagtaccgggcactgcccccgcatgccgagtcccactcggaagttgcggctcttttgcgcgctagcgcggtaattggagcgcgggtgtgtgcacgtgtagggatgcgagtgtgtgcgcccatcgcgcgtgcatggagtgcgggtgtgtgcgctcgttgggcgtgtacgagactgcgtgtgtccggtcggcgtgcgtgtacccgcggtgcgctatgttgcccggcgcgcgcgtgtagaagtgcgggttgcgcactccggctgtcccagagcaggtgtgcatccccagcaactctctgaagggaaatgccgggctgcctctcctgtccggaaaacgtccagatggatcccgtcgtatctttattgctctcagagaacttagtagctgtaggcagacgagctctgagaaccagcttcggccttaagagatgccaaaagtggggtcaggagaagagaggcatgtgatttcttcgccgggaatccattcaggaccaaaacaggagaggcgccaatgtctcagtacttccaagcctacgtgtttctcattcctttccaaaggaataggccatcttacagttgcacgcgaagctttctggtgagcgaagttgtgaagttgagaaaggactgagcggggtgtacaccaggctaagtggctgttgcggtcagtgtggcatccatttggcatgactttttggttcgacatgtggccttcaccaagaaagcataagcgcagtcacctgggctccacgagttgtgggtatattaggggaatgcttttaaccttggtaggattccagatctttttgagaattcgaggacacttgtagactttggctccagcaaatgctcatacttgctcacaaaactttgcataaaaattggaggggttcacgcttcttgcccccagctcatattgaatacctgtctctggttaagtgtggaaagcagagctcctaaggcagctgtgaggctccgaagacttagggagtttcttcctacccaatttctgagagtctgagtagagtttaaagtgttctgccctgtgaattggttccaaagggaatttcaagtaactggcaggtactgccttctccctcctcagtgataaggatacaagttcacttctctatcttcagagacttagaacatgatcaggcacatagtagacactcaataaatgcttgttttggagtgaaagcaagccgtgggatgtgtcttctccctttactgtaggccgggatgggcaagtttgggtcttaaaacgaagtattaaataccatttgactagtgttttaggaagcttgagtcttggtaatggatcaaaagtcttactcaatagctcactgatttctcttttggctgtaagagaagaaaggaagtagcttttagtgtttctcttgggaattctgaaactcaagcttccagaaaagagtactgtttgcctgctatagtcaatttatttaatctccagtcatgtgcagagaaaacagcagatttgcgacttatgcattatttcatgtcctatggttttcttttccacaaatgtatgttaagagaagaaatatccatagttcaaggtgattggagtttcagactccccaaggcattaccccaatgcctggtctttgaggacataattatcctagaggagctcgcctttaatgcagtacatcaagtc

SEQ ID NO: 1883599 - DNA, 4001 bp, Homo sapiens
aggtcaggagatccagaccatcctggctaacacggtgagaccccgtctctactaacaacaatacaaaaaattagccaggtgtggtggcgggcgcctgtagtcccagctactcgggaagctgaggcaggagaatggcgtgaacctgggaggctgagcttgtagtgagccgagatagggccactgcactccagcatgggcgacagagcaagactctgtcataaataaataaataaataaataaataaataaataaataaataaattttactataaaagaagacattcctgtgtgtgtatgctaacatcaactgatactattatttgcactttgtccacttgaaatactttcgtattatcaccaaactcactttcaaatccctttgtaaagtactgaagagaaaatttagaaaagggtatgagaaagcaattcacataagaaaataaacaggtaatataacggaagtagtatctatatttgtgagtcacaaaaatgaactagaaatcacagtgagatatcattattcactttacacaaatgagaagatagaaataaaagcatcggctgggcgcggtggctcacgcctgtaatcccagcactttgggaggccgaggcgggtggatcacaaggtcaggagatcaagatcatcctggctaacacagtgaagccccgtctctactaaaaatacaaaaattagccgggcgtggtggcgggtgcctgtagtcccagctactcgggaggctgaggcaggagaatggcgctaacccgggaggcggagcttgcagtgagccaagatggcaccactgcactccagcctgggctacagagtgagactccgtctcaaaaaaaaaaaaaaaaaaagaaaagaaaagaaaagaagtaaaagcatcaatttcaccacaaaaaattaatttggaggataaagtataatatgagaacccactggcatgataataatccaggaattatacagacttccccctgttaaaagcaatgctaagctagatcatgtgtaccaatttacaaaggtaaaatcttgctctctgagggcagctgtcttctaagacaaaaagggtggaactattcggagcatgtctaattgattttttccaaatttattaatcagagtgaatcactccatcttctctggtagatagtgaatagaagagcagagagaggcaaggagtgtagcacacggaagaccacattcacctggaaagaaatatcaggactgaggacaagaattcctctccacaccttctccccaccccatcaccctgccaaattccagtacaaaatagtttcactagctggtctatcatagctttggaaaatccaatagtagagattcagttatttgaatagagtttcttttttaataacaaatgaccccaggaggcaaaataccgataaatcctataacctttagtatgttatcagaaacgaaagtagccttgagaaaaggagagatcagactggaaaaaggaaaacggactcagaaacttagttatctcagctatgaaaattaggtagttgaactccttgaaatacagggctccatccaatactatgtaccaattgtgggataactagaagtaaatacagagttaaaactgtagtctcagttgttgtcggtaataacagcagagattgcaacctaaagggaatgtgcagcacgatcagatgcacacaatctattttccacttctctagtgtgtctcagcttgttaaggttaaatacagaattttttttctattttgctttatctgtcagtataagataattaaaaagaagtgaacttccttcatccatttatcttggatggcatgcacactttattctgttatcaccaaaaacataaaacctagagaaaatgcaaattaaaatttttataaatgtacataccacatagttttatagacatctatgttccactcttaagccagggtcaaagtagaattctctttggtctctcttcccttagaggaacagaaaataaaagaccgagaaaacagactgtgatggaggattcattataagccaaaacctgaatcaccataattacacacagttcataagtgcaaatcgtacccatctcttggcagattaaaaagccaagtgatgagtaatattgctgagctaaacatgcctgtttcataagccactcaaatcaacactcctgttatcccttgacacacaggcaaaaattctatctgtaagcctaataaaatctcatttgttttacctgaaggtcctatgaaccacctggtgcctctctttgcacttgtttttctctattaacttatgctttgtagaaattaaggctttaatctgataattctttccactagcttttaattattaggttaatgtgtgaatttgaagcaagcagtccaatatgaaactattaagaaaaaagttgaaaatgctgaatgatattagaaattctagacggtaaaatttagacaataattagtcttctgatttttcctaatgacagtttgtaggaaatacaggttgagcatctctaatccaaaagttcaaaactggaaatgctccaaaatctaaactttttgattgctgacatgatgccacaagtggaaaattccacacttgatttcatatgacaaatctcagtcaaaacacagacagaactttgtttcaggtacaaagttacgtaaaatattatataaaattatcttcagttttgtgtatacagtgtatattaaacataaatgaattttgtgtttagacttgtgtcccatccttaagatgtctcattatgcatatgcaaataaatattcccaaatctgaaaaaaaaaaaatctgaaatctgaaacacttttggttccaagcattttgcatatgcgatagtcaatctatactgtacaatgctaggttatattcacaaaagagttgttcacaacagtctcaacttttgattagaaagttgttattgcggtagctaaatctataaactttttagcacatcaatatggtaactgctacacataaatataaaatttatttttagctttaagtttaatgacttctctttaaaaaaaaagctaatagtcaaatacaatgtatgttttcaaatttaaaatatttttgcttaagagtaagatttaagcttagtgacgagaaaaaacctgagacgtttcttgagatataaatattgtagcctttaattattaagtgttttcagaagcaaaaattagcagccaactatttgctaataaagaattaagtaacttgtactttaaataccttattggtaaacttacatcctttttcttgaagaaatcaaccatactaagaaaaaaactcacagaaagttttgtaagtcaagtaaaggtttggtcttaacacaggctcagttatgatgcctccactgaaatttgttcaagtgtggcagaatatgacaaaaatattcccagtttctgtcgatgtatgagcagagaaagaaaaatgtctattgtttgtcaagtcactaaaatttcatgctccctattttgttctttttattttttcattctatgttgctctgtctcatctgagattagtgcccttataaaaagagatatgagagggcttgcttcttttggctttcctccatgtgggaatataagggaaaagcagccatctgcaaaccaggaagccagccttcaccagacactagatctactgacaccttcatcttggacttcccagcctccagaactgtgtggtcacataagctacccaatgtatggtgtatctgttttagctgctcaatctaacacacatggaggaaagcggacaggacacaagccctctcatatctctttttataagggcatgaatctcattcctagggttccaccctcatgtcctaattacctcccaaaggctccacctataaataccatcattttaatgattaaacttcaacatactaacttgatttgggggtaagggtatgcagatattcaatccatagcatcctgcgacctcctcttc

SEQ ID NO: 1883600 - DNA, 4001 bp, Homo sapiens
gtaattctcattttcatcatgaattttattttcctttgtcaaagatgtaataatactgaataaactttaaatgatttaaagccccataataatttcactggtcatatctcattaattacttaacgttgtaatgatggcctacctcataaatagaaatacaaagataggccacaatgatagaatatagcccttgctttttcctgagatacattggaagagatcacaatattgaagatatttcaatacttaacatgcaaagaaaagaaaaacttgcaaaaattaaattcagtcctttttacatgattaaaataatgataattttgcaaagcattgtagaatatttttctctcaggtctacttttttctggcatgtctttcaattgtgctaaaagcaaatacagtacatcctatgttttattatgtagggtatcatattgtctctttcttagcattgctgtaaatacatgaggagaaggaaaataaaagtagcaaatagtgtgtatgtgtttgagtgtgtgtgtgtttaccacaaagttaatataagtttaagtactgtaactactacagaactctaattctcaaactggattttatatcagattagtcttagaagttgtcaagatgtaggttttgtggccctacttttttcctaccaaatcataacatcagtgttggggtacccataaacctacatttgtaatactctccatggtgattctgatgcacagctggatttgaggaccactgataagatattcatatctaatattaaatatgtgtacatatttgctactgaaaatacatgtgatgtttctttgaaattgtaaaatatctaaaataatggttttataagtaactccctgcccaacatcaccatggtaaatgctacgaagtattaaatacctagcatagtgcctcttaacagcttactgtgttggcttggggtcatgggtgatagttagcaagaagattatcaaatgtgaactggattaacaaatgcaaacttgatgaactcttctgtactgaaggaaaaggggcacagtgacttcaggggtaaagagtatatgtcatcagctcagcagtagcctaaagagccccttcagtgttttccacgtcccttcatgtaattatggtaattatcattgattatactcaaagttttttgtaggtagtcttttaaacgtttgcatagattatttaacataattctcaccaaaaatattatatgttattaaatccatgttacaatctagaaaactgagggtttcacagagacctatattttttaactactaagataatacagtaacaacaatatacagttactacagataatacacttactacaaaaatacagtaactctacaggtaacaatgataacaaaaggttgtcttcaaaaatatagataacacaactaacagcaaaatagcagacttactttcctcattgccagagtacaaggactccttcccccatacttcttcccatggctctgaagtgcttggttcaatgaaggttagcctactttagtttgggaccacatcaatcaggtactgcagggccagcaggcagtagagaccttctattaagttttcttatgagtcactagtgaagcataggaattccctgcctctggcactctataggaaaaaaaaaaaaaaggaataaaagaaaacaggcaatttgcccctgtcacatagattaatcaagaaagccataacctttgtatctttagtttgtccctgttaaggggaaaggggcattatgatagatacagacaggaatcacttcaatcatctttaagtgtcttaggacataaggcaaggggcttaacgctttcatttaaaacatgtattctttttctcttgaagtttctgtaattattacctgtgctccttctatcatgctgtattgtgaaaacttcagagaaaagaagcaagttctgtagatcaaagaaaaaattgactggaagaaaaaaggattgtctttctactaaacacacacacatattctgtcgttatggcaacataagatctaagaatggcacaccaaataatatggtaccaaggcatattattatattatcatcaagtgtcacaataaatgtgcttcagctcctcaatataacatacagtattgttttctgttcttctcagtactttcacttgaggtcaaagcaacttttttgaatgaagaccaaatatcaaccatcgcccttcttagtggatctttcttgcacgaagacatcccactaatttcacttaaaatatatgcagtagattgaaaattgggctatttcttctgtttcctaaaggaacaactgtttatccttcaaaacccattacactatatctatatagcaatatgcttagctgaggaattcgtttgtgtgtgtgtgtgtgtattttatatatatatgtgtgtgtgtttgtgtatgtataaataactttgacaaaaaattggctataaatatgtagacaaagtaaatcatactgatttagatgaaacagattggtttagtttatcttcccacatgcttttaatctttaaaaatatatttatgtaagacagcagtggtggaaattttaccactttttggatggtgctgcaaatttgtacagttgctttattcttcatattttctctgatatcctgatatgcatatgtatgttaaagttcctttatggtattgactcacaactataccatgtgactttgccaatggaaagacaaaaaaaaaggggaagaatgggttgcaagtcagcagcaatgttctggagagattgcaataacagtgaaaaggcgagatatctaggaggttttagaaatgatgggaaaagatcacacattttaaacaatcatgaagtactgagaactaacatgaggaggggctgaaattggctttagggactgtttcatctttcacataggagaagaagaggaataaaaaggaaaggctagattaaagtagaatgtgaggtttcaaagatgtgtccttgggtgtatgtcacccccatgccctactgcccttccaaccctgatatttcactctaattctgcacctagatgtttttatttttaaaccaagaatttgtcaccaaaatatagaaaaatgcagatgacctccaacttactattatttggctcacaatttttttactgcaatagtgtggaagcaatacccattcattagaagccacacttggagtacccatacaaccattctgcttttcactttcagctcaccgtccaataaattacaagagatattcaacactgtattgtaaaataggctctgtgttagattattttgcccaactgtgggctacagtaactgttctgatcacttttaaggtaggctaggctaagctatgatgttcaataggttaggggcattacacgcatttttaacttagggtcttttcaagttatgatgtgtttatcaggatgcaccctcatcataagtgaaggagcttctgtagatttctgaattgtaccagtccatttccagactcttctacatttatcgctaggagctcatttcaacagaaaaataaatccttaaaattgccattcagttagtgtcagctaattctgctactctggtccctgtttatttgaaaaatgtgctatcccacaacacagtatatttgtgactgaactaaattaagggtgataatactgaacctactaatttaaaatatattctggggctcttagcttagtcaaacatatttaatgtttctcttctcagtattattctctccaactacccatttcaagaaataatttaacactgagtggaaagctgtacactgataaaagaggtctattgtccccaaagcatttactatcagtttactcagactatcttaaaatgccaaagaaaatcaaataccaacccagtaatttagccatgtgctaaatgtattttctgatgagattgctgcatattactgaagtccaaattagaaagtcggtgaaaattgattgggaaatc

SEQ ID NO: 1883601 - DNA, 4001 bp, Homo sapiens
atttcttaactgtttcttttgatccctaaattgattttaaattagattatcaatttctgtcagagaataaactcttttatgattctaactaggtgtgaaataaaataaaaattaacaattattgatatcactttattgatttatcatttaaagcacttgtttattgagcaatagttattttttctatattagtgacatttgttctttcccatataatatttacaacacatcttttttgtattgacttgttcctatgagagattgattattaaataataagctagcctagaattcatggaataattcccacttattctatttattgtgactaaattcaacttgctaatgttttattcatgagtttttgcatccatgcttacgggtatatttttctttaattttcttttctgtgtaatggcctcaggcttactaccagagttatactagcctgaaaactgtgaaagagtttaagtttggtattactttttctttaaatgtttgtagttttcttgtgggaattttttaatcaatattttttagagacagggtttctctttgttgtccaggctgtagcatggtggcctcctaagtatctataggtgtgtgccaccatgccttgctaatttctttttttctagagatggggtctccctatgttgccaaggctggtttgaactgtctggcgtaaagcagtcctcccattttgacttccaaaaatgctgggattgcacgtgtgagccacctaatttgaccaggagagtatttagttaaaaagtcaacaactataagattactcatattttaaaatttcttctaacactagttttggtaagatgtttctttaaaaaataatatctattttttcgagttttaatatgtattcacaaatttttttataatatcctattatcttttataatgtgagaaaggattgaaattatattatctttttcattattggtattaggatttgtattttcacattttcaaatccatcaggctgaagctttgtcaattttattacttttttaaaaaacaacttgggctttcatttttctgttttccaatttattttattttggcatatgtatttatattttctgttattttttttttactgtttttaatcttattgaaatgggactttaaataattggtttgttttcttttctagtatatgtaattaaaattataaatttcctgcaaggcaaaaatttagctgcttcccacaaattttgtattcatttattttctaagattttaaaatttattttgtatattttaaaaaattttaatgtgttgactgtctaaagtttatttttaatattaaaatatgatatttccaattaaatttctactattggcttacttttttttctttcatttggtatcacctcaatcaaatattaagtactgagataatctgaggttagactgaaacttctgaaagtgcttgcctactactgtagctgttactttcttgtcttcaattttatgaatataccataatttatttgatcattctactgatgatgggtatatgtgtagtttccaggttcatgctattttgtttttgtttgttttaactgaaagataaaattttgcttagagtataaaacaggatgttttaaagtatatgtatattgtaaaatggttaaatttagtaattaaaaatgcattaccccacatggttattatttgtgtgctgagaacagttaacatctactctcaaaagataaaaagtagaaatactatataatccagcaatcccactactgggtatacagacaaaataaaatcagtatctggcctggcacccctgggggctcatgcctgtaatctcagcactttgggaggccaaagtgggtggataacttgaggtcaggagttcgagaccagcctggccaacgtggtgaaacctctccactaaaaatacaaaagttagctgggtgttgtggcacacgcttgtagtcccagctacttgggaggctgaggcaggagagtcgcttgaaccgggaggcggaaattgcagttgcagtgagccgagatcacgccacagctgcactccagtctgggcaacagagcgagactctgtttcaaaaaagaggtatctgaatgcccatgttcattccaacactattcacagcagccaaaatatgaaattaatctaagtgtccatcaacaaaagaatgaattaaaaatgcagtatacatacacaataaaatcttattacaccatagggggaaaaaaaagaagaataaattgtgtcgtttgagacaatgtgaatgaacttggtgggcattaggttaagtaaaattagccaggcacagaaacacaaatattggatgatctcatttacatgtggcatccagagaagttgatctcatagaagtacaaagtaaaacagtgggtaccagaggctagagtgattggaggaaaaggtttggaaaaaatgttgatcaaaggatacatcattattagttaaatgggaggaataagttcaagagctttattgtataacatggtccctatagttaatgacgatgtattatatttttgaaaaacatcgagtcaattttggctgtgtatgagcttccctgtgccctccacccaagactatctgttcgcatgtattattaggatctctgtgcgcgtgcacgtgtgtgtgtgtgtctgtgtgtatgtgtttgtgtattaggacctttgtgtgtgtcctttcttatggtacttcctatgacttttttttttgtatttcacattttctattactatagcatagtcataaatatttgggggatacatgtgatacacatatgcaatgtatattgatcatatcagggtcattgggatattacctcaaacatttatcatttgtgatggaaaatttacaattcttccattattgttattttgaaatacataataaattattggtaactatgatttccttaccatactgtagaatattagaacttgttctttctaactgtatttaccaattaaacaacttctcttcatatccctcccccacctcttttccttaacagcttctgataccaccaatgtactctcaacctccataagatttacttttttacctcctagatatgagtgagaatatgcaatatttaggtttctgtgcctggcttattttgcttaacataatgacctccagttccactcatgtttctgtaaatgacaggatttcaatatttcttatggctgaataatattccactgtgcatatatgccacattttctttatccatttgtctactgatgggcacttagattgatttcctattttggctactgtgctgcaataaacctaagagtgcacatatctcttcaatatgatttttttaaattattgaaaatggaattgctttcttgattgttttcagatagatcactgttagcatatagaaatgctactttttatattgattgggtcttttgtagtttcatataaattttaaaattgctctttatttccctgaagaatgttattggtattttaatatagattgtattgaatttgtagataattttgggtagtaaattttaacaatattaattcttccacttcaggagaatgggatagattttcattttttgtgccctcttaaatttccttcatcaatgttttataattttttaaaattgtataaattgcaaaaatctttcacttctttggttgaactgattcttaggtttttttgtagctattgtaaacatgatatctttcttgatttttttttcagatagataactgttagcatatagaaatgctacattttatattcattttgtatccttcaacattgctaaatttatcagttctaagagtattttggtggagtctttacgttttgccaaatataagatcatatcctattcaaagaaggataattgaacctcctgctttctaatttggatgccttttatttctttttcttccctaattgctctggccaggacttcgttgttgaataacaatg

SEQ ID NO: 1883602 - DNA, 4001 bp, Homo sapiens
ttgcacacatatgtttatagcagcacaattctcagttgtaaaaatgtggaaccaacccatatgcccatcaatcaatgagtggataaagaaactgcagtatacatatacgatggaatactactcagccataaacaggaatgaattaatggcattcacagcaacctggatgagatcggagaccattattctaagtgaaataactcaggaatggaaaagcaaacattgtatgttctcaatcatatgtgggagctaagctatgaggatacagagacataagaatgacacagtggactttggggactcagggagaaagggtgggaagggagtgatggataaaagactacaatttgggtgcagtgtatactgctcgggtgatgtgtgcaccaaaatctcacaaatcaccactaaagatcttactcatgtggctgggcgcagtggctcatgcctgtaatcccaacactttgggagaccgaggcaggtggatcacgaggtcaggagatcgagaccatcctggctaacatgatgaaacccatctctactagaaatacaaaaaattagctgggtgtggtggtgggcccctgtagtcccagctactcaggaggctgaggcaggagaatggcatgaacccgggacgcggagctggcagtgagccgagatcgcgccactgcactccagcctgggcgacagagcaagactccgtctcaaaaaagaaaaaaagaaagatcttactcatgtaacaaaacaccacctgctccccaataacctatggaaataaaataatttttttaaaaaaaagaatctaggctgggcatggtggctcacgtctgtaatcccagcactttgggaggccaaggcgggtggattacctgaggtcaggagtttgagaccagcctggccaacatgatgaaaccctgtctctactaaaaatacaaaaattagccaggcgtggtggcacacacctgtagtcccagctactcaggaggctgaggcaggagaatggcatgaacccgggaggcagaagttgcaatgagccgagatcgtgccactgcactccagcctggccgacagagtgagactgtgtcaaaaaaaaaaaaaaaaaaagaaagaaagaaaagaaaaagaaactaatagggaaaaacagctagtatcactcttacatgagatctttaggcattatacagtaagactgtctcaatctcagtaagaactaagtaaataaataaaataacagacttttgtgcatccaaaactttcaggcaaagattgtaagttctctagcatcattatatgcccaggttatatttctcaagccttacttgttccttccacacattaacatttcagaattatatttcatttataacaggtattctctaggctcactaacctgacagggttaatatcaaaaaataaaaacaaaaataatggcatttaaataaaaatagcctctggcttgagcccatcctagcaaccacagtgaaattccagcttcccccaaatcttctcagagttcttggatggcctgagaatgatccccacagcctctagacgctacctgcaatgttctttgcaaggagctcccctcttcccttcaattggttccacctctgtctacaaagctgctttcctttctctcttatggctcactttactgatactgaactccttgcttcccaatattgagatctgctgtgtcctggggctggggctgtacctctcccgtatcactcccctgctcttgtcaccatcagcgcttctgtcctgagctacaagccctcagctaagccacagcatgcaagtgcatgtttcagtctacaggcagagctggaggccgcttgctccaaaagagaacatccactttactttcttaccttgctgcatccacaagagggagcctcgtgccagcttctccagccaggatggtagcccccaagactcttcctcttccatccacctttaggtgcagcatccaacaaggtcaaaatcacaatgtcttgcatctaacaaaaaattaccaggcataaaaaaaaaaaaaaaaaaaaaacaggaaaatatgacccttaatataaaggaaaaaaacatgaaaaacaacccagaaatgacacagactatagaattagtggaaatagttattataattgtatcctatatgatatatagtgtatatatatatgtaattgatatataattgtatcaaaaatttagaagactgaacgtgttggtagatctatagaagatgttttttaaatacccaaattgaacttctgaaattaaaactataatgtctaacatgaaaacacattggatgagattaacagcagattagacactaagaagaaaagatttgtgaacttaaagacagcaataaaagccatccaaattgaaatacaaagagaaaaaaaaaaatgaaaagaaacgagaagagcatcagggcattgtgggacaacttcaatcagtctaaaaaatgaaaagatgcttccaaatgtaaaaaagaatcctttaaattgtcaaagagcccatcagaatttttaacagctctattagaaaaaaaattcattttgctgcttaagttccagcaggccaatctttgtgatgaatcccttgggatgttgccaatccagacaggcagctcttaaggtgacataccagtcatccagggacttaccatcatgtcagtcattttgttactgtttttaataatgtaaaatacttgaccaatgaggattccttccagaaatgcaaaagttatccaacaataggaatcctatctacacaaatcattacatttataaagaagaaagcccacatgattttatgaattaatgtataaaggtgtttctctaatatttaacagcattctaataaaaagtttaactaacataggaatagacagaagctacctaaacaagacgaaaactgtttaccaaaacagaattctatttttaatcatgatggaataatagagactagaagtaccttccctccttgcacaactaaaagctggacaaaatatatcaagtgaaagttttcagacattggacaacaggcagtgcaagactgtgatccctgagagaaagacaagtgagatgagcctgcaagtacccccagctcactgcctggagaatttccaggctgatcacagaaaaaagaaaccaaaacaggagtccaacagtctcactgattaaggagacaaagttcagagttccagcagggcaaaatgagaaaaatctgtgaggcaaagtatcagagaaaaagtactgcagagagtgagggttccagagatcttcagagcagtccctcaagacttgggctgagtactgctatgtgcttgtgtaaggagactactgaggctggggaaagaacagcagagaagagtaggcagaacaatttcaggagttcacacaggaccagaaatagtgttttccctagccggtttgggaagatctcctaatacggtggggcattgggtacagttctcaaaagcaaattgcctcagtggggccaaattagccctcagtgtaaaagtaaagtacctaaagggatgtttagaaatccagcacccaataacataatgtgtacaatgtctggcattcaataaaatattacctagtatgcaaataagcaggaacataagacccagtaccagaaaaaaaaaaatcattctataaacatagacctatatatgactcagatgttagaatttgtaggcaaggacatcaaaacaagaattataaattcactccatatgttcaagaagtacaagaaagcatgagtatagtcgggagaaaaatgaaatgcctaactaaacttctagaaatgaaaaatacaataactaagctgaaaaatacattggcaggattaacagcagattaaatgctacaggagaaaagatttgtgaatttgaagatatagcaataggaactatgcaaattaaacattgagagaaaatataagccagaagaaaactaaacaaagcatcaataagttgtgggacaatatca

SEQ ID NO: 1883603 - DNA, 4001 bp, Homo sapiens
ttccaaacctagagaaagacatccatatccaactacaaaaatgttatagaacattaagcagatttaacccaaaaaacactacttcgaagcattcaatagtcttccaaaagtcaaagataaaagttcttaagcaagaaagagaaaagaaacaaataacctactggggagctccaacatgtctggcagcagactttacagtggaaactctactggccgggagagagaagcaataaatatttaaagtactaaaggaaagaaacttttaccttagaatagaatatacagtgaaaatgttcttcaaaaaaaaagaatactgactttttcagacaaacaaaagctgaagtattttatgaataccatacctgtcctaaaggaatgctaaagggagtacttcaatcaggaagaaaaggacattaatgagtaataaatgatcacctaaaggtaaaaaaaaatcctcactgctaataggatacaaaacaaaacagaatattataacactatagctgtgtggtgtgcaaactactcttatttaaagtaggaatactaagtaatatccaatcaaaagtaatagctacaacaacatttcaagacatagcacaataaaatataaatagaaacaacaaaaagttaaaaagttaagggatgagcacgacccgtcctgagccggcagatgtggtggaagccccggagctccggagctcccggaaggactggagcgtgggcggaaaggaggccgcccctagagccggaagcctgcgcaggggacagaggcctccggcggcgccccccaacaacagcagggcggtgccacattggtcctgagccaggcctggccgccggagacggcgggactctctgggaggccggcggtcctcgggtgtagagggagacagctgcccgggggcacgggcgagcgcctctgggggtcctggatccgagacccgcggccccggggtggcgatgacgcctggagtcatgcgggcttggctgggccgggctcttggggcagccaggcgccgctgctggcgtctaggccacaccaccctgaacgcgcccggctcgcctctgatctgttgaagctaagcagggtcgggactggttagtacttggatgggattccgcctggtaatagcggtaccgtaggcttttggcttcccgctccctccttctttcccccttttgtctccgtgcttcccaactgcgccccgcctctgctccccgttgaccgcccccgtgccccagccgaagcccaggacctcctcctgaagatccgccactgcagcaccgccaggcagcagcatcccacctcttccgactcgcggcagccccacccaacccgggcgggacgggaccgaccccgagggtgcaggcgcgggttccctgaggtcccgggtctcttcacgctccccggactcccaggcaattgtattcattcattcagcgtcactgcaaccgtccaagccggtgggaggggcgagcaggggcagcgggtgccacagaccccagccaagacctccgctccagaacccgagggctgctttccccagaggaaggacattttcttcgccagccacgaggaaatccgtccctgtgcaccctgtttcccaatgccaccgacttcgtgtaaactccagtccggaggacaggagagagacccaggcctcgccccgtggacaggctcggcgccacggctcctgccagacacacgagcacactctacaaatctcggggcccaccgcatcaaggagacagaaagaagcaaacaaaggaaggaccttatgaaacgcacccccaaagcaaccaaccaatccaaggaaaaaaacaagtctcagggctccattggttttcctgggtggggggccctgaccccctgttctagcccggcccaagaaccctccaccacaccccggcctgctgaaaggtgccctgtctacctgagcagagcctccctctccaaggctctgtcgctgtcgctccacaactccctcaccctctccctttctctacttccccctccacctcgcgctctactgtggtgctctctcttcccccctctctctctcctccccccttttctgtctctctctctctctctctatcgctgtctctctctctccctctggttctatttctccatccctctctcccttgctctccttctgcagcaggaggagctgcagacagaacccctcagacaccgagttgtagaaggaagggctttattcagctgggagcatccgcagactcacgtctccaaaaaccaagctctccgagtgagcaattcctgtccctcttaagggcttacaactctaagggggtccgcgtgagagggtcttgatggattgaggaagcagagggtacgtgactgggggctgcatgcacaggtaattagatcagaacaaaacaggacagggattttcacagtgcttttctatacaatgtctgtaatctatagataacataaccgagtaggtcagggatcgatctttaactaccaggcccagggtgtggcgcggggctgtctgcctgtggatttcatttctgccttttagattttacttcttctttctttggaggcagaaattgggcataagacaatatgaggggaggtctccctttgagctatctgtgtctgtgtctttgtgtgtccgtgtgtgtgtgcccgggtgtggtgtgtgtgtgtgtctgcgcgcatgcacccgtgtgtatccgtgggtgtgtcagggtgggtttgctcgtggtagtggtggggtgtgtctgggtgtccgtcagcccctctttcccgggatgaggctgccggggctctagtgccagggcggggcaaagcagagccttcttgcccctttggccatggcgggtcctcctcagaacaagcgacgatggtgtgagcattgtgagaaaaagggcctgtggggctgggccggctgttcgcccctgggcagccctggcggctctgggtgtgtggggcaagagggggccttgcaggaggggcggtgaggaatccaaaataatttttccgcggcaaggcggaggaccggaggggaccccaggaccgtgggccctgggccctgacgcctcggagcacaccccgtcctaagcgggccccaggtgttggaagctcgggagctcaagagcctggggaaggcctggagtcccagcgagagggtggccgcctggagagtccagagccctggcaggggatggaggtctctggcgcctgggctgtctcgcgcatggtctggccgccggcgacatcgggacgctctgggaggtcggcggaaagcgcagcgcggcgatggtggtgcttgggcgtagagggggagagcagcccggccacaggcaagcggctccggggtgcctgatcccagcctcgcggcccccgggttggtggtgacgcctggaatcaggcaggcgtagctggactgggctcttgggccagccaggcgccactgccattgtccacggccataccacctggaaaatgagagagacccaagccgcggcccgtgggcacgctcagcgccactgctcctgccacagtgaggggcgcactctacaactttcagggcccacagcaccaagaggacagggaggagccaacaaaggaatgacgctacgaaaagcacccccaaagcaaccaacaaatccaagtaaaaacacgtctcagggctccgttggttttcccgcgtgggcggccctgcccccatgttccagcccagcccaggcaccctccaccctaccctggccaaaggggcccctgtctaccagatagagcctccctctccaaggctctgttgctctccctctctagctccctcaccctttccctttctctacttccctctccaccttgctctctctctctctctctctctcaatctccccagttcctctctgtctctctctccatcgctgtttctctccttccgtttctatttctcatccctctgtcccttgctctccttcaagttgtctgtgtctttgtgtgtctgtgtgtgtgc

SEQ ID NO: 1883604 - DNA, 4001 bp, Homo sapiens
aggaacaggagctgctctttgcttctcttaaggaacatatggtcactcttatttctcttgctgatgtattcattattccttcattaagtatacatactgagtctctactatggtggtagggcctggatatacaggggtagaaaagatattaaatgagaagacaggcattaaagaaataagcacacacataaaattataaattgctataaatgcttggaataaaatgtgcaaatttgaagagggaatgtatatggggacttaattacaattaagaggttagggaataaaccattatcaaagtgacatttaagtataaacctaaaaagatgagtaggagatggccagattgacaatggggtaggatgtttgattgcttataaaggatttgagccagaaagaattgaaccattttctatgcatacaggaacacaaggcttgttatttaaatagcttattattttaatatagggcaaacatatttgtggtgaatgggggacattctgtcagaattagtggaaacagttgtggaaatatgtgaaatatctatagtgtgattacattcaggttggttctttacttcatatttgcttcatgtagtaattgaagatatcaattgtaaattttttatcagcccaatgtttcccaacacttattcataatgtaatttacaagtgcatgaaaataacttgccttgcattttaagttggccagtctcccttcttcttgtgggaggtttattacactaactagcagatctggctctcctttgtttccgcttaaatggttacaagggcaaacttgagccaggcatataaacagtgtccaacctacaagtgattcttccttcaaaccaagtcattgagaccacagcacaccacctgacatcatctggcgtggctgtgtacactgatacatacctgtcagaggtcagacatacagtcctgttctttttgatccttcatatgtaccaggctaattatgaattagtattttggcctctctcagtctgaatgttgctggtagcttttttctctcccaggtcctgacttcacagataacaatccacaattaaactcatttatttaataaagcttcagtgacagtaaagcttcctatgttgatgtttacttatagatttgggtaataaaccaacagatggtagatacaaaaaactgagtcacaacaagcatatcctaatagtctgctaaagtaaaagattgaatataaaataataactattctatccaagctatctaagcctagataatgaaatatttaaaaaccttgcctagaaagcaaatattccctttagaattttttgaaaaatacctagaaaagttatttgagggcagtttacttgcattcctcaaattgtacaattggcaatttaaacgaaaactttctactgacctttgaagtctcttgaagttttttttgcttgtttattttgttttgtttttaatttaagaaagaagaggcatccagctctgcctttttccctcattaagacataccaacagaaataactggctgcatttggtcttagccaatatcatatgattatttttagggatttttttggcccccacacagtgcatggttgaactgccaaaatataaatcaagatatgaaacttactacattcttcagaattaataaatattttccctggttaaagcaagactcccataagcaaatcatccaaaataaactagattaattaggtccagaatggataagatagaatattcacaaaggataacactgtatacaattataaatattcattcctttgtgttgctaattttagattaggtcagcctgtggatgtattagtctgttctcacactgatataaagaactacctgagactgggtaatttgtgaagaaaaggggtttgactcacagttccacaggctgtacaggaggcatggctggggaagcctcaggaaacttacaatcatggcagaagggtgaaggggaagcacgcatatcttcacatggtggccggagagagagagagagtgaagggaggaagtgccacacacttttaaaccattggatctcatgagaactcactcactatcacgagaacagtaggagggaaatccacctccatgatccaatcacttcccaccaggtccctcctccaacatgtggggattgcatttcgacatgagatttcggtggggacacagagtcaaaccatatcagtggacatgtaatgaaaatgaaagagcctagcacactttaaaaatgctcttcatatctcggtgcactgactaagatggcagggcaggcttcaaatgcctgctctatcggtcactactgtgcagctaggcatccactaaactctttgtgcctcagtgccctaacctataaaataggcatcattccagcttgtacacaccataaggttttgatgaggatgggatgagatcaggtttctaaggtacttggtgtgtaaataagctcttaattgaaaatcatatagtattattaatggccagtgattttgtttcattgcttaactctgccaggatgtaactgtggggcagtgattctcactcccccaacctcaggagacatttggcaatgtccagagacatttttggttgtgggggggctactggtatctactgagtagaattcagagatgctgctaataccccacaatgcacaggcagcccccacagcaagactcagacagccccaaatgcaatagtgccaggttgagaaaccctgctctagtgggcctcctttttactgagtgtatgttatacaagagtgtgactttgtgttttgtgctctctagtttactttctgctcctctccccaatgctcccagactgtgaactccttgggggcaagttctgagtcatcgttactgtggccatgcctgcaatgtccagcccaagtcctggcctagacgaggcctcagtaaatgcttgctgaagggtattttaaaactgcttttcagaaactctattgtaaaacactaaatctaccaatggggactatgcatcgattattacagttctgaaactatggtagtttcagtacatttgttctgacaaggtacgagaaagtttatggcacggtcatcacagcacatgttttggagttggaaagacctcagtttgaattctaccctcaatttaccacttagccttttgtaagttataaaaatgttgacaataatgcatttattccagggatgctgtgagagactttataagatggtcagtgtgaagagcctagctcagaaaatagttcctagcagctaggatgtgctatgacttcaggcaagttctcaacccctacctccccagccacagccttctctgtaaaggggagataataacttccttgtatgatgctaaaaggattgaatcaggccatgatgtgcttagcagagtttaataaatggtgactattattattataatcttttcatttcagtggcaaaaaaactgaaaaaaaataaatagttctctgtcttgtgtttttcacttatcccatctcttttattaatactccccaagagcagcaggaaggaaacaaaacaaaacaagagaggccaagaaatgcattttaaaatatttttctcatattccaaaatagtgccatgaatttaaagctttcttcaaaagaagcattggactcccttgttcttgtagcttcactggctggaagaggcattgatagccattacttgtgtttctgggtcacccttcaaagtattaaattatttcacaaagatttgtttcttttcatgtgacaagaaaaaataaattgtgatgattactgtcacctcctgccccttctttttttattaaaaaaaaatcacaggtgaagctgccaaaatattgaaaagttgtatatatcaaacatgtaccagtgcaagggagaggaaacaggaaatagtatgggggctttggagcctgtacttccatatatatatatatatgaatacaggccgggtgcggtggctcacgcct

SEQ ID NO: 1883605 - DNA, 4001 bp, Homo sapiens
tgtaccactgcactctagcctgggtgccagagcaaggcgccatctcaaaacaaacaaacaaacaaacaaaaactgaaataaataagtgtggcttaaattactataataataaaaagaagggagataaagtacaatgaaaaatagggtaatttaaaaaatcagaaatgttgaaaaacaataaaattgaaatgaatcattacaattaaaacatcttgaatgtaaagcttaaaaagcaaataaaatatgtacaaattagtgaaatcccactagagaccataaagcgtgaacatttatttttaaagtactgagaaaaagtagctgtctacttacttgtatacccagctgtactctctagctgaacggcgtaagtgaatcaataatactttcaggagactaatataatcatagattatggttcaaataatacttaaaagacatagttcaggaaaaaataatcaatgaacccacaagcaaaaatgaggatataagaagcaatgtcaaaaaaagaatttgataaatgtgttgatatattaaaatatcatggattctattggtcaataacttaaacaagtattgccatttttctggcaactaaaaacaatgtgaaactaaaattacaaacaattaaattgatgagtggacagtgatgagagtaaacttttcgaaggtcaaaggtccgaaagctttagggtatctcatgcacttattaatttttattttacaaacacttaaatagtgcttaatattttcctcaaattttattaaagatgatataataatatgtagcctgaggtcactacttttgatgtatttattttaaaggactattgcatccattttcccacaaccttttttagtgtttttggtggagatggtggtagtgtcattattttacttttttaaaattttgttttctaactcattctcccccaaaccaaacaggtgtctttttcctttcctttccttccacttccctttctccttccccttccccttcccctcccttccttcccttccttcttttcttttctttctttctttctttctttttttttttttttttaataagagaaaggctcttcctctttcacccaggctggagtgcagtggcgtgatcacagctcactacagcctcaaactcctgggtccaagagattcctccgagtagctacaggcacatgccaccaccatgcctggttaatttttaaatttttagtagaaacagggatcttgctttgtggcccagactggtcttccactcctggcctcaagcaatcctattatcttggcctcccaaagttctgggattacagaaatgagccactgtatttggtcttgcttgtctaataaactgttcttttttttttcaatatcttaaaaccagagaatcctctgttcaaacaaaatctttaacgtaagtgtaaagaaagccaaacaatataattagggctcctctttataaagagagaaagtgaatagctgtgaggcagaggagtcacagacacttatcagaaatgttacatagcacagacataaaaaagatgtttgagaggagatagaggcctcttagataggcctcgtcccaaatagaagaacacatgcaacccccaaatctttactaacccgcgggtgaggccaggcacagatgtgtttaggcaccacagccatctttccagaagactgaagtccgatactcatggcaaacacagaacatctgagtggctattgatcaatggaagtcctctggttggagaagtactttgattagaatggagcctcagagcccaaggacttctatcagcttgttcttctgttgagcccaccactcagagttgctaagccaactgtctgctatattcccagaagacagaataaataagtctacagtgccatgtagttgtatcttttcagcacatcttccttatctgtatataaagcaaatttttaaacaacttacctctacaaagtcacttttgccattcaatgtaacatagctctatactagacactatggggtgaaggtcattgtggtattacggagggtagcaaaattccatctatgacatcacacaaacatcaaccaaaagaaactttgtgtggctgtaatagtatcaggcacagtagactctgccatagagataaaggaggcatttcatactattaaaagttcagttaaatggacagtataacagtcacacctttgcttacaacgtgatggtaggcatgaatcaacagataaagagaacacattgtactcagagccttataattaaaaataaatccagttagagttattttgtaaacaaaatgtaggagggattttaggaaaaaaaattgtcttaactctagacagagaaaaagataactcatatgcaaggaaccaacagcagactatagaacaacatcaactgaaataaaaaagagtaaaatcatatcctcaaaattctataatacttatcaataaataatcaggaacccagcaaaactaattttaaaaaagaaaaaaacaaaaatactttttatgaacgaaattagagacaaccacataagtatccccactaaaggaattttaagaatatacttcagtaatatggaaaagataaaagatactaaaataaatatctgagaaataaaagttgccatgtgtacaaattttaccaaacaatgaatgtatacaagctataatgcagtcttatttatgttgctaaaatattcaaataaaaattattaaaatgctcatatatcacaaggggtataataggaggaagtattttagctcctttattctggaagaagttaaagtattaattcagtcactgtatattaatagatgcatgataaatttcaaggagagtaaattcaatcaatcagaataaaaggcaaaaaagagaaaagcatggaagttatggtgtgacatataaggggaaatacaagttaaaaatcagaaataattctccctgttgaaaacagaagagactttctacactcccatttcttacagcaagtactaggtgttgtttatatggaaaacatgtatataatgggttgtatctgtttcattatataaaagggtgaaaatcctttatatctttgcaatctattaggaaattggccaggatgcacagtatattctggattaatgcttatttaataataaaattgttttctttttttctaactttaaggtgaggttttctgggttgagaagaaattttgtgtgtgtgtgtgttttatccttttttcttttctttttaagatggagtctcgctctgtcacccaggctagagtgcagtggtgcgatcgtggctcacttcgacctccacctcccggtttcaagcgattctcctgcctcagcctcccaagtagctgggattacaggcgccagccaccgcacctggctaatttttatatttttagtagaaatggggtttcaccatcttggccaggctgatcttgaactcctgacctcatgatccacccacctatgcctcccaaaatgctgggattacaagtgtgagccactgtgcccagaaggaaattttggttttaattacatttccccaacaattctgacaaggatgtctgaaacaccctaaactaagggacagctgaaggtctgtggccacacaaaagtcagttacttttatgtggataaattaacatatttactgagattcttagacaggccatatcccaagcaaatgaattactggcatttatgcgatgaagtgaattctaaggggaaaaaaatgatatagaatcccagaagaaaagattgagaaaaaatggagaggaaattggagaactaaagacactttctcttttacagaaatctcctgctcctcttttggggtgtccctgctccctctgcttctcctgcttgtctcccctgacccctactgcctccaactctagccactgccagtgtctcaagctaactcccaggaagagggaggtgatggattgttcccctctttggtagatttctctgtaaagagaga

SEQ ID NO: 1883606 - DNA, 4001 bp, Homo sapiens
ttagtcagaagcaagtcacatgatccagtcctcactcaggggtgaggatcacacagagtgtgagtactgggaagtggagatcactgggagccattttagaggctgccaactagagcttaacataatgaaaaacaggcacattatgaagaaataaaattcttaggctgggtgtggtggctcacacctttaatctcagtgctttgggcggcaaaggtgagaggatcacatgaggccaggaatttgagaacatcctgggctacacagtgggaccctatctccacaaaaagaatttaaaaattagccaggcatggtggcacatgcctgggaggctgaggtggggggatcccttgaccccaggagtatgaggctgtagtgagctatagtgagctactatcataccaccacactccagcctgggtgacagagcaacactctgtctctataaaagaaaaaagaaaggaaataaaattctcatattgggtgccttagtttgtttttgctgcaataacaaaatgcctgactgggtaatttatagtaaatagaaatgtattgactcattgttttggaagctggaaaattcaagattgaggggctggcatctggcaaggacctttatgctacgtcatctcatggctaaggcaagaaaggcctgaatgcatcctcttacaatggcattaattccacctgtggggctgcacccctcttgacctaatcaccttttaagggcatcatctcttaatactattacaatggcaattaaatttcaacatgagttttggagggaacaaacattcaagccatagaattgagtaaaaacttcttgaggttccttataccagtgtcctccttacagaccatcatcatcctcagactcaatcaaatacagcaaaactgacttctttcttttctgttcctaatggaaaataacagtgaagtactgtttaaaataagtcactcaatgacaaaagtcaatcataaacacagagagaacatcttaatattatgactcaaaataacaatattgataaaatacttttcagaataacaacttacatcataaaatgaaatatactagctgaccaaagatctcattaaattagagaaaggcaatttaagattttaatgaattactgtttttctttatctctttaagactaaagaaaaatattgagaatacacataaatattttttaagtttaaaagaatatacacctataatgaattgaagaatgggattggagaagattggagatgacataatctgtactattataatatgtaatggtgtgtattttatcatttgaatacatttttaataaaaaggcattcaatacaaggaaatgtagctcataagcctgtttattcatatatagttatttaactatgaattcgaagagcctgtagcattccagtgtttgccatggtactaaagatgtgttaaacgctaaatgaaaccaggacatctgccccagggggcgttcatacaggaaagcgctctggtctattgtacttggctgtgtttgtaacggttgcatctctaaagcctcatagacaccaataaagtgaaagagggaggcctgggccgagggcggatccaggaggctcctgggctggagcaggcagcgcccggaggccgcaggccgtctgcccgcctcaggcccgtaggctgcgtctcccctccctgggccctgtcccctgcagggccagagaggccgcggcctctgcccagtggtactgggggaaaaaggaagccgcgaagcgggtcctggggaagagctcacctgctcctgagggaagtggcgacaagatggcgctttcaggtggagctggacgccgactcactctgctccttgggtctccgcctttctaaggccacctcctgctggcaccactccgggcctacttcccgcacagactgcgggtcaaagggagcgggatgctggccggcggcacctggctttttggaaagagcaggaaggagcgtgattcccaggcagctgctcatcccaacagctttaagctttggttgtgattgtttttacacctatgacaaatgatatggccagacacaccacaatgtctgaacaaattagagaggagcaggaccctgcggacaggctgtggcccaaacagtggctgccaagcagacggagcctgcaccaatgaaaatatgaccaggcaaggaagtgagtgctccctcaggcactgaccgaactcataagtacccactccatttggccaaagaagcccccatactctctgtgaaacagatttccagaagctgttgtgccaataacgaagtctcaaaaacaaataaaaataacaaacaaaacccacacaaaaccaccaatactgaagatcattcttgagtctgatttgcaaactatgggtttgcaatgggtttgcaaactgtgtgttgcaagggtccgagtctgcagaggcattccagtgacaagataccgccttcacagccagatccgtaggtcccatccatcatgccagggaaaatgctccattcaccgcgcctcagcttctggttctggtttcagagttctctctgtattggaggggttttaaagctagaggggcctttacccacttactcctattcacggatctgaatatggaggtcaagaggggaaagtgacaagtccgaagtcagagtagatgaagaaaacagccccttcttcaaggagctccatctagcaagggagacaaactctttgcaggcaggaccaggcttccctgctgcagaaggaaacttaaaattggggtaatgagccccaccagggatgggccgccacgctgccctgagaggatcgtgtgtggacttagggctagacatggcgctactttgatccctcagctgtgctgtagggccgggtggggcctggagtgccctgagctaagggctgccaggagctcttttcactcccctaaggccctgcaaaagtaatgccactttcaatttgcacagcgaaatcagggacacacttttctaacacacgggatgcctccccttcccccagcccaacggacgatctaccctgttggtggtgggcccttgtttctgttaggcacggaactctccgcagggttccaagtggtccgttgtggcccacaggccactagcaagtggaggcagtgctgcagagcccttgggagccacggagggcctgctgcccaccacacaatgcctgttcagctgctgctggccaccctgtgggcagcagtgatagtgatgtacagaatcctgggactagcgccagcgaccctgtggataccctgggtggtccaggtatgcactgccgtggtggcctttgtggtcaggagaggacactcagtgagaataagggaggagctagcacaaagggattcagcccagggcgaggtccatgaaaagaccagagccaagatgcagccagcaccccaggctggcgctggcctcatgtcacccaggctagaagccagtcattgatcaccccaaaccctctgcttcagggttgtaaaggaaataagcaggtcttcccatcccaataagatggtcttcccatctaggagagcttctgaaaagagcatgaaaaagcaggcctcctgaactcccatgagcaactgatgcaaggcacatcctacacccttcaccacatggtggagaagatctttaggagcaaagaacaaatgatatgaatgaccacactgactgtcagcaaactgcagagctgcttaaccaagaaatagcgagactgaagcaacgcttgcagtcaaagaaggagaaggcggaaaggccagagcagggcaaggcaggaatcaaacaggccacaaatgttgcagtgaggtaactgacttccccagcccacaccccgatgagcatcctgcatctgctccagggcagtagagaccacgtggaggatgaggacttagcagtggaggggaacaggaaagcagaacatactggttccccagcgtcccagccacaagtccctctgaagagtatggatgac

SEQ ID NO: 1883607 - DNA, 4001 bp, Homo sapiens
agcctgggtgacagagtaagaccccatctcaaagagagacagagagggagagagatagagagagggacagaaagagagagagaaagaaatggcagtggaagagggtgtggggttttgttgcaaagcaaactagacagagatattcaaggggcagtcaggagtcctggtccctgatagccccacatccgtcagcagaaggggagccaggccagaggctgggacaggggccctcttgtgaggcctgaaggatcagggcaaaccttaatgttgggggatgagacaggaagacatccaggggccaaaggggctagagctcacgtgtcgaccggtcaagagtcagcaacatgccgtggcgctggctgagcccagctcatcttgtgaccacagccatggctgctgcgtgtgaacagcccacaggtgaccagcgctgcttccttcccctgcttgtccccggtgcctctgagcatgagactcgacagcattctccccaaagcaagcagcagtcagtcccgccctgggcatgcaggccttgggcctggccactcgtgtctgttctcgcagtgcaagctcccgcctcccttgggtcgcacgctgctggactgtggcgtctctggggcacaggtgtggacttcccaggcccaaaagccacagatgagcattgggttgaaagagcgagtccctgagacctggggaggggaccgaggccatggaggaggtgggaatgcaggtgaggcagtggggagaggtcctcaggccccggggggaggagagtgtggccagaggccgagcggctctcagagaagggagggaggctctgtggagcaggaatcctggacacagctgtgggggcccaggtgccggggggcctggtccaccagcctgagcaccaggagctcctgtgtccaggccacatcagcccaaccagaggcccaaaagtctcaagaagtcaaggccgtggcgacccctggggatgttaggaccagacgtctgggcacttgccgcccttaagtcttttctctaataatgccacaaacttgtaaaagtcatttaatcttgacaagaacttgtggggttttgtttggctgttcggttgtttttgagactgagtcttgctttttttgactagactggaggcctccgcctcccgggttccagtgattctcctgcctcagcctcccgggtagctgggattacaggcatgtgccaccacgcccagctaatttttgtatttttagtagagacggggtttcaccatgttggccaggctggtcttgaactcctgacctcaggtgatccacctgcctcggcctcccaaagtgctgggattacaggcgtgaaacactgtgcccggccaagaatggattttatatgacccccgatgtgttgcccttgcaaaatgaaaactcagaaaagggggattccccacagcttctaccaaacctgagctccccagggggagacgctgtctctgggagatgaaggtactcaacaaaaacctccccaaaccctggccctgggagaggctgggtgagctggggtgggatcttcacctcaccaagatgcccgttggcctctgagcagtcaccccgcagtggagacaccagttctgcctacaggagtgagtttgcccaggcactgcttggcacccccttctctacccaggggacgccaccaaaggcacaagggggacccttcagctgacgatgtcccccggggtttgggtcactgctgtgcgacgggtgtgaggctgggcatccggtccagggtctggagaccgtggcccgggaagtggctcttgtgtgtgcccacctcaccctcccgaagctctcaccttctcagcggggacaggaaccatctgggtcccctgggctcacagcatggaaagcaggctcagcccaagggtccgcattagtggctgcatcgtggctgtggccctgtgtcagctccgggcttgcactgccaggctggctgtagcgactctggctctctctggttgtccatttattccctgactctgggctgactgggaactgggtgagtttccaactcacttgtttttcacaatggccgcggaccatcccagcaggggtggggccatgctggaaaaacactgaccattccgtaaagcatcctgtttgtccatcttggaccctgttttcctaaagcttcacctcaagagagaatgtcaccaaagcaggacgagtgaaaaggtttcttagaacaacaacaaatacatggtctgctgactcctcctcagcccctcgtgtctggctgtgctgctggctgcaaatctatccccgtcactggcacgtggttccatgaggatgtgagcagtgacagctccaccactgcacccaggacccgctgaaccctgagcagagtgcgtcacagccacgtcagccctgaacccacaaccagcagaggcagtgtctgcctgccccttcctgaccggcttctcagccccaggccccgaggccccgtgtccgcctgccccttcctgaccggcttctcagccccaggccccaaggccacgtctgtgcttcccagggaaggcttttcttggattctgctttcctctctcaccttcctcccccgattctgactatctccctttcccgccctccatctctctccatgccaaaatggctcctgtttttgttcctcttctgggggatctcagcctctcctggtgtcttgggcaccctttcttgacttccaaagcttcatcctggatgtgcatctcctaaattctaggttcttgtatgtagctgccaaatggacacctccctcctgatgccccacagctctgaccttcaggacacctctgaacaaggccacacctctacaaatacccctgggtgtcaccaacaatatttccatcttcctccagttggcctttccattttgcctgtaacttatgactcatctttcagacctaagtcctcctgtccaatctccctgccatttctctattccccaacttcattagtgttttaaaaataggtacactgcggccgggagtggtggctcacgcctgtaatgccagcactctgggaggccaaggtgggtggatcacgaggtcaggagattgagaccatcctggctaacatggtgaaaccccgtctctactaaaaatacaaaaaagtagccatgggtggtggtgggcacctgtagtcccaggtacttggtaggctgtggcaggagaatggcgtgaggccaggaggcggagcttgcagtgagccgagatggcaccactgcactccagcctggacgacagagcgagactccatctcaaaaaaaaaaaaaaaagaaaaagaaaaagaaaaagaaaaagaaaaagaaaaaaaaaggtacattgcttgatgcacctcctagtgggctccccttcagccccatctgttgaactcttacagattctggatatgcagtggatggatgggtggttaaatgggtaaatggattgataattggatgggatggatgaatgggtagatgcatgaatgattggatggaatgaataaatggatgaatggatggatgggtagatgtatggatgatcagataaaataaacggatggatggatggatggatggatggatgggtgggtggatggatggatggatggatggatgggtggatgggtgggtggatggatggatgggtagatgaatggatgggtagccagatgattagatggaatgaatgaatgagtggatggatggatggatgggtcaatggacagatgactgtgtggaattgaggcaggaaagtaataaaaggaattggaagttggataaaaggcagaatgagtaaaagcagagagcagaagctaggcaaagggatgggtgagcaagaagcaagacaggagacagaaactgagcagccaaacaaaagtaagataaaaaagcaagtaaagaaactctatggctagcaagatctggaccaaaccagtaaggggcagctcctcaaagataggcatgcacagtagagagaaaaagta

SEQ ID NO: 1883608 - DNA, 4001 bp, Homo sapiens
actcaccctgacacgtaggtacacacttgtcagaggcgttcgaaccagagcgactccattttgagtgagggctggaaaacgaggctgggacccgctgggctgcattaccagaaaggtgggtattccgagcccctagaggtttatggttaagggaacaaattaataatgtttactaaaacagacccggacttaggagtgtccagatatcgccatatctgaagaacaaaggcattcctaattttgctttaaagataataatatcgattcttgcaaaatatagtaattaagaaaattaatcctttatcacaaacccttgtagcagagcaaatctccccatatatacaagcattgtacctagggtggatgcgttcctcgctcctcctcttactttcaggaacatcctactctgtctacggagtagctgtctttttaccgctatcccttttttttttttttttttttttttgagatggagtcttgctctgcccaggctggagtagcgtgatctcagctcactgcaacctccgcctcccaggttcaagcgattctcctgcctcagcttcccaagtagctgagactacaagcatatgccactacacccagctaatttttttttttttttttttttgtatttttagtagagacagggtttcactatatgttggccaggctggtctcaaactcctgacctcagttgatctgccctcctcggcctcctagagtgctgggattacaggtgcgagccaccgcgcccaatcccttgtactttcttaataaacttgcttttgcttttcactgtggactcatcctgaattatttcttgcgcgagatccaagaaccctctcttggggtctggatcaggacccctttcccgtaacacactaacacatacacactgaaactcacacatgcactaatatacactcccctactcccactggtgcacacacaccagcacactcacaatgacacgacacacccaagcacacacggacacaggcgcgcacacacggacacagcagtgtgtaactctgggtctccggtgggtctgagtggtctgctccacggtgggtctctcctgaggctggagcctcctctcagaaatgtttctgcccccagctgccatgtggcctaaaatcctgacaaattaggaaagattcctttaaaaccagcacttcggattttaggcttaagcaatatttggaaaatgtgaggctcagtcccccagctcgctgggctgtgggcctgtcacctggcgcgcgtgggggcaggcaggaggagggggctggctcgtggtatggggcgagcccgggcagatttggggcacaggcaggcacgcggacaccccaccgctgagagccagagagacagcagagggccgtggggatcaaagacagggctctggagggacccaatccccacccactctctctgcaaccctccccaagggacttcactcccgcaaacctcagtttccccatctgcacaatgggtgtgaacccgggacccacttcatgggctaatgcgaaacttaaatgacaccgtaccaattaagttataagccctggaagcccaagaaaagaaagcggtggtgcgatgggggaaaaaccaccatccccggcttcccgcgtgtaacggggccgaaaataaccagcattttccttttctctgcggctgaagcccacgcttcccagaggaccgggcctgcttatcaggagcagagcggctcgctcggctgtctccgccagaaggtgactgtgggggcccggctcccctcctgcctccagcccgactcccaccaggaacacaccagctcctccccccgccgcccctttcaggtttccgccccacccccagcccgcaaacaattttgcatatatttaaatctcctctgcgagttccccctcccccggaaaaagagagaaaagaaattacaaaggccgtcatttgtctccgtccccgcaccccatctatcagggcccggagcccgtcgcctcgaatgaggcgcgcgcccgggacggccgctttaatggggcgccgcgtgtgactgtgcagccgcgcggcgggcgcagccggccggcatttgcatacatattaaacggagcagtaaaaaatgcagacatgcaaaccatttggacgggctcctcggcgtagagcctgccaggaaatcaatcttctggtttcttaaaggcagcctgctcgggaggaggtggcgatgccacacagcccgcaggccgtgggagggggccatcgtctgtccatctgcctgcgggagcagccgtgggggtccttcccggccatggaggagccacctcctgggagccaggggccggggagttgagtgtggtgggtcctggctcagccggctgtgtgccctgtagtaaaaggggtcccctctctgagctccccctcactgggtgctgaagatatttcctttcccttttgctaggctggggcttaagggactaacccaagatcactgggcccctctatgcagagcctgggtctctaagccaggtgcgaagaaggatggccaagaacacaggctctgggggcgggcggcctaaattcaaagtcaggctccactccccaagagctgtgtgatcttgggcaaatgcatcaacctcactgtttcccgtaaaagggggatcaatatgcctccctcttcggtatgctgttggattgaaataggtcagccttgtaaagcacttggctcattgcctggcatgtagtaagtgctcaataaatagtggtagaacaatgtgtaggagggcccttggtgttattggtatgtttttcttggtgaatatccctctttatatctgcatagtgtggcaagccactcctcccagagcctccttacctgtaaaatggggtgttttgattttcacgggaactgctagctgtgttctagaaggcactgggtccctgctgtgtgctcccacccacccgctgattccagccaggtgtggccaaactggcgcctctgagggctgcccacagcctgtcttaggcaaagcccagagcagggatgggggcatacccccaaactgaccatacatctgtggggccaggaaaaggcaactggccctgagcctcagcctagtgagactggggcctctctgaattccatggcacagataaggaaaccgaggctcagagaggtgtggcaaagccaggaagcttgaaggtggtgcctctgggatgcaagccaggtgtgcccaactgcaaggccacctccccagaggtcccccagagaggaaatactgccggcagagggaggagctcatcccacagtgtcagggaacacagcttccccccaaaggaggggggtgcttgtggagaaagagctgagttttgcgtctgagcccaagtgaatatttggtactcatgaaggtccttcctttttttttttttttttttttttgagatggagttttgctcttgttgcccacgctggagtgcaatggtgtgatttcagctcactgcaacctccaactcctgggttcaagcgattctcctgcctcagcctccagagtagctgggattacaggtgcccatcaacacgcccagctaattttttgtatttttagtagaaacagggtttcactatgttagccaaggtggtctcgaactcctgacctcgggcgatccacccacctcagcctcccaaagtgctgggattacaggcatgagccaccgtgccagtttggtccttccttgaaaagacccagaggaagaggggagagagggttttcaagaaccagctcaagtttggccttcattcatttacttcatactcccggaagcgaggaacagaggtgaccaaggtccccaagacctggccgggcagtgggcagtgggaagtggtggggagttaatggcaggatggaggggtgcacctagaccagtgggtgcactgtcctctctgagaccctggggattaggtgaagaggccaagccagtgcattggggtgggggggctttgccttctgttggga

SEQ ID NO: 1883609 - DNA, 4001 bp, Homo sapiens
caaacatggaaacagatgaagagacatcaagaaactctgcctttgcttagttggcaacagctgataatgagattccaaaggggaatattgtaagcagggtgaattaggagattgaactgcaaaagattcagagagacaagattaagttacatgaagatagcatctaaaaaatgatgaaagatgaaattcacgcaagctcttctgatgtattggcaacctgcaagatgctgctggacaatctcctgggaatcacttaaccttagaggtaattgtggagtgaaaaattcattcaagagattgcctgagaagataaatgcaaaagaggcactaaaaaaaacgtgattaatgctctcaaaggcaatgggcaggggggatcaggataataatgagactttaccatttcacaaaagatctttgcatgtgtcatctctgtattgcagatcagccctgaaagacaggaacctcccatatcatcattttatagatgtggaactgaagctcagccacaattaagtgacttgcccaaagccacacagccagtaaaggacaaggccaggacttaaaggtggatcttccaattctaaatccattacaatctgctctaaaggactgtcaaatgtgatgtttcactgaggaatgatgactttgaatagcaccattttatggtagaaggcaaactatctttctgccttgaatacaatagttccccgttaactgaggtcaactgtggtctgaaaatatgtgagtacagtacaataaggtattttgaaagaaagagagagacatttatataattttttttttgagacagggtcttgctctgttgtccacagtggagtgcaatggcacaaacatagctcactgcagcctcaaccccctgggtttaagcaatccgtctgcctcagcttctgagtactaggaccacaggcatgcgccactatgcctggctaagtgttttattttttgtagagatggggttttgccaaattgcccaggatcctgggctcaagggatcctcccgcctctgcctcccaaagttcacagccataagccaccttgccagccttacataacttttattacagtatattgttgtaattttttaattttattattattgttgttaatctcttactgtgcctaatttataaattaaactttataattgttatgtatgtataggaaaaacatagtatgtacagggtttggtaaaatctgatttcaggcatctaatggggggcttggaaggtatccccccagataagaggggactactgtaatgttcacctgaataatttaggggaatgtttagaagccttagttatagacattgactctcaggctatccccagtctctaaatgtttcctgtgtcaacatactcagtttctgagggacacaaattaaatataggttccagaagacacttcaggcaaatatacccatattaatacaaaataggacttaatcccaaacccatatgggttttctaccctggtgacctcagctgggctatttcttggcttctggctgaataaggcttagtataaaggcaaaccaaagatcatgggcttgagtgttgcactcgacatcacatgcgcttttgctgctaatcttgcaggaaattacaaaataaaattaactgaggtacagcttgtacactaaactacatatacagtaaagtacacaaaccttaactgtacagcttgataaagtttaacgtatgtataccccgtgtaacccctaccatcaagatataaaacgtttctggtacctgcagggcattttagaatatctataaaaacgaacttacccactctaaactgtcaatgggaggaggatggcctttgcctacggtcttagcaggacaagcaaataaaagcactaatttttaaatttcaggaagtctttagctcttcagaggcagaccctatgcttagaataagggtgggtcaggcgtgagctggccagcactgtttccggctgggtctctgcagcatttcctctttctgtaatacttcagctggttttcctcagaagaaccactcctttccacgtgtttgagtcacactaatcccatcctcctggagccagggttggatgatgggaatgaggcctaagccaatgagcgtgctgcattcccagcccacactgacaggcctaggggtaggcccaatgtaaagcaaggagagttttgctgagacagggagccagaatcaggaagggtggagccaacacactgagacagaaatcagatctgctgacacggccgagctcccttatctacccacgcccgaaacaagatccacccttggacttttaagttataaggctcagtagatcctcttgtgtcaagcagcttgaactttgttttctgtcacttgcagtcaaaatgacccagtaagtttctgggagggctaagttgtcccctgtaagagaatgagaggaattttttcttctcttaaaagagagtgggcatagaaaggaggggaaaaggaagagagggaggctggagcccgaattgtggcagaaaaggaatgaaagatttgctttttaagaacaaggacaaggatgatgaatattgtattcatgttttttacattttatgcaaactacttttacctttcccaaactccagcaaagttgactacatataaaaatgcctgtgtgagtgtgtgtgtgtgtgggtgtgggtgtgggtatgtgagagagagagagagagtgagagagagagagagacaagagaagagagaggatgggggagaagaagaaggatgaggaggagaggaaggcaggctggctggctggccaggatctacattgtattgaggtgatacagaataaggaacacaagaggcaatgaaaagattatctctaaactcaacaaattcagcaaaataggagtttgaagccagaactgatcatgagaatgtaagccctctggcaatgcatggaattgttgaagactgagttggacttccgcaagtcttggtatgggggattgagcctatgtcctctagatcttaagaggcagggtgaccccaactaactagggctgacattatccctaagtctatttatttgacaataacattacttgctagtaagagttttctcagccaattctaactttgggttggttaaacaggaaccaaaaaggcaaacaaataaaaatctacacagggagtgaaaaacagataatagtaaaatatttttcaaaaatgacttgaaataaggaacttcaaaattaacaaactctttcactttactgatatgcaagaaatctgcttcccaaagcccagacatacccaaaggaaaacaaaatgcatgcactttgctttgcttaatgcagttgcctgtgcaaaatgctaggcctccgtgaacgcaactgactcacagttctctgaagttaccagttaaccccaaattggacatttaccatttaataggaaaaacatgtgctttctctactcccatcaccacaccctaccttggaagtttttccatcagttaacatttattaaattctaatggcactagatgtaacctccacctcccggttcaagcaattctcctatctgagcctcccaagtagctgggattacaggtgcccgacaccacgctcggctaatttttgtatttttagtagagatggggtttcaacatgttggtcaggctggtctggaactcctgacctcaggtgatccacccgcctcggcttcccaaagtgctgtggttacaggcgtgagccacatacctggcctataatacctttgaatgagttactttgtgttgatatcccccattagtctttagggacagagagggttctagtaattgaataattttaataaatatttttccattttttcccaatgaactcatcaagtgattaccttttaactccatctggggaatttttaaagagctttcaattacaatgtatgtttctatttaatttgcaatccatcctactaactgttactattacaaacatagcttt

SEQ ID NO: 1883610 - DNA, 4001 bp, Homo sapiens
catgcgccaccatgcccggctaattttgtatttttagtagagacagggttttgccatgttggccaggctggcctgaaactcctgacctcaggtgatcctcctgcctcggcctcccaaagtgctgggatttcaggtgtgagccaccgcgcccggccaatatttttcatattaattcatttaacacatttactgagcacttaatatgtacccagtggtttgtccagtaatgaggggaaattccaggacactggactttctgtgctaaaaccagaaaagtgctgggcaaattcagatgagttggtcagcctatttgtggtggacattgtgactgcaaagataagaaatagtgtctgccttccagacagcgcaggctgttagagaagacagaccatacacaattctcagtgctttgattgaggagaacacagttgttctgtcatgttgcatacctgaaaggccccagtacaatgaggataatgagggaagacatcctggaggaggggaatatctgctttaattcttgaggatgattaaagatgcccacctcgtggccccaactcttaacaccttccctgggtcttctgtgaaggttcataacaagcaggtcaatgtgcacccatagtctcttcttgttggagaaccagatcaccactgacctcagagattctactgcccccaaatgcttcatatctgattgctttgtttgattagaaagcacagaaaggaaaggaatgactacatatttgtccatgggagtatcaatatttgggcaaaaggaggctgttgatcacatctgtcattctctcctggcataacgagaactagggggcatctacaagaatgtatattcatctaaattcgtgggacagaggagtcaggcgaaaaggcttttcaaaggcatgctgcatcttgctcagtgagtgcgcatttctcaattctttctcagaagcagacattaaaacctgcagcacagtcatttagaatttcaaaggtttcttcttcagggggtgggacacaaaagacaccaccgttattcacataatgctgggatggtggggaacagcagcacaccattaacgaagacggtgcagcaaacctttatggagaaaggcaagagctattctgccaggataaagaagatgcctcattacagttgcttttaaaaaagattattatcattattccttttaaaattcactcctgcattccacctaggttgggagagcttaagaggggaaagacaatttttaaaagtagttcatagatcactaaagaatcacaaaacactcaacattcagtacacacctctctctctctctctctctctctctctctctctctctctctctctctcagtggagggtgtcaatcagaatttggaataaaagcaacatccaaataaagagattttttttctttcttaaggcagacctcttatggtattgctctgtgtggtttaaatggtgccaaaatcctacccaatggcttgaaggaccaaataagatgaagcttctcacacataatgctgctggtccttcaacattatcttgcatagctttgcccttcttctccctctcctttgttttggaattacaggaggcaaatgccacagatttcagttggaaaaccaggagcccaagctgcaggaacagccagcagacaacattgtctctgaactgctattgtttctattttaggagcacattgagtgattagcttgggtaacagtaacatcgcattaccttgcaaaggctggaaatgtctttcaataaggaggcaacaccgagtccatgtgatacaatcccgtagacagagccaagtggaatacatcaaagagagccttgatgcagatgtttcatgcagaagaaaattaggtcagagaccacttcaatttcagcttctgccagcctcgtttgagagcttccagtgaattcgtaatgaatagcttctagggcacttttctctcattcagtcacaggctgccacagccagatgagcgttccatgtggaatcttctctcattatttaaaactgctactttgtgttctaaaattccagaacccttccaatacgccacaaccataggcctgaaacaaaaagactccaaaaatacagagagccattaatctgtatcagattcttgcgtgctctctctccccatccatcatatacatgcatgttttttaatacatccccaagcccttttttcatctgcttatgcaggtacataaaccgttgctgaggaatattggagatgtcaggcttttttaatcttactcaactctgaagaagctgagtggcctatagatgaccaaaatgctctgatggcttcttgcagggagtgtgcatgtgtgagtgagtgtggcgtgcatgtataaagaaaagcttttctctgaaaagagcagagaagggcatggtgacctcgatgaaagtgaatgatgcatcttttccctgcccactcccagccccatctcacatgttatttattatattgaagggttagaatctggggcaccctggtatcttcctgtatcctatgctcttgctgcctaccgtttttggggttcactgacaaatccttgctgactggagtcggggtgtgtggagtggatcacttcaattcatgccaggagaagaatcattagattctaaatgcattcagaagacagggggcagagagacagactcggaggatcacagaggctcctcaaagctggtaatgctccgatttcccatgggaaaggaaatgaagtggcagccctagcttcagctccctgtgacacaattgctttgtctttgctacctccaaagcaccagggcattcattaattggttttttcaattctaggttttgcaaagctgtgacagaaagcctcagaaaagcactggaaggctggcttctgcttcaatctatcatgagaagccatcaagatgttgcctttcttgtactgccattaaaaatgcaacatctggctttaaaatatactagtctttctgcctttctttcccaacctggtctcctccctgtcagcactctcctgcaatctttttttttctgtcacccacacatacacacacacacacacacacacacacacacacaccccccaactctcacattcacatgctcaattaaaatttctgaggaaggcagaagtgcaagggaggaagtggcagtggagtagaaagatgagctgacagagaaacctagatttaagctctaactccgggtgaacttggccaagcagctcacttctctaggttcagtgtccttacctggaagaacatgagtgctgctccccaagtcccgcacagctttgacgataaataatctttctcttgtgttgtagacaattaataccattcttgaaatgtctggctatgggttgtagccacagatctacctattaagatgctcacaaaggtctcactcataggattagcactgaggcatttaggggcatgttcatatcagcaggatattctgaccttttccaggcacactgcaatgggatgcagctcaatgtaggagaaataacattgcttttgagtcaaacagacttgagtttgaatttaggatgtcacttcctggctgtgtgacttcatgtgaattacttagcttctctgatccctagtttcttctacagtaacataggaataatacccattatgttaggttgttagaagattaaatgcaatcatatgaaggtagagagcttggcatagtgcctggcacatggcaggtactcaatacaccgtagtgtgattctttttgctattaaaaacgaatactggagacatgcatgcacacatgcagaaaaggcacatatgacctagaacagtgaaaacaatttaacacactgtttgaattgactgttgctgctccatatggagaatattctaagacatacacacacaccacacaccagcttctaaaggcagtagcaaccaatcctaatttccttaaggtaatgcacttaaaatgctgagtggagattttg

SEQ ID NO: 1883611 - DNA, 4001 bp, Homo sapiens
gatcctctccctcctcccaccctctaccctccaataggacccagtgtctgttggtcccttctttgtgtccatgtgttttgatcatttagctcccactataaatgggaacatgcagtaaatatgttttctgttcctgtgttagtttgatgataatggcctccagctccacccatatccgtgcaaaggacatgatcttgttctttcttatggctccatagtattccatggtgtatatgtaccacattttctttatccagcctattattgatgggcatttaggttgattccatgtctttgctattgtgaatagtactgcaaagaacatatgtgtgcatgtgtctttatgatagaatgatttatagtcccttgggtatatatccagtaatgggattgctggactgaatggcgtttctgtcttcaggtctttgaggaatcaccatattgtcttccgcaatggctgaactaatttacactcccaccaacagtgtataagcattcctttttctccacaaccttgccagtatctgttatttttgacttttaacaatagccattctgactggtgttagatcgtatctcattgtggttttgatttgcatttctctaatcatcagtgatgttgagcttttttcatatgattgttggttgcatgaatgtcttctttctgcttcagttctaaaccacatggatcactgctatataagcattattccccttctgtgcctcaaaaatgaccaagaatcactaaaaccaattacttgtaattttaaacaatttttattacttgcagtttccctcctatttatgttgcagtatgccctctttccccacactcactagtagtaataacatttttgaaaaaaagaaatgaaagcagatgtacacttgctttactcacagtgaaacagcatagacatggagagaaagcgtcttgttcttcagccatcttgaaggtgtagaagaaactcaagcagaagagcagttgtaataacagaagagaaaatcaggccacattctcagggctggggcaaaataaaaagaatgtaagaaagaggcagtcaaacactaagaagttgccttgaagagtcatttcaggagacctttggccctttacctgagctgtatcctatcttctggatctgccttctctcccatgccaacttttccattttctcccccttgccactactcagcactgattatgagagtaaggggccatttaaaggtggcaacactgcagaagagagagactgatgattcaccaaagttcacagacagtatgaaactgatgggaaaatggatacgctggaggggtatggttcacacctctagagagaaaagttctgggactcagtggaggccaagccaaagtcccccatcactgtttccatctccttctcaagagatccaccaaggaaatgataccttgcttttaaactagtctatttgcttattattcttcctcttaaaaattcacccatcaggccgggtgcggtggctcatgcctgtaatcccagcactttgggaggccgagatgggcagatcacgaggtcaggagatagagaccaccctggctaacatggtgaaaccccatctctactaaaaatacaaaaaacattagccgggcgtggtggtgggcacctgtagtcccagctactcagcaggctgaggcaggagaatggcttgaacccgggaggcggagcttgcagtgagccaagatcgcactactgcactctagcctgggcgactaagagagactccatctcgaaaaataaaaaaataaaaataaattaaaaaaaaaattcaccaatcagcagaagtgtctgacatagcagtaagcaacaacatgttatttggttgacagccaaattatcttaaaccataatcactctttcaacactgttcctttgagcatgacagatccatgaggattgttctgaacactgagtgccttaccttgcacatcagagcccccaaaacctcacccttctttcagtctccggtgcaatacacaaatgccttagaacttctcacagccctatgcactctagtttctgtttaccaggcacatgggccaatacccttgtttcgaaaacaggaagagcattgctgtgaatgagaagtcagtggggactttggaaggaaactaatggtgtgtagaagctgttgcataggagggacatggggccaagagctgaggcagactggccagatttcagaaggtcactttggtttaggaagtgaggctttgtgggaggcagggaaggggcgcataggcgtagcaagagatgtcagccctgcctgatttcacggtggtgattactgagtgatttctggattagcctttcacacttgagggttcactgagcactggccacttcctcctcttttccattcttgttttctttgcttttgaaactgtccaccctccctcctcttcccccactcaggagaagatttatatgaaggcttttttttggttggcaaagaacagcttctcacaaagtgcatggcacagtaaggtaagctgatgtgagagcagcacgtgaggccccactcaccctgggtggaacctagtgggtctctgggccaggggactctgtggagaccaggactaggtggaactatggggcagttgcctaaagtgcaaaatttgttgggggttatagggggtggggagggtggaacttagtaatcaagaaaaatcatattttccagcaatgttttaaaaaatctaattggcagaatatggctcatggggcagcagcctgtttctgtaaataaagttgtggtgaggaaatttggtcctgtctattggccaaacagaaagataaattttgttctagagggaggtcaatttaatccacaaataagccagaacaaatttaatttctttggggatccttggaaaactgaaaagaccacacttccatggccactttggatcagagcagaagcctcaagccagggcagaatctgactgcctgcattgacaccacctggcatgatgggcagggacttgtaaataggaagcagtttctgtgcccactttatgaaattctctgtaatattctgtttcccttttctccacttcctagttttaatactcttgaataacttaagtgatagcaaaatatgtgttgctcaaagatttagtagaactccctcataaaaccactgggtccaagacctttttttctcttacttttttttccttgtaattttttattgactgctaggtactgtgtgtaggatagtagagactgagataaacagtagatatgccatgcctgaacatgggcacaactctgccattgctcacctctcggtgtagggagttgagcaaatctagtcaagatttgggctgagtttgggttttgttgttattatggttcccttcagtgcactactggcttcaaattcctctggtattaactggtgcttggggtgagggatggcttgctgaagggtttttttcaatgttcctcctctatcctcaattttagaccttcactgagtactcgcacctgagtggggtgggtcttcatactcttgcctattttttcagcagcagactatgcttattacctgatgcttgctagctgggtggtagggggagggggtttctctgttgtcttgatccaccttagtcttatgcaggccttaagatcctggtgttggagactggggctttctcagtgaacctactctttctccagcattagtttcctctaacaatctgacctcaggatagttccctgatcctcccttacagagggctttttcttttcactttttccagccacatgggtttcgcctgtgccctgggggaaggagggtttgccacctcccgactctagcagctcaacagagtccagctggggcttgacaatttcctgcagcagctgggtggagatccactggagaagagcccagaagtgggtgcaaacccccatcgtgtctacagctcctagtgtttctgtactcccacattagcccac

SEQ ID NO: 1883612 - DNA, 4001 bp, Homo sapiens
tgttcatcaccagggactggttgccaaaggtgttcctgttaatgaaactgttcacagtggttaatagttacagtaagagaagaggaagcaagtgagaaagagatcttaaggattcaaagggttttatgtttttttacgacttttttagagcaattctaggttcacagcaaaattgagaggaagttacagagatatccaatatatcccttgcccccataacgtgaatacaacctcccccattatgagcatcctccaccagagtagtacatgtgttgtaactgatgaatctacagtgacacatcacatcacccaaagttcatagtatacaacagggttcgctcttgcttttatacatttcatgggcttgagcaaatgtataatgacacatattcattatacatttgtgtaattacagtatcctgcagagtattttcactactttaaagttctctgtgcatcacctatgcaaccctaacccccaaccccaaaccctctggcaaccacggatccttctaccgtcttcatagtttcgtctttcccagaaagtcatataattggaactataaggtattgtttcatttttaaaacaggccttaaagaagcaaatctctttctgtcatccctctagctctctgcagatattcaaaattgccaatagctgtccagagttttctctattacctgtttatttgaaaacatggaatacttctttaaattctagaatcaatcttgactcattaaaaggtattaatttttgcatcaggccattctcttgccacttattaagcctagctgtgagggaggcagtgcattaaggcttgttgccctgcatgcaatattacgccactaaaggcacattacaagaattctatttgcattcaagcatttccacacaaagcaatggctcacatacagtgtgaaaattgagtgtgcaccactctcaaaacttggaattcttgccagggttgaagaggcttccactggggctacctgttctgaaagtattttgcatccaagccaactgctttttggtagccccctctctgcagtccgggtgtgcatccccagaaaagtatgccttattgcatcttcggcacactcctcacacccaggacctgtgctcaagccaccaaaccatgctggttcctaagagcatctctgcaaaccagatgtctctttgtatggtacatgctgggagcatgagtggggcaccaatgtggaatgaagtggtctctcctgctggaaattatatcagtgaatgcacttgaagtgcaactgcttgatctcacaacaatgaaaggataaatggacacaaatttagctgcttttgatatgctgaagacaggcccccatttttatttatttctgaggcttaatgttaacaagaatagaaaagtggaactgttattaccaccctgtgacttttgagctgggcatggtttggggcattgaaattagagtagccttgactcatctactcctcaactcatttccaacaccgttttccattacacactttcaaatctactcgattgaagagccatccacacattcaactgaaaaagattaaactcccctggtctccacacctctccctgatttccaagcattcaggataagactgccatcctgggccccacatcaccactgtcaggaataaagagaaaggctcagaacactcccagcaagactccaccactcactgtcctggaacactccaagccttctcctcagtgcttacattgagaacatcaaggcaaatcttgttttgccattctctcatgtacatcaaacttcacaaggagcctgcagctcccaatcaactctgatcttcctggacccttattctcaattatctctatagtctcccttttctcatccactctgccactcatcccaaatacctgaaaccagtccacactgtcttctggaagtcatgctcaattgttagctcctcctcacttcttctcagaactttttttcacttctcgctgtaaatggacagactctcaggaaaccacttgcttttacccagcagtctgaaagtggtagctgtggtatcttgcaaggttctcgtaatgccagatctggaggtaggggcaggtgttctgctttcatactgccactggaacatcctttttcccgccacaagaacaaacaacaacacaaagttctgatcttttattaccatgtgattagtccttaccaagcaccattttagcttattcctgttacctacagatccacaggtcactcccctaattccttgaagattttagcacctaactcaccaccacttctccaacatatttggtaatttcaatatccatatatatatatgatctttccaatgtcctagactcggtttttcgaggccctcttttccaactctcacattttccaccctgcctcaaccactccctccaaatgccatactctatccttatcattactagtaaagcaatccataactacaatttcaaccattctgtctttccagctcactctcaccaatgccccaactccaagaaaccttgaccccactaggagctattagccattgactgcttaagcttttcttggtccctcaatttcctcccccacctagattagatctgatggtccatcatctcacactcttgcatacattcttaacaatcttgttaagaagattaacaaggcccaaggccaggttaaatcaactcagtttactctgcacaccaacacagatggccacggctggagaaagccacacagcttgctacggctggagaaagccacacagcttgctgactgatctcattttaagttgatgacccctaccttcaaaaaggtctcgagctctgcccatcaatcattccatatttccataatccattcactcccctgttaccctaaactggtgattttcaaacttgagactgccacagaatcacctggaggatgtgtggaaactcagattgctgggtcctgacccctaaagtttctgaatcaggcaatctaaggtgggcttaagaaactgcatttcgaagccaggagcggtggctcatgcctgtaatcccagcactttgaggtcgaggcaggtggatcacgaggtcaggagatcaagaccatcctggctaacatggtgaaaccctgtctctactaaaaatacaaaaaaattagccgagcgcggtggtgggcacctgtagtcccagctactcgggaggctgaggtaggagaacggcatgaacccaggaggcggagtttgcagtgagccgagatcgcgccactgcactccagcctgggtgatagagcgagactccatctcaaaaaaaaaaaaaaaaaaagaaactgcatttcaaacaagttcccagatgatgctgaccctgctaatctggaccacacattgataaccactgccctagatgattatttcttgactttttctttcttctcaaacctccaacacatattttccatccttactctccattgatgacttaacttgcactcacgcacacgcacacacacacacacacacacacatcagaaaagagcttcccaagctcctgaccccaaatctccttccttactggaaacagtgtccatatgtttgtccttccctcctgctgctatagctgaactgtctaagcttctccctaaagccaacacttcacatgcatcctagattccatctcctctctcttacgtaaacccgactcctgaaacttctcctctcccatcactctccctacatcaagaatttcttcctctgtactgggtcatgcccatcagtgtcaagtgtcttaaaaagaacccctccttacccccatattatcctctatttcccctttacagcaacattccatgaaatttgacctcctcagttttcttcaaactcaaccaggtacacccttacctcagggcctttgacttgatttgtctccattccgaagtttctataaggctgacttgatcctctccttcaaggccttaatcaaatgccatcttgtcaatga

SEQ ID NO: 1883613 - DNA, 4001 bp, Homo sapiens
acctgaccctgtgcaaaaacctcacgccgcgcagtgcccttcgggaaaccggaaccacccaactctgttgtcacatactgaacccacacccagagtgttaagtatcactggcgctcagaaagaaaaatatcatcattccctcctcctggctggtgtctttaaatagctcctcttatttacggtgtacatagtgttaatgtccttcagttgctctattttcaaggatggaaaagccgttgctaagcatttctaaatgacagccccagggttcattaaaaatatggcaaacatttgctaagctcattaagtgcaatttttgtgtgtgtgtatcagattcctcctctgcatgttctgcgtgaccaaacatctattaaccctaatcccattgatgagtctgatacattcaaaccggcaattagacaaaacaaaagggatatttatggagagactcctaaatgggctttcatactggtctaagctgtttcaaaacgacagtttaattcccctctgttaatcccttgcttccagagcactccctttgtttgattataggctgtcaggtttaggaattctgattgaatcaaaattcgaagcaaactagaaacacataataattacactatttaagcactgttgcctactgtataagcaaacgaaatgctccacaaatgaagactcctcggcacaaagggtttctaaaatgtactgcttgcacaattagaggccatagaatgtgaattaggtggttgttttccccgatccttttaaaaatgctccagttgatgaatctggtggtaaaaacgccatgcatcaaatctgttgactaggcaaaaatattttaagacaggctccctctgcccttcctccacgccaccccttcacctctctcccgcctcccccgccgcagctgtggactggtctgacccacagtggttaatctgagcaccagctctcatttggccattccagctttccattaactcagggccacggtggtgttattattagaggcggaaaggattccgcatcacttacatggtgtaaagctggacaaataaacaagtactgactgtggatgtctcccaatcgcaccgggcctcaaattttgaatgcactctttcaaatagcaaaatgacccttctctagcttgtaaaacctctctttgttttcccttaaagaaaaggaaactcaccaagaggagtagacttttgacagagttcccctgcagtaacatcattttcaagtggctcttgaccagctgagcttttttcaaagtgtaacttttatagccacaaaggatcatgtcttatttaggttcattaaatttcctcttactttgcaaagggctgaccaaactcacagctgctgagagagagaagccaacccttcatcattcttcaagttgattcagcactggtcagggctctattttgaaagccctacccagaattggaactcataatttagtctctgttggatgaaacaaacaaacaaacaaaaataatttttctgtttgggttagaaatggatcttttgtgttttgttactggcaaaagttccggtgttgccattgttagcgtggcaacaagatacaaggcgatttacaaaagtactgcctgagcgaggcaaggctgccgggactctcagggctgggtgagaaacattacctaagaaataaagacaggatgaacaagagagttcaactgccagattgtctgttgtcgaccgaggcatccccccgcccctgccccctgcccccgccactccctgcccaggaactacacttcccagcattccttaccactaggattccaggtcagacgcttcaaaggaagggatctcaccaggatttggaaggggaagagaaagagaagccactcttctccagcagtagctgggacaggacttgcaagtcccagtatactatcgaaaattactatgaggctgcccaagattccctctgcttcctgcacttccagatttcttgaacaggcagtttctgcctgaccttggctcctagccctcctcatggatgtgccagcctctaattacccatgttaaaatacttcctgtttcacatacctggctgaaacctgactgatgcaggtaatacgtgcctggaaccggggaagacagcagagttgactaaagccagaccactttgaaaatgggatctgaagcttagtgtagggagcgtgccgttttattcatgcatgcaagcctcctttcaacaaatttttacagggggcagctacagtatcataaactttctggtagaaactagtgatagagctatgtaccctaatccagagatcttatagtgtaatacaataagggagtgagaaaaggagctgcagctgccatttatggggagattgataaagaaaaacaatagtaatgaatttagcaataacaacaacaacaacaacaacaacaacaacaacaaaaggctagttgggaaccaagctatgtaatctttctaaccttgtagctttgaggcaatcaaatcagtttactctctgagtgtccgcttcccagttcctgtcttctttcatacatgattgttatgaaattagagataacaaaggtaaagtatccagcacagtggccaaagcacagtagtcagccagcaaatggtccttgtaccttttgctcctcgctaggtactaagcttctaaaggcagctgccaggttttactgtcttggtgtcccaagtatttactttgcacagtgtcttaggtttaaaagatgttcaataactcatgaatgaatgatgaatgttggaataaatgaatacttgaataaactgtgtggtacataatacatgcttggtaattgagctgttcatgctataattgagtataattagtatcctgtaaatatgtacaaagcccagtgggaacaaaggagaaggaagtcttggatgagttaggaaaggaaaggagtattaaaagctgagacttgaaggatgaggacgacccaaaggtcctatcatttggacaaatgatggcacaatacaaccagttgaaaatgtgcccagtgtgctgacacaatcttcttacgtgggcatctctgggactctcactctgaatgatggccaaggcttctccactgtggccagggtgagccttctgtgacctgttgagttaactctgagctctgtgattctatgagttcttgggtagggaaacccacacatcgcccaagaatgccccatgagtgacgcaggctctcatttctgctgaaggaaatgaatgcagaaagaaaatgataatctacagggagtaacacccacacagttatcactcaaatgatcccaaaaggctctgaatctgattggagcagtgcttcataaacttcctttcaaggggtttgtcatcttagtaattatgaaagacttttatagtctgattaaatatgctcaatctctgttcaattttatacttatttttaaactttacccattgtttctttttttctaatgtttttgcctatgcatttttaatttagtttctccttttgcctccttgctacctccttcttcccatgtcccctcccccaatgtcaataacaatgttccagaatcatttctgggtggcctcattctttattcgtgatacatttttcctgatcttcttgtgggagagtctcagatcagtgatggctgtaggccttgctactttctctgctcattcaatcatttagtcatttattcgttcattcataaatagctactgagcatctactttgtgcccagcagtgctctgggcactgagaacaggacagacaggtccatgctcatggaatttagcttctgttaggagaacacaggtgccccctggatatatggtaaaataagtaaagggaataagtaaaatctgacactgaggtccctcactttcccttttcaacaactattttgtactgtgttgcttcttttactctgctcactgacaaaacttctttctgctggatttcccacagctgcctggtcttcattg

SEQ ID NO: 1883614 - DNA, 4001 bp, Homo sapiens
ggatcacttgagatcaggagttggagaccagcctgaccaacttagtgaaaccccgtctctactaaaaatacaaaaattagctgggcgtggttgtgggcacctgtaatcccagctactcaggagactaaggcaggagaaccaaccttattctctagtatttaatttctcctattgagttttcttagatatcacaaaagcagcatggacactgagttcctggcagagacccaaaacgtatccaaggtcatgttacaaaaatgtggcaaatggccatgagtagggggcttcttctccatcccttgctccatttcaaagtcacatggggagagctggcctgtgctgttggctgccctggtcaccttgtaagcattgcttctcacatgatctcagtgattttatgtgtgacttaggctttgggaattaaatgtaattgtttgtattttatcatttaattataaaaatgttattcaactcattgttgactatgtcaagtgctaaaaaaaaagcagtgatgaattatagttaaaaagtatcttttcttatcaagcaaaagttaacttcactaaatttttgaagaaattaatttttcaattattcacctttgatgggaaaaagcagttatgaatgatgtttaaaatgtatattacattgctattattatatatttataaacaatgtgatccattgcagtttgtataaagcaataaattacattaatagttattaggctaaaaagagaaagttaaatgttatagcttttaattttaagttttaacttaagcattttatttagtcattcttaacctggcaatgaataaaattagtaaggtttgtacttagtctttttcttttcgtatgaagcacagacatgtacactacataagcagatatacagtgtactcatggtattaaagtttctcataggtgatgattagacaaaaatctgatgtctattttctcttccccaaattaatataatactagtagtaatgcaatcaggtcacgtaatacctgcattaggcaaagatctgatgcatcaataacagcatttgagaaatcttctcaaaattaaaaactaggtgaacactccccattcccctgagatgtaataaatatcgcagattggctgggattctttttgtccatgactttataattttcctaaatacaaacatacctatagcaaatcaaacaacactatgtattgtgacaatctgatattttttaattataaagagacactcatctttgagtgaatacacattgatatttattcccataatctggatttattaaaattaagcttccgagctgggtccttgatttaggcttaaattccctgacccagttttgatgctagtgccaagttccaaatgtatgaaatggagttgtttctgccttaagactgaaagcagttaacagaaagcctccattttaagtttttatccataaagcggagaagctgagtgggttgatatgggggtggagaggggtttgccttaaacagatattcttcctcatgaaccagttttctctgtggatatttagactagcaaaacagaccacgctggtcaggaggcgggcggaggtgtacaagcagattaggagtaacgttatcccttgacttaggcctgtatgactgagacacacatacgcacacacatgcacggcactgcatgtgctcagaaggacctggtctcatcctgaaggtggagtaggatgacagaggctgtgattaaattcaagctctcacagcagcagtctaagtcatcctttgagaggactgtattcagggtggaactccgaaaagaaatcctccgtctctcttactgccaattcacaaatcatatgctctttagcaaacaacaacaacaaatatacaaacgaaaaaacccaggggccgttcttcttcctcctgggactcaggtttgtgcttgttacctggaggcctttgtgaagtgacacgtgtaggtgcacagtctctccccacccgcgtcgtcacagtcagtgcctgagttctctctggcaagttcaagttcgagagagagtgtgtttcctcagacttagagccaggccctcagggagctgggagtgcactactgtgctgggaggggttttgaggaatgctgacgttttccccgaggtcatttgtcgagcttcactggctttcccactttctgaagattcctcttgttagtttctatttatataaggactcacctcctttcaactaaagcagggatccccctcccccaccccgggcctgtctgtggcctgttaggaaccgggccgcacagcaggaggtgagcagcccagcctagccagcattaccgcccagctccgcctcctgtcagaacagcagaggcattccattctcatggcagcggagccctactgtgaactgcacacgcgggggatctaggttgcgtgctccttttaagaatcatctaatgcttgatgatctgtggaacagtttcatcctgaaaacatccccccatcctcacctccacccagctccatgggaaatctcttccctggagttaccaatcaggaaagtagaaatccaatagtttgattagacacaactttccatgcagaacgaatgatatcacacatgcgatgagggagatgggtaaaatcatttcaaacggtcatcccggaactaaaattctattgcacaagtcatcactgtggttcagtaatggaccaaaaggagtgtacgcttatagccaattctacttctgagctcaaaagtaatttgaaaggtcaatgagtttttaaaaccaattttacacaattcctcatttccttagaatatgagattatattctttacactcttaaaaatttacagcacactaacaagcgatcatagacatacaagaacattaagaagaataggaaaataaattgttataaacagggaaaacagcaagtgaaagaataaataaaaaatgattcatctttaccaaactagacttctaagcttagttctaacatccgatatctcaaatactaaaagcaattgaatacttaatgataatcagttctttcattatagctggtttcaatgtgaaaacagttactaatcaatttgccgtatgcatggttactgtggatattatttatttgcgtattatttatttattaacataaaattttggtattcacaagaaaatttcagaaactgtctctattctctgaagatgtaaataaatgaagatgaaagaggaaaaaaacaattttgataatttcatgcttcagctgaggacctgtgtttgacagcaaaagcaccaggctttgtacttctctcttttttcactgattcctggcatagcacagtgcttctgacctgcataaaactaaatatttctataaatgctctcagtcttctgttatttcaaaaaaattgacagcaggaaagaccattaaaagatcaaggtttatgtcaagcaactaaaagaaattaaattttgttcatctatcagagtttgtcgagggaaacatttcgggcagcagtagtctttctatggcaggactatttttctatgctgaagccttattagcaagcatcttgctcagtatatgccaggaatttctctccagtcactgaaataaccaaaaatctgatgtgctccctgagcagcagagcatcccggaattgagagctattgaaagataacatacatgaaactccttaaaatggaaaaataaaatctcacttctgatgatctgtttactgccatcttgatcaagcagcacctggtgtcctgctctccgctactcccacacatgaatttcccagtcctcaaaaagggagcatcttgcagaactctttcccaaggctaagcttgtgcttgccttctggaaatcaagaagatatgcttcgctttcacagaagagtttcttggggttaatgtgagtccactattctcctccctggaatgtatgagttcccgcagagacagtggggcagaggagaatggtcctgagtgtctccaa

SEQ ID NO: 1883615 - DNA, 4001 bp, Homo sapiens
gaaaagaaagaaagataaggttactggagttcagagaggttgcaggagaaagatagccaggaactaactagcagggctgcccttgacagtcaggtcctctgactgtgcattccattgcactatgtctcaggactgtgtgttattatttctaacatcaccaatttccagaaaggatcccaggcatttgtggaaggggtgtcaaggggagagaaggaagaagaatcccaacagttaaaacctcccacagcccaggcttcctggtcacagacagggctgcaaaaggcaccctagatgggctagctgctgtgggtgggtgagacttgcattgagtacctactatgtgtttcaggaaaaaggaccctgagcgtcgtggctcactcctgtaattctagcactttcagaaactgaagtgggaggcttggttgaggccaggaatttgagaccaacctgggcaataaagggagaccctctctctacaaaaataaattaaaaagaaaagagcgccgcctgtgagtagggtcaaatgttatgcactgcacctgctacgtgctacagatacaggtggtctgggacccgccagctgacagtgggagtgagtttgccccgaataaggagtccttcatttctcatcttgtagcaactctgtgggtggagtatgattactcccattttgcaatgagaatatttaggttcaaaaaggagacagctgaggccacagccatagatggagttagtggcactgcaagactggaccccagctgggtgctcaggttccttttctacctcaaaggaaaggtagaaaccatccctatctgccacagaggagcagactccagagaagccaaagcctagccagcgagtaatcataacgatgtccgtcttttagcgagtatttgtcatgtagcagacacgttattgcacattcccacttaatggttacatgaccttgtcccgtctattttcacgttagccaaagggaagcctagaagtccacagtccccgggagctggaagccaggcagtgacagcgccagcgtattctccttgacttgattgtaaatttcacaactttggtagcttcaacagggaggaagaggaggggcgccggctccctccagcaaaggcggcgcggagcgggtagccaggtccggagccgtcctgtgccgggccgtccggtggggggcactgcagaccgcgcgggcgctgcgcccgcctctagctccgggcgcagaggggtggccacgctctcctgagtccctcgcgcccctagccgcgcctgggagagcggactggcctcccagagaggatgcgggggaagccgcacaggggcccactgggactgggtaagggcgcgggatgggatcggctctggatatgggtgccccccgagccgcgccccaccccgcgagcgctcccatttgcacctccacttgagcacggagcttcaagaacgagctattctggggtgcgggttccgacactaggccccacacggatctggggactggtttggctacgacctggcggaaggggggaaacctggcctgagaacggaaactgcgggacgatccggcggcgcacttaaatctggctccgctgcttcctcgccccgcccccgctgtcaccttcctctgcttctgcgcagcgattccacaccccactccaccccatcccacccagaccgctcacccgattctgactttgaacccaaaagcgatcaggcgtgttctgggcccggccacagccagcgggcgctctggccctcgcagaagccgccgcaagcgggcatcgctgtccccagggaggggaccccagctagcaccagtagaggtgcagtcaccctttttaaggttactcggagggtagatgcggcatccactgaccttgatcttttcccacagtcacctgggacccaggcatataatgtgggcagtttaatgaggtgtaaacgaagtgcaaatggcctagaagccccttgaatgtgaagcaggatggaggctttctttagaaggggggttttactcactctgggaattctggtaacagcaatagtctctgattgttaattggtcataattactttgttagaagtctgtacaccattccaagttctaaggcgacgagaaagaatatttctgacatttacaacgggagggaaacagcatattactttctccattaggatatacattagcatattgttgaattgaattttccgccttcactttttaatatatttccaatttccaactactccctggaaaattttaaaaaggggcagcagaaggattggtgatgtgcatgccacagatggagatggaaaaactgcccagaacatgttgacatttgtaaaaaagttaacatccccccacactttaaaactatgatattaggaatagcataatggcaaaagttactcgtacaacatctgttccttccaatgggaggatttctttcctgccaagaatttatgaattttctataggagcttggttctgttcggggaagagggaaggaagccagccagagcagccccttggcttcagggaatgcagggatgcattgctcctggcttttagatggctcctgaagctgctgatggggccaaagtcacccttcagaaggacttggctgcaaacaagaaaaatctccaacagccacccatggtttaaagtgactaggccgtcactaagaaaggtcaaggccatatggcttgaggacagagatgagttggttataactctcattcgcagaagacctaatcctttttggagggcaaaggaaagagtttattatagggataaaacccaaccaactcatatcagttcatttcaaatgtttcattcattttcacattgaccagataagtgtttgttcactcatctcagaaacttcaatctcttcatctaccatcaattgtcttttacccttgctcaattgaatctctggtgactggaaacttttatctttctaaaaaagcatgatgtgagtgctcaaaacagccatctgggtgaataggacgctaagtggattagcagttgaaacattaatgattcacttttgactcaaagcaagtttatctaagcagatttccaatggtcttctcttttgcaatcaaaagaactttctgctctagagaagcctctgtccaggaagggggagattacctttttgcactttaaagtggaccattttaagttcttgatttttgttgttgtagagacagggtctcacaaatttgcccaggatggccttgaactcctagccttaagtgatcctcctgccttggcctccctgggatcacaggagtgagccatcatgcttggctttttttttttttttaagacagagtctctctgtcacccaggttggagtgcagtggtgtgatttcagctcatttcaatgcccccacccccgacacccctaccctgaccccaccactccgatgccaggttgaagagattctcctgactcagcctcctgagtagctgggattgcaggtgcctgccaccacgcccagctaatttttgtatttttagtagagatggggtttcaccatgttggccaggctggtctcacactcctgacttcagataatctgcctgcctcagcctcccaaagtgctgggattacaggcatgagccactgcacccagtcttttttctttttttttttccacttggaatatttttaacgaaacatgaagaaaaactttcaatccatttaagatcaggaatctaaattgggagtctgtctgagcctactctggctcaggaagctgccttataaaaataataataatgataataatctaagttgttcccatttggcagtggttgcggggtggaggaggacaacagcaaccaacatcaagggtttggttcagtctttcaaatcaacaatgtttattgaacacctactatgtgccaggtagtttcctaggcattgtcctcctcctcattctagagggaagctagagaataaatagatccagtatatgtt

SEQ ID NO: 1883616 - DNA, 4001 bp, Homo sapiens
aaggactgccaggtgcgtcacagcggaccgcccagcacaggggaccaggtagcaagcgagacactgaaaccacatctggaaaaatgcccaacctcgaggaaatgtcccaagttctttataagtggagaaaggcagatggggctttaaaaatcacttggtgcagcagaacctgaggcccggcggccagcgaaggccccacggtgtgcccgatggtcaggggctgcagtggatggggacgtggaggctgcgtaggaggcaccctggaggctggacaccctggaggcctctgggcttgagctttgcacacaggtcagatgttttttacagtcagcttcaaacggtgaaggggccctactcctaggtggtctggaatgttcccacagctgcctggtggtggcccccacccaggacccagcagggtacccgccacaggacgtccccgcactcggccccgcctcagagcccccacgccccctgctttcagtcccaggggccactccaacctggccacgccaagccatggtccctgcaccgagtccagcctgctgccttgggcggtgaacagactgtgagtgtgggggaggggaggagtgtcccccaacacctcctgggggtcccacttaccctactggatgacagcagctgaggaccaaggcctggctgggccttgagctggcatcctcatgatgtctctgagcctcagcttccctcctgaaaaatggggagcatcatgctagccgccccccagcgccacagggtcatgggggctgcaagagccaagatgaactcctgcaggaaggaaaggggccttgggctcagcaccgggagtctcagccctggctgctccttagaatctactgcagagctttcaacacaggcacccctcaaatacacccacccaccaggtcactgctgacccccctctactcggaccacatctctctggggccggagccggccctggggtgttttaaggtcacctgggtctccatgagctccgtcgctgtccccgtgtgctcaccagctgtgcttacctctccacgcacttaggggtgtgctctgctctcgaaagtccccacagcagccgcaaaggaggggcctggttgggccaatgtcagcagggcctccttagctcaccctgacaatggtacccccatttctctggcagcaaacaagggggaactgacccagttcagtctcctggggtgcaacgcctaagccactctcccctcagcacccgcagggggcctctgaagaagagagggctgcaggacacgtctgcctctcccctccgcaaaccaggctctgcggccccatctcatctgcttccaggctccctggccagcttgggaacagccccattcattcggggtacccctggaaccttgccccagctcccaccacaagttgggacaggaagcccaaagtgactcctacaggggaggcctggcggcactgcaccccaattcagcttcttggggtcctagcccccaccctcccattgggtttctggagtggctggggtgccctgcacacaacctgctcttgtttctctttagtccccgcaatgcccgctgcccagggctgcctcccgacctgtaggagaaggtctccaggccctaggccagcagatgtactcctgttgtgtcaggaccccagcctcccccgactgcccacacccgctggcctgacaaagaggaatggggagcccggacaacttgtgaatgaaaaagcttctcacctacttgccaggggcctacccccttcccaggctggtggggaggtgaggcccatccccctcatccctggcttctcctcggccacagctgtccatggggtactcccggctgtgggtggtgcaggggttgggagctgggaggccgaggcctgtgcttccctcgggcctgtgcacccggccgcaccatccgtaacgcgggcttatgagcgtgcctggctgctgggtggcctgacgggtggacaccgaatgggccactctcttctctgctggtagaggatggaggcccaaggtggaggtgctgtcggcacagctggggcagaccaggggagaccccctatccagggatcccctcctcccctcccaggccgcccctccgcaaaatgctgaggactggcccccgggcctgggctacatgggccattacttctggcctggggcccacaggcagagatgccaatggaggcacacaggcagtcgcacccgcacccgatcagcaccaggcctgaggccttcgggcctccctatgccccaccccacccccacccaccaggagcagaggacgtcgtggtgggcagagtcctcagcctgggagctgcacagccccgcgcttccttctatggaaaatctgctcctccaggctgcctggctgctgttacataaacatctctgctgcctccaggcgcctcctctcctggggcgctgaccccaagatgttaccccaggcctgcagaagtgaggccagattctgggaggacgcaggcgagggaggctcccagcagcagctacaggggcgggacaggccgcctgcactggctgtttccagagtgctcagcatttggcaagaggtgtgccaggaaaggcttgctggggtcaggtgtgagatttgtcctgctttctgtgcctgcctctgccaccatgctctggggtttctgcagccctccccccaggcccccacagtcctaggtccctcccagcctttcggtctccccgcagggcaggcttagccctcctactccaggaggggcgccgggacacgcgccttctgccatcgcactcaccaccctgtgttggggtggggagggggcgctgtctgtccctggcacgaggccgtgaactttgcgcagggactatggcaggcattttggactcctggcgcttaaccaggcttggcacagggtgcccgtgcctggcatcgtggtggagaaataaatcagccggaaggagcacgtgggaagggctgcgccggcgccagcggcagatccgcccgacccgtttgtgctttctggggccaccttaggcaggcggcgcccgggcaggaggaggacggtgaccgaggagcgtgtcgacgcgggtcccccttgggggagcggggcacaatccgtccgcgaggcactggtcccggctgctccctcggggcgcccggagtcccctgcccagaggccgcggcgcccccatccctcgcggtcaagtgctcgggcaatcacggccagggatgtctggcggcgatcgatcctctggacgcctaaagccgcggccacggggccctcgggagggagtgaagccgctgggctaggggcgcacacacggctaggccactctcccagagccctgccccgggcccggggtcccccaacgtggcctcagctgctccccgcccggcccagcgcacggtgcacacggctgtccgcggcctcgccctccccattccgccccgggctcctccgcttattcacatgcaaatttcagtcgccagttgtcgccgagcgcggcaaccgccagagccggatccttccgcagccccggctcaaacttttggcctctgaaaactttcaaacgagaagtagtcccaggcgcccgctcccgacccacgccgcgccgccgggtccctcctccccggagaggctgggctcgggacgcgcggctcagctcggggaggcgcaaaggcggacggggcgtgcgggaggaggtggccgcggagggggcggggggaccggcgggggtggggccgggcggggcggggccggcgggggcggagcgcacctcgactctgagcctcactagtgcctcggccgcgggagggagcgcaagggcgcggggcgcggggcgcgggcgcgggcgcgagcgcagcgaaggaacgagccgggcgcggagccgggcccgggggcctgcgagagcacagcgccgccagccagccggggaagagagggcgggaccgtccgccgccgccccgggaccgtacgccgcgcgtgtgcgtcccagcccc

SEQ ID NO: 1883617 - DNA, 4001 bp, Homo sapiens
tcatcctcaggctcctcagctaggaggtggatggtgatgtgaccatgggtgtccggggtagagtcggtcagccagtaatgctcacacagcacctgggaccagaaggttggagaggggaagggcggctgtgggcccagccctatcactgccgccccctgctttactcagtcccacccctccctgcccacctttctggtccctgccaccctgctgggattctgctctctgtaatgacccagctccaaggcttcctcctccaggagctgctctcccttgcctgggctccggcacccttgccctcagacctctcatgactctcaggattctgagtcagccacaaggttcctgtgccaaacagaacagcccttattccgcggccagcggccctgggctcactgctccagcaagaggacagactcggcagcctctctgcatgtcctagggccctgcatctgccaggcttatcgaaaggaaggatccctgatggtacctttgacaccggccctgggcagtccctaccccttgatgccttctctgcccagggcaagaagcccgtagaaacaaagccaagctgggagtttacatacctgtttcctcccactgcctccccatcccaggtctgggtgggaggtgggtccactaccctccaggcctgattggcctcactccagtctgccccgccttcccacgggaagatgccaacggggccatccccacaaggagaacgtgcgccacctggtggcctttctaggagcctgcaaggcgcactcaccctcccgttctccatgctgatggtcggcatgatgatgatgcggacctgctgctcccgcaccagccgccagaagttctccagtgttttcttgagaggcccctgagaggcaatgaactcctgtgggcgggtgtagccctggggtgtaggaggcagagatcaggaacatggttaacgggcaatgcttggtgtcaagcacacagcagatttccaacatttgacctccaggagtgaggatgctgtgcacacacctacatgtgtgcacacacaagaacacgtgtgcacccagaatgcaaaccagaagggctgacttcagagacatcacccccgtccctgtcccaccccaaagggacaagaaaaaccccaatgaaaacaagatactgacatgagttaaatagcccatctaggccaccctcttcacccacccagagttaccttcctaaaaccaaactgcgtttcttccatgctcaaaaatcttctatggctcccaattgcccaccaaatagagtccaaagccctcagcctaacaatcaagccctccttcattcagcccattcagccccaggctatctttcccattacatctcccaccacccagcacctccccactccctcacccctacgcaccccccaccacacacacacacacacacacacacacacacacacacacacacactctcacacactgcctgaacgttactgcctggctgttctctggctgcttcttccagtcaacagaatgtccttccctctttcatcacttatcaaaatgttactcatccttcaataaatcaaatgtcccctcctctgggaagcctttcttgattcctcaggtggatgaaatttccccttcctccatgtgccctgagtagtgttttttcctctattacagcccttgtcacagtgtgtggtgaatgtcacacacatgcctacatgctcctttgaaggtggggaatgtggctaacagctctgcctcctgcaggcccagcacagagcccagcacacagtagacccttgctagacacctgctggattgagctcatgaagcccaagctggtgatctcctagagagctgttacagctaatgaaggcaagtgtggcctgcaaaccagcccatctcccgagcagatcccagatcccatggacagcctcaccggtggcccttactgggaccaagttggcattgatgtagtcagaatgaggctctccctccagctgggtcagcctgaccctggagtggtcatctgcagagagtgaaagctgtgcattcagggttgggcacatgaagccccctgctcccatgccaagccctagccctctgccatgcctcctttcctgcccccagcactcacagggtagcacatgtggttaacagttcttggtggtgttggcagggtactcagcctccagtctgggctgctccttgctcacctccttcagctcctgcagggatcaagggcaggcactggttgctgaagtagaccgatctcaccccatgccaggaaaggggcagtgggggcaagtgtgcaactgggagttccctccagaccttcagacaggtcccagtcttccctcctctgagctcacgggtggtaaaggcctcacctcgaatttcaaaaagaaagcctggtgcgcatgagcactcttggcctcatagttctgcctgaggccacaacgaccacaggcttatgtaacaacactcaatcccatttcaattactgaaagccttctcaaaaaggatggatacaaacactccagactacaaagattgaaataaatacctaactcttcaatgctcagatatcattgaacatccacaagaatcaagagcatccaggaaaacatgatctcaccaaatggactaaataaggcaccagtgaccaattctggagtgattaaattatatgaccactcagacagagaattcaaaatacccatcttgaggaagcccaacaacttcaagataacacagactaggaattcagaattctatcagattaatttaatgaagaattaacatttaaaaatcaagcagaggccaggcacagtggtgcacgcctgtaatcccatcactttgggaggctaaggtgggcggattacttgaggtcaggagttccacaccagcctggccaacatggggtttagtagaaaccctatctctactaaaaatacaaaaaattagctgggtgtggtggtgcatgcctgtagtcccagctactcagaatgctgagacaggagaattgcttgaacctgggaggcagaggttgaagtgagctgagattgcaccattgcacgccagcctgggcaacagagtgagaatctagcagaaattctggggcttagaaactcaattgacaatctgaaaaatgaatcataatctctcaacagtagaattgatcaagtggcagaatgaatcagtagattaaaagacaggttatatgaaagcacacagtccaaggagaaaaaagcaaaaataaataaaagagaaggaagcactattacaagatctagaaaataaactcaaaagggcaagtctagtaactactggtcttaaataggacgtagatggagagactggggtagaaagtttattcaaataaacaataacagagaaccttccaaacttagagaaagacatgaatacctaggaacatgaagatcaagaatacttagaatattcaagccaaataaaattacctcaaagtatacaataagcaaactctcaaaggtcaaagataaagaaaggatcctaaaagcagcaagagaaaagaagcaaataacataaaaaggagctccaacacacttggcagcagacttctcagtggtaaccttaccagcctgaggaaatagaatgacattcaaagtatcaaaggaagaaaaactttggactagaatattatacccagcaaaattatccttcaacataagaagaaataaagactttctcagacaacaaaagctaagggattttgtcaacaccagacctgttttacaagaagttcttcaatatgaaagaaaagggcattaatgagtaacaagaaagcaactgaagatataaaacacactggtaaacttaagtacacagacaaatacagaatagcctaatactgtaattgcattatttaaaccactcatatcattagtaggaagactaaaagacaaatctatcaaaaacaataatgacggccaggtgtggtggctcacacctgtaatcccagcactctgggag

SEQ ID NO: 1883618 - DNA, 4001 bp, Homo sapiens
gtctgccgttgtctctggtggctgtatgatgttccggagggaatgtcgttctaagcgatgccttgctgaacaccccctgcgctctccttgcaggtgtcgagtgatactcacttgatactctgagtgtggccaacatgcggggctcaggtggcttactgcttttccttccaaaggccgactgtggtgaccttgctgaagacagatcatccgtctcagggtctggagtcggggtcccacactgcttgccgtgagaggtcagggggcggtgctggcctctgagcagccccgtggcactgagggctggcccaggtgctctcacagggcgacctcctgacgcccgtgctcaccgtggccctcgctcctaatcccaccctcaggttctgaggcaggaagcagttcccacacttggctactgggaaggaaggttgtgtgggggggcagaggcttcctgtgtgacctggagctgatctttcccgcccctgcaggtgcagcagtaccgcgtcgccatgactgccaaggactgctccatcatgattgcactgtctccctgtctgcaggatgccaggtgaggcccccactgcaaggcatgcagcctgggtctaacggggttttatggacagttggtgaattgttaataggatagttggtttccccatatttagagactccatggcggagtgacataacttccttggcctatgtgacatcatggggcttactaactctcgccctctagaagcttgtaattcagtcaaaagacagatttatggagaataacttaaaaggattgttagtacattgaaagttactgttttctaagaaaatactcccaagagctcagaaacaatgtggacagtgagctgcccattgcattccctcaaagaaagccagcccctgagatgtgtgggtacctgtggcccttgttcctcggtctcccacagtggcagcatggcgcacctgcctttttaccaccacagtcatttgaaagcctgtgaggcgcgcattcattctgcttcctcttctgaataaccagcctatgtgccgcccctctccctaatgtcactagttttgtccagtcccctctgtttctgggaattcgggatgaaactgataatctcatagtcgttagacagcatctccatcaccgatcttcaggggtgctaaaccctgcacccagtatttgcggaatgttccacattcttctaacatgtgttcctgggtcaagatgaccttggttgctggctgccagccactcactttcccggtgcttttgaactaaacagttcccaggattcctgttccctggcaggcacagaattgtttactttccaatatgaaatactgaggaacattatagggctaactgaagtagaaaaaaggttgttctatttagttgaaaactcctgttatcccctaaggaaatacctacagggctaagttatgaggaattccttaactggattaagctggtggtgttcgatgagagaaaacccacgaagataccactgttcagcagccccccgaccaaggatgcagctgggcaatggaaatgtgcttggatgcagggtgcccttaggtgggctgtgaaaggccgctgaaggacagacatgttactcacctcgtctagcacctgggaatctcttagtgcctggtcagtgatgtcaaattggaaagccagcatgcggggaaagctgaaggcccgggtccttacgaccagctgctcagcagaaacgacactaggaggggaggggagggcatgtcctgaaggcactgagccatgtggcttctcagacctagggtgtaggcactggaaccatcctgcacaaagcactctagccaggcctttctcaacaaaaggagaggatctcagagaaggcttctcctccgagaacatggcgtgtggggctgggcctgcttccaggaaggtgtgcgcagtggccgcacctgtgaagttccagtaactgtggtgctctagaggcctagggacaaactaaggctgggatttatcatgagtcatcttggcgtcttgagatacctggtagacctgagactaaatttagatccctagactaatttgcagctcacagatagattgaccacatttaaacttcttacaccccctaaaataaaggcttctccagctctgcactactgtttctgccctgtcataaaggaaaatgtctcaagttggatctgccttcctgtcgctgcagagctttgtccctttgggaatttggaactgtggagagagctgccacagcttcccggcctaaaccctgatgctcctctcgacctcccatttgaaacacagtgtgcggccttggcttctccaccccgatccccagcacccttggaggctgctggtcccccggtaacccccagcgggtcagtgtcctggagaacggccttccaggcaagggctgcccccctgcagccagaaggccacctgagcctcattctccaaggctgctagagggcacacttgtggcacaagggacaggtgtgtccctggggcctcttgcccagtcttggcctccggggtactgagggggaagaagagcatttctgtgtcaggagctggtgcccgctggtcactgccattggttcccatggagctagcttgtggttgacccaggtagtcagaccctccccgggagctgcctggaacatccttcctgtctttacacccatggtcttgtcaggtgctgcttctgagaaattggggtgtcctttaaaatacgtaaccctagtcatgggctggggatgtgactgttccagcccaggtgcacccagcttgggtctcaggcctcagaactgagcagtaccttgggcttctgaggttctcccaataaaatgtggccccttgggatgagctgcaggcacactccagcttctggagcgagactcatgaccttaatttgtaaatgagttatttgctgtttactcttcagatgagaatagttacttaccccagcagcttagtcagggatttgttttttctacaaacaggattctggggcagggcagcagtgagcgccaaggccatggtgagcagcgtcagagcagggacgtgctgatcagtatttcctctcctcggcaggagcttttgaagttggggtttggcttgttgatttctaaatctcaaagcgtagtaaacattgggacaccagaacccaggatacttctcttggactgaactgagcttaggtcacttgtttagccagtgtcttgagtgctgtgcgctgagtgcccggagacgaaaagcgggacacacagcagtcagagctcaggactcggagtaatcctaaatgtgtttttcagggcaaataattaatcacatcttgttataagcacacgacttctgaggttaaaaccacaaaactaagccctgagaagcaaaatacaaaggactgaagataaaatttgagaataaaatgagaaaccagatctcttcaaatgtgaaccaaaggagcttgcgtttctcagcagacaggagaggcaaagaagaaggcttgtcgacattccatccatttggcgctggaatggccagatctactttttactttttgttgggttttgtaatacttggctcatgataaagtgatttttcagcgttcgtttataccactgggctgggggaacatcgctcacatgttccacataattacttttccatctttcagtcctttaaccctctctcgcctggtatggtggggtgcactggcctgaggaagctttgcacgctggtgcacacagccggcacagacagctgtcacacgcacagatcacaggtgcacagaacgagtgctctttgtgagctggggtgtgaggccattcacttctcttttaaaagagattgatttatctaactttgcagaagtcaaagaaaaaacataaaaacatactagttgaaagaagaaagggagagagaacgggagggagggaaatgaatggggggcttgtgtatcctgaaatggtactttttacttgcagctctgatc

SEQ ID NO: 1883619 - DNA, 4001 bp, Homo sapiens
cagggctggagggtgtagggttggagaactggaggctggagggctggaggctgtagggctggagaactggaggctggaggctgctgggctggaggctggagggctgtagaactggaggctggagggctggaggctggagggctgcagaactggaggctggagggctggagagctggagactagaggctgcagggctgcaggctggaggttggaaggctggagggctggagcctagaggctgtagggctggaaggctggaggctggagggttggaggtctggggggttggaagctggaggctggagggctggagaactgaaggctagaggctgcaaggctggaaggttggaggctggagggcgggagggttggagactggaggctggagggctggatggttggagggtggaggctggaggctgcagggctggaaggctggaggctggagggttggaggctggaggctggagggctggatggttggagggtggaggctgaggctggaggtttggaggctggaggctgaggctggagggttggaggctggaggctggaggctggagggctggcggccctaacgggagccgcctcaatgcagcttcttgggccctggtacgtgcttgcggtggcctcccgggaaaagggctttgccatggagaaggacatgaagaacgtcgtgggggtggtggtgaccctcactccagaaaacaacctgcggacgctgtcctctcagcacgggtgagtgggcgggtcctgccaggccttcccgcaggcaggactgtggctcagccacatcatgtactttgcacatctgctcccgggcaccgcggcctgggggcttcccacggcccctctgcacccccgtcacttttcccactgggctctgtgcagagccaccagccctctgcccagctactcacatctgtgtccctggggcctccaggtggcactcccaccttcaataccgcggcgggcactgctctgactatgctccttcatgcatccctgtcctgggtcatctgggctgcaggctgtggtcagagctggggaagcctgtcctctcagcaggcctttttcgggaattctgtttaaaggaggataatgcattcggacctaagaaccactggttctttcataacataaatccccaaacaatatggtcatggacgctgttggccagactggccttgtggcctcaggcaggcgcacccgaccacatgcatggctggtggcggcgtgcaggggtcgggtgggccaggctgtggggcggccgtgctacacaggggacacctacagggcagccgggctgtgggggtagccgtgctggggcaggagtcggtgcccgcctcccttcacagaagagtggcctgctgggtggcgtggtgggtgtctaccccctggcaggctggcgacagagcccaggcctgaaccactgagccaggtacggggcccagagagaagaacctgccctcctcaccagcgtgccttccccctgcacctgcgcctgcagggtatgggcaggggccccactgcaccccccgggccaggcctggcctcagggcgagctgggaccaaggggctccaggctgaggtggcagctcccacgtggctttcctagttcttcttgctgttcctcccgcatggactcagcctcagtttccttccttggcaaacaccattgcacctttgctgggttttgctcactctggggactgaccacttagggagcgccggccccttcccccgagtcgcaggcaaacccccaccccgccccatccttcccctgagtcgcaggcgaacccccaccccaccccatccttcccctgagtcacgggcgaacccccaccccgccccatccttcccctgagttgcgggcgaacccccaccccgccccatccttcccctgagtcacgggcgaacccccaccccaccccatctttcccccgagtcgcgggcgaacctcccgtctgtcgagtctcctgttgtgtcctcagcagcattcagcgttcctggtggagatctggcactgaggatctctcaggaagtgaatgggagtgtccgcccctctcaggactcccacgccgtccactctccgagaacaggtttccgggcatcggggcatctggcagaagatggaagctctggcctcactgctggctggcctggcctggactcctgagctccgtctcctctcaccgggccccggggtcttgaccctgagtgggtgacaggccccttcttttccaggctgggagggtgtgaccagagtgtcatggacctgataaagcgaaactccggatgggtgtttgagaatccctgtgagtctgacggccacggcctcacccaggccgttcttccctgcagcatccccaggccccctgcgggcagggacggagggctgactccgctcccgagagccaggaggctacaggttctggtcttgggattgctgcccatcctgagggtgaagagaagcccctggacagaggattggaaccttgttcccagcaggctcagacaccagtgaggtccagccaaggtccccataggtgcagagggcgaggggcctgtttagtggctgtctacaggtacagggctgggctggtgtgacccagccgctcctcgttcacacctgggacaggctggggcagtgcttgtctgtctgtccgtcagtgtctgaaagccccttgatgctggcaccaggtggggtcgggggtgggggacaaagcttgggggctctgggtgtgcttggaggggtctcctggggaggggggctctcacttgaattggcccctctgtccctgtggccagcatcagctcagcggcccctggatggatacagcagctgccctcccctgaggcggggggttttgtttcctagcaataggcgtgctggagctctgggtgctggccaccaacttcagagactatgccatcatcttcactcagctggagttcggggacgagcccttcaacaccgtggagctgtacagtaagtgtgctgtgcggggcccacgtagggagctgtgtggtgcgtgggccactcggggcccacgttgggagctgtgtggtgcgtgggccgcttgggggccgcgtggggagctgtgtggtgagtgggccgctcgggggccatgtggggagctgtgtggtgagtgggccgcttggggccacatggggagctgtgtggtgagtgggccgctcgggggccatgtggggagctgtgtggtgggtgggccgcacaggaccacatgcaggccaagttcccccaccttgaggctcgctgcactggaggtggctttggaaggaccggggccagcatcccagggcaggtggcctccttcctgacccttcccagcccctccccggcccctccccagctctcagaggttgcttccccctgcactgccctggtgcccccaggtctgacggagacagccagccaggaggccatggggctcttcaccaagtggagcaggagcctgggcttcctgtcacagtagcaggcccagctgcagaaggaccgtgagtgtccaccggagcagcctcgggggaggcttggggcaagttctggagcccacagggcgtgatggggtgacagagaccctggggttgattctggcttctgcctgactcagtcgccctgaaggagtcaggcaggctgagggggtcttcacctgcccctgcccaaagtcaggcctgggggtcttgtccccacggcaggcgagtcttgtgggtggggccctggggtgctggggggctcagtcctttttcacagccagtcttgcctccccttctagtcacctgtgctcacaagatccttctggtaagccgccatcctgagcctcaccctgggctctcttgggggaagggggtgggggaggccaccctacgcacagtgggtgggaggaccctctgcccaagcccacggggttcatggctccactgtctctaaggcagctgagggtgtggaggagcctccatggtgggctgggccccctcac

SEQ ID NO: 1883620 - DNA, 4001 bp, Homo sapiens
ctggccagggtcctgggcgaggactctgaaagccacgtctgggccagtgagaagtggttgcctagggaacctgtgctgagcgcaggagtcctcatccacagggagtgcagcagtggcacatcctacttcctgggacatgggctgctccacttgtaaacagaggctctaaacacccaagaacaaaagaaaaccgccttgcggctgcttgggaagaatcagcaaggcgacccagaagctgctgggcgtgtggtgggtgtgcagtaacctgcagggagcctgctccccatcggtgtcctggggccaagggcagcaagtgtccaagctccctggactctgttgtcttctttgccagtgactgaagatgggggcactgcctgagttaggggagcccttcccagggtggatgctagggtgcgggcagggcgataggcctgaggaagcatcccgtgccatgcgccagtgggccttgcctggcaagtccctgctgcctgtctgcccgcagccctccagcacacggtcttgcagtccactggcacgtaaggcggaagctctgaatgcatgccgcaaaaatcgggcactgtcaccacagtggtgaggaggctcttgtgtgtccaagcctcccggagacactgaggggtggttcagaggagtcaggcacacagaggccacgtgggactttggctctaagactgcacgctgccaccaaggttccagcgtgtgagggatgaggggcatcctcaaactgatggggtggggacacattgttcaaaggtacttttgcttggattctttaagagggtgggggtcgggggaggcttggcagcataaaggcaggccgctctgggctgaccgtgctcctgacctggatgcagaactgtggaagttgccctccttgttctgcttcctgctccctcttttagcccgtgtgtccaggggagaggatgggtgttccgggagcacaaggccatggcacagccagcagccttctggcagttcctgaaggacagcaagtttgacagagatattaccccagctggggctagagcagaggaacagttggttgtgtgctgccatttgacagtatcctaattcctgacccactgtgagcattaacagcccaaatacatatcttctagacagtctggtgctcaaagaaacctctgccagattcactccaggaagaaggtgttgggtgtgtcctagtggggacccactgtgtccctgaaagggacagttaacttttcttgagacttgagagtggtctgaaatgacaagcccagagtctggctgcacattttttttacactgtttatgcttccagatgtttgtgcagtgtctaaggtaacagttaagtcattcttgttgctgcacggaagagcaatcatgcccttctcttgtgtaatgatgggatttgcttcctgctgtccctgaacagtattgtagggaggttgaagattgatgtcaagggaccaagtgcttcccagcacttgtggggatggtggggtggggggagagtcacgtgtccaccaagggccaggtgccgtgttcactaatgacactctttgcctcccaggcacccccattttgcagcacttgagaactgaggaagttgaatcccccaagatcacagagctgggatcgggagagccaagattccagtccagcctgctcactgcgttgcctgaatatttattttcactgtcttctgccctctggcaccttgaggagaatcctaactctgtgcttttgtttttctcttactaggcttggccggtacaggtgtgagaaagggactactgcagtcctcactgagaaaatcactcctctggagattgaggtgctggaagaaacagtccaaacaatggacacttcctgaatggcatcagtgggtggctggccgcggttctggaaggtggtgagcattgaggcccagtaagacactcatgtggctagtgtttgccgaatgaaactcaactcaataaaaaacaaaaaccaaattgggcagctgaggtctgggcactgtgtggtgtttttgggggcagtagggggctgctaaggccattggcctggcccttcagggtgctgatcctccttgagcactggcctaggctcagaggagagcgtaggagccatgcgcccctcctgaggacagataggttctgtctgctgtcagaagtcagagtggactcccttgaggcttcaggtgaccatcgatacctaccctttttgctggctgaatttgtttggggtggcctcaggtttggtttggttttgaaatggggtgataagtgcagcacaccctccacctcagcagccaagtaggaaaaaaatggcaaagccaaagctgtgttctcaagcccagctcagttctgagaaccaagagaaggtgagcaggtgcaccgccagagctgtgtgaaggtgggtggacctcactttggccggtttcacagaaataaaaggaatgttttggggttacggttttgtaataagtaggacatgatcatttcacaaacactcaggcctggtgagtggctgagatcgtgcgcctccagagggtccagttgggcagattgttctcacagtgtggaaagcgggtggcatgcacaaagtaggttgattgcgtgctggggctggcagtgttggggagacacggcaggggctcagagagctggaagcagaatgttggcaaaaagttggtctggaatcagaaaaatcttcagtggtaagcactaggcaggcgacagggacttgattgttctgtggagagaacattccagggtgaatctgctctcaggccagctcctgtgttacagctgccaggggcaggctggggagaacgatggaattacctcatgagggcagaaactcggctgatgatgagtttcaaaattatttggggagcttaaagaaatcctgggattactgaatggggcctgggaagttgtgtttttcaaggttcctcaagaaattgtgctgcagacgctgtttaagttttgaatctactggtttaaaagcaaaatctccaaagccattttaaaatcttcatgaattctaagtaactcccagtcaccctgttttatttcaaccatggagaaaagtacagaggaaaggctgcatatggagagactgtcgggctgacggtgtcacagcagatccgagtccacgtgtggaaacagcagccgcccggccctgggtgtttcctccaggaaaggcctggtcagtgaatgcctgcaggcagcaggtgtcaggaatcacctgcccgatgccagcgctgctcttgtctggagggccagactgtcatgaagtcagtgacgacagctcagacaattggaaggttaactttacgtacaaaaacaaaattcaaatgatttccttcagaggtggagttttcttaggttcacatttataaattagtcttcacagttaatcctgtttgggaacaagaaataaggaacacatttctggtttcctacacatgatacaggtgtacattaattctcgacttccgtggtccatggacttcagtttgtgaagggtgagtggctaccatttttggatcatctactttttgtattagctaacttgcatattttatttcaaattctgtctgtcagcaatcctgaaggtagatgataggtactattaatctcattgtacagatgaggaaatgaaggctcagaacggctaagaaacttgcccaagcccaaagtcacgctaggaagttgcagaaccagaatttgtaaaggacagcccttcgcttttctatatcccatgcttccttcccatggaggaaaatgcttaacactgatcatgaaatgaaccgccagcattcaaggaggtgacgaagttcctggtacacagcaggtgtccaggagaagatggcccagcctggctgccaagaagatgctcctgcttcccgatgccttttgcctgtgacactctggccaggtgcagggctctcatcgtcactcaccaagttataaaacgtagataaaaatgtt

SEQ ID NO: 1883621 - DNA, 4001 bp, Homo sapiens
aggaagagattaacatagtaacgaagcaaagcaaggaggagaaacaaaaccgtctgtactcaacaagagggtgccccgcccagcctcagctcctctagccaacaggagagctgccacccaggtaacccggttcttgggttcacccaggtaacaggctgttctcgggttcgcccaggtaacagggttctcgggttcacccaggtaacaggctgttctcaggttcacccaggtaacaggtttctcagtttcactcaggtaacagggctgttctaaggttcacccaggtaacgggctgttcacgggttcgcccaggtaacagggctgttctaagattcacccaggtgacaggctgttctcaggttcacctgtataatagggctgttcccagcttaccttggtaacagaactaacctcaggttcatccaagtaacaggctgttctggtgctcacccaggtaatagggctgttcttaggttcatccaggtaacagctgttcttgtgctcacctgggtaacagggatgccctgctaatgccagggaggaaagccagactcttgggtagaaagaatctgatagcagcctggctctctttgcctctgttaagcatcactgtgttcaatctccatttttagaactccacattaaaaggtcaagtgccttctaaagtatttattttctctccagtgtttgtgccctgattgaaatgacagcaccatgctgcttccctcgcacccacatcaagcttgatccacttggcacaggttattttttacccgaatggccaaagaagcctgaaattcacagcatttggggttctgttttttcttaatctggctgtaaccctgactcctagagccacaaaaacacgtggccactcagaaaaagcacaggtgtccttcctcccatggccagattggtggaatgcacctgccaagtcttcacccccatgggctttacctctgaacatatgatcttgctaaagtaaacccagctctgcccacctgtaggaccccaccatcccagaggtggccttccggagccctgcctgagggcttgcagaaagctcacggcgtggatgtctggattgctggcaggccttctccctgatctggctgtgtcttgtcgcctcttgctctgggcttcctggccagtcactgtgtcacagaactccatgaacttctctcccgctgtagctctccagaacagcccaaggcgtggccacacttcaccttggattccccacaacagagaatatcaggctccagtgttccaggtccagcttcccaggggctcctgggaaccaggcaagaaatcacaactctgaggagaaagccaaaccctgtttatcaaagatccctgtgtccttgtctattggccaggccccaggactggtgtcccctctccagagtccaggcctcctttctccaggggcctcatttccagagcaggcagggtacaggcactgttggattcacccgcacagctctgagagtgggcttggcccatttgcggaaccccgaaccagggatgccaaggttctgtgcactccaggctgctcaaccccaaactccagaagcaggtgaaaagagaatgtggctggaacgctcttctagcaaggtcctcgagttcttggaccagaaagacaaaacccttctcccatgggaaaaacagacttctaaccctagagcacacaaaaccaactcgcaccattaagcccagccattcacattctttttcgcaactctccaccttcccaagggcaaagcaaagccttctttccaagacaagtcccatctctcaccccaaaagaagagcaggggtagttgacggtgaaaactcataacagataagtgaagaacttcgtcctcacatcagccctgggggcagaattcccggcccagcacagagcccatccgggtaggagggacagcggcctgcgtgacgtggttgtcagagacagcctcgtgcttccatatcgccacccgcagagcacaacagttcagtctgcgatttcaactccagaccgtattgacagaagcaaagaaaacaacagctaaaaccagaaggtctcaccagggagcctatgttaaaaataaaaataaataaaatacttggaacattcttttctgcaggaacatctactcccttttctacttaatcctggcctcctttcttctctccctcttttcctaatgagcccctctggctgctgcccagcgtggtggctcctcctccccccatgcccactgctactgtgtcctgggcctgccctgggaccgcccaaccctgtcgagtgcaccctgcctgcagtaccctctgggccctacccagtggccaccaccgctaagatgatcaggcaagttgggaatgacaagtatgctgtgcctggtgtcttacggaagactgcaaaacccaaaacaagcgctctccttgcccaggagggttactctcttctcctaaagagtttgctctcccactctccggagcaaccattgcacaaagcctctgtcctcagcctcacagcgccccccccaccaccacccacaagctgcccttcagggagaaaaccaaagccagcaggcagtggctgtcttgtccatcatcggcccccaacccctgacttctgggcttccatgcaccaggcacctctggacacagtgaagcagagcagccctttctccaggtgctgaactctgcatcccccaccaccatcttctcagagatgcctcttttcctgcaccattgtgtcccctctctaccagaccattccaatagcaagaaaacatgctttatgttggtcttttaaattttcattttgtattgaccccgcattttcccccaccaatagccctattttgccattacctgttatgcaccaaacagtgctgtctgcagatgctatctgtgctatctctgcttccagctcctgcacggccatcccccatccccatactgccccctccaccctctggaatggctggtcaaggtcatgaagaacctccagtggcctctcactgagttggtggatggatgcaaaatgtattttgaaatgagaaggtgaagactgcaggacaatgtgagggtttattgtatgtggaaggcaaggaaaagagcagaatcaagggcaagggctgcctgttgggcttgagtcatttactgagatggaaaagtctaggaaggagcaagtttggaagcttgggggtaaattaagtctctttttggccacattaaatatgagatcctgattggattttcaaatagcagtgtcaagatggcagttggggccaagtgcagggtctcatgcctgtaattttaatgcattggtaggccaaggcaggaagatcacttaagtccagcagtttgagaccagcctgggcaacatagtgagactccatctctacaaaaaattttaaaattagccaggcatggtggcgtaagcctgtggtcacagctacttgggaggattcctggagtccacgaggtcaaggctgcagggagctgtgatcatgccactacactccagcctgggtaacaaagtgagaccctgtctctaaagaaaaaaaaaaaaaaaaaggaaggcagttagtcatgtgcttggtgctcaaggagaggccagtatgcagacacatacctggagctattggcactaagatgacatttaaggacaaggaactggacaggagtctctggagaagccaagacctaagcccctcagggctccacagcctgtaaggatgaaacagagagaaggggttgtggggagagaccaaagcaggaggaaaacaggagggcgtgttatccaggagtccactaaagagtgggctcagatgctgcaagagatgagttaactcagaagagggcctttgtgtttgtcagcaaagccacatcagctgcaacctttcaaagccagggacgatatagtgtcttagtctgctttgtgctgctctaatagaatatcacagactgagtaattttataatcaacaggaatttattggcttg

SEQ ID NO: 1883622 - DNA, 4001 bp, Homo sapiens
aacacacacacacactcaatactcatggagttccctacatgccctaaatatacctgcgattaactaacacgccacaaatatgcaaacatgccacctcatatccccaaatacacatccagtcccacaatacctgcacatatgtaatcacacctctaaatgctcacacagaaataactcctccattttccaagacacagaatcatacaaagtccacctcacaactgcacacattcattctaccagtcccccaatagtcatggatctgccctcacacattgaaatggccatacacaacccctgaaaatcgtgaaaagaaacacacacaatgatgcaacatatcctaagcacacaaatggtcttcctacattccccaaatatgtaaaccacagtgtacatccacaaaaatagacacaagcactttctctattattgcccacatgcacaacaaggtaattcttccagatctgccaaacattagacaaatacaaatccccaacattcatttcagaaaacttatggaaaatacatcttcacaacccaaatcacaaatatcgaaccccaattcttcttgtatacacatattacacctcatatcctccaaatataaacactcacacctacacactctcacaaaagcagttatgaatagttatgaatgaccttctttacttttcctttttttttttgagatggagtctcgctcctaccttgaagtgcagtggcgtgatctcctctcactgcagcctctgcctcctgggttcaagcaattctcctgtctcatcctcccgagtagctgggactacaagtgcatgccaccacgcctggctaatttttgtatttttagtacagatggcgttttgccaagttggccaggctggtcttgaactcctgacctgaagtgatccgcccacctcagcctcccaaagtgctgggattacaggcatgagccaccatgcccagcccaattatgaccttctttaatctgcaatctccacacagacaccaccaacccacacaggtgaatacatattagattctcacgaattaaatacgcaacaaattccaaactaagcattcatataaacacattttcacatacacacagccacccccacaaatctcacaccccccaaaatgcaaaacaaatctttctcacattctcaagtacacacactgaccaactgcccaggacacacacgtgtgtgcagtaaattttagatataatacatgtgtagtctacaatttacaaataataatatacactactttttatttaaattccacataagtaagcgattctcatagaagcttttcttgactttggccacactcttgcttccacaaccaacttgtgctaccaagtgaacagactatgagtaaaggcctcttcttccactttgcagctgctcatatcattgacaaacgagcatattagagcatgcatgctggctgatcattctgattaaggcaacaagcttcacaactcactcaatgaggtcgtccgtgagaacttcactgattttacgaggacaggagctacttctttgctgaaatgcatcacggtttcaactgctgaggttttcctcaaccttttgcattgtttggaatgtgagcagcacggccgagacaaactttggggttcccactgcattgttaaacctcccccttcacttcaaggccaggcgagcaagggaaaggagcgcggcctgggcgtcccgcagggccccgctaaggaccgctcccgccttgagcgcagccacaggccctctctggccacaaggatggggtcgccccgcagacactgttgaccagcggaagcatgaccaggaggcgattaccttctaatcacaaataactttatttttaggtaacaccacggaggacgccatgagagctaaggccgttgggtaaccgccctttccgctcgcgctgcgtcgtctccctgccccgaaccaccggcaaccgatgctgggagcggttgagggcggccggctgcgcgctggaaccccgcccgcctcaaggctcctgcgcaggcgcgcagggcaggcgtggagcccgccctgggagggccccgcaggagatggggaaatggagggacgctgcaccagggcgcttcctggggccaggcgacgccttctccttggagcctccaagaccgtccctcctagaaacgagagagtctgaccgggcgcggtggctcacgcctgtaatcccagcacttttggaggctgaggcgggtagatcacctgaggttgggggttcgagaccagcctggccaatatggtgcaatcccgtctctaccaaaattacaaaaattagccaggcgtggtggcgcgcacttgtagtcccagttacttgggaggctgaggcagaattgcttgaacccaggaggcggaggctgcagtgagaggagatcacaccactgcacttcaaggtgggagcaagactccatctcaaaaaaaaaaaaaaaaaaagctagtacagaagcaactcactgacttgagtttgtagtagcttcagaacaaactttcatcatcagatcctttctgctcatttgcaggattcctaccgtctgtctccacgtgatgacactgaagagccttcacgtctatgacggcctagggtctcaagtgcagagactgagagctctgccagacacagcatggagccgccattcctctactgttcagtgattgggtggaagagcatctgtcctctgaacaggggatccaagccctgagatgatgtttctcagcagtcagtgtggcccaggactttctgtgggcatgctcagagagcaggggccagaggacttttagccaccaccttctatggccagtcttcacaaattacctttggctaatttgattgtctctcctcctggggtctaggacttcaaacacatacagaagcgattgcagaattgaaacaagacacttccacaatatactttttgtatcagtggctcagaaaaagactcattcaaatcctgtatcaaagccatgtgtgagcatcttgagaaagcattgactgactaacttgacaagggaggaagcaaacaagaattctgcccttcttcagtgcctgagtgtgatattttgcctcaacatccctcttagatgaagttactgattgaaaatcatttaagtttttgccccgtgataaaagatcgcgtcctcagaaagatctccaaagcatttactgtttgtttggtttggttttggtaagtttaccatgattttgcttgaattgctctccgctgatcttctcagctaagatcgaggtagagttgcacagcagaagagggctgcatgtaaggaggcagctctgtctcggaggacaaaaggcctgggagcatccagacaggcagtcactgtgtggaggtcactcccctcccagtggccactgtggaggcatttcatagaaatgctcgctggaccattcagttttagagttgggacaaaaccgagaactcatgaggatatcggataggagttaggaaatgactttttcacacaacccaggcaaggaggggagaaccctgggcttgagacttgcaatccactgcctgcccctgcagtgtggcccgttacgttttctgcaactctgccttcttgagtccaaatgtctttgaaaggggcaaatgcttcttaagtgccaacagggtgtgtttcagtgaatgttcacagtgtgcactggtccggctgaaggcctcttcccttccccaacacccacccatcagtgcaaaagactgctgcccagcagggagtgacatctgtgtctcagattttcttgctgtgctctgagtactcactcctcatctcctttgaccagtttcctaacactccccttgttcacaacacagaacatgagtgctctttcctgtcattttgacgctgataaacagcaattctgtgtgaaaatgagaatgaagatttttttaaagacaggctacaataattcccatgctgagaaccacatgtgatgacacttgtgatgaa

SEQ ID NO: 1883623 - DNA, 4001 bp, Homo sapiens
gtcagtttccccacttaaaaaattaggataacaacttaactcttaagtctattgtgaggattaagaggtaatatgtatcttcacacattgctggtggaaatgtaaaatggtgcagcatctacaggaaacagtttggggttcctcaaaaagttaaagagttaccatatgacccagcaattttactcctaagtatgtatacccaagggaaatgaaaacgtacacccacaaaaatacttacataagaatattcacactagcattagtcacaatagtcaaaaaggggaaacaatctaaatgttcatcaactgatgaatggatgaacaaaatattacatccatacaatggactacactacgcagccataaaaaggaacaagtgctacaacaatgatggacctcaagaatgttgtaagtgaaagaagccagatacaaaaggccacatgttacatgatttcttaggaaatattcagaataggcaatttcacatagatagcagactagtggttgccatggactaggagagggggaagatgggatgtgacagctttaatgggtaggaagagatttccttttgagatgacaaaaatgctgagcaactagacagtggtgaacctcttggatatatactaaaaaccactgactgtacaaaagggtgaattttataattatgaattacatcgcaataaaaaaataaaaacccaagagggatttgaaaaaagttaatgtgcaaaatgcctacaatttcttggcgcattgaaagtgctatataagcattaattatgattattacgataatcttaagatactcttgtctgcattttcatcataaagttttcagaagataactcaccactcctcacaggaaattcacagagtaaaaatctcacattcattcaggatatacctgccatttattctggcatcttcatgaggccagactcctcgagagggttctcaagggcagtggcttcagctcactccttgatactttctttccatctcgcctaacaatatcaaaacttctgtttatcacggaggccaggaggaaagctcaatatttgcatgtacagtcaacctcaggcaaatctgccagttaaaaaagaagcggggatatgaatgcacaggtatttttctcctaaagagctaataaattaccactacaacctcctcctcacatttggctcaatttatttactgcatgtatgttctctcatttaatcctcacagtcttctaaaggtataaaaaatggtctgaaagtataaatgtgtaaacggaggttcaaagatacttgatctcttaatgagtaaatggaagttcagacatattaaccaatttgccacaaattacaaaattagtaaatgacagagtgcaggttccagcccatatccctatcaaagtccatatacacctcaaccactgtgtgattcatcctggtttcactctacatattagcttagaaaaaaattaataatttttccaggaagagacaatggagaaaagaataattcctaataaaggaagttattataatgaactacaagatcagactaacgcagacccaccaggcagaggcctggagagatgcctcaagggacccaaactcgtgggtacggggtcacgggtcacccgcccgtctatcctgtttccagggtcgtccgcgcaggaggctgcccctctctgcacaggcgccaggaagggcggtccggcctccatccagcccagacagggtcagagcgaagcctgggaggccacgaagccggctctccgcatcacggcttccaccggattcgcgggggtggagtgcgtccgaaaagaactgaggaggctcccgccggagctgcaggacccagctcttcacctcggttcccttgagcacaagcttggtagacttcacataagaatactaggccatggctccgggagacttctgcgcggagaggctgaagccggctcaggaagagtatgtgacctggagcagcaccagggcggggaggaacagaagtggaggcgaagtaaacactccccgacagcgtaggtctgtccagaacccgcctccgtcttcacccaaacactgaatggctgagatttccacttccgggtttctgctggggagctatggcggctgcagagggccgaaaggtgtctgcgcgcatctgctccctggcgccctctcgaggagcccctgaggattcgtgcctcccagaggtggggaaagcccgcccgaggcgccggtgctgacggtggcggggctgccgggcacgctgtggaactgcctcccgctagagctgcgggctggcgacggtcccgtgggggcgggaagcggctcagggtgccctcgccggcctgcggcggcgcgtctgggagcgcaggccactcgtgcgcgggtcactcggggctgtgcctcgcgcgactgtgtgtgcaggaaacaaggaggaaataccctaaaatggaatgaagcgccatgttgagggccgcggatgtcgcgagtgctgtgggaatgtgggctgaggtggagagttatggtggaggaagctagtcctgtctgatggaggaaacagggcagaggcgtggagggagacgcacagtgctggtgtgaggagccgcgagcaggccaggcctgtaaagcagcgtgatgggaaccaggatagagaaggcaagtcggggtcctgtggtcgctgaagaatttgaatgaaatcagtaaacaggtgagagggatccatcgcaagagcatgggatgaaacgagcagtagtccacggtgattcctctgcagcggtgggtattattaatcgcgtatgtgacaccaaaacgtgggtattattgatagcttatgtgacaccaaaaccaccccatttaagctgtggctctttccctaaagtagaaaacagagatcagttgggttccaagcatccacgaagatcttattaaattcgtgatccctggtggcaccatggagtcaggattggctcatctcaaacctgactcagaaacaaaaccatctcaatgggcagagatgagcgtccttacccgctatcataacgtattttctggtgttttcacagtgctgcgcttcctaatccccattctagggcaatctacatgccatgatgcccagaggcattaacaaaggagacacacaggggctcctcacgttggctttccatggttttgatgaaaatctgtttcctcatctcatacaatgtggtccgtaatagtatcatttagggttgaagaattaaatggtacaaattatatagggtgcttatgataacctacatggaaaatgcctaggatatgttagctatgctcatcaccaacatcgttatatgatggtaataatcagatagtcaggaaggctgacaccaagaaaatggatacatgctctgagggaatgaatgtggagagatcagaaggtcaagaacaaagccttacaacatgtctgcagtaaagggatagagaaaagaaaggctataaaagaaggaatgaaacagagtaaaattataaaatcaaagctaaggagaatttccagaaagggtaatatcatttaatatcatagaagtttaggaacacaagatggaaaaaaggcctctgggtaactgacattgaggcagtctttagggaagctccatttctgacagagtagacaccaagtcagcttgaagcagggacaagttgaagaagctgttggctggtcgcatggggaaataaataagggatggcatatgccatatttctggatttctttctttcttgcccagcctctatatatgcatagagtttggtgaaaacttacaaaaaataaaaatgaaaccaattttgtttgttgactcaaatacaatgctttgtgttagaatcaagataaattcatgcctctcccttctattgtcaccgtcagttttgaaattaaacatcagcttttcttcttcattaaaatcattttcaactcctcccaggtgttggtggtttgggggagttacataagcagtcaggtcttgatgagtag

SEQ ID NO: 1883624 - DNA, 4001 bp, Homo sapiens
gaagcttttgcttaaaatgattgccagtaactagtagcttcgattctaagagtaggaaggaagagccccttcagtacctgacaatgctgcatctgctcctagtggctttatgagttgttaagagtcctatgttttaatggtaatatgatgctaaatgcatatgcagcaatattgggggaaagaaaaatataaaagaaacagaaaagttatctttaaaatctaaaaatttaaaccattgttttaaacccttacatagttcactgctatcagctcacataggagccttcactttggagtggtttttataactctctttacattaaaagggacagaagagtgtaagagtgtgttgttgcattgacaaggtcccattcttttctatgaagtgcaatcctagttgtccttgagttaacttgaattgtaggtgtttcttcttttgaaagtacttttctagttcttcagcaggaaaggtgatattttcctgtcttttttgatgaggggttcagatgttatataacccctcacttcttccttcaggagaggatggccttaaggcactgaagatcaattaaatcatcagaactcaaagaccttttccttttgttggcagtaccatagaagtctttgtcttccaaccttgaaacaacctaagaaagacaatcaaatagaaaagaggtacaatttcaaaaaggattccaacctgtaacaatcaccattgatgataagccacacatgcagactcccttagatagttcagtaacagctattttggctgaggtttacaatgccaagttctgtcaactctctaaggtagtctcctttaagggctataattagattgctggagcaaagggggaacttgttttattaagttatttaaaaattgggctcctaaagatgtcacagtattgtgacagtcttctaacagcagtatcatctgttacctgtgcacttgttccttaaacataatgaatgcacacttttgcaaaagttagtttatgaatgtattcaaattctacccaatctgtagtagttattatatactcaaagcaaattttaatgaagcaggtatgtgctggactgcattggaatgtcaaataagtctaatgactaaagcatcaaaaggtgttacttcacttggacattaattatggtagaaaatgtattatttcaaaatacttcccagctactaccgaaaatgcctattttaaatgttcatccatgtcagttgtgagtaattttgctgtgtactcaccgaaagtcacaaaccataaatattactttgccccataaaagttatcatttccggtagaatcccatgtacttcctgcatccagtacttgagacacacataccttatacagtctaagtgcaggtctcttggcttaggcactaatgctttgtctaacaaactcatgggactcactgcactgtggtatattacagtagaaaatgatataaatttgcaaactaaatgataacaaatagtaaagaatgttaagtgcattatatatgtagatattaggaatacaactgcaagaaatcacttatgtatgattatttgaaagggtagcagttcaaaaggaaaaccattaaggatgaattaaacttgattaaaatattctgaattatggttacagaagagatgatatctataacttttaaataatgtgaatctttgtataaaccataaactacatgccaaaaaggttaataagctcttcagtatgttaattttgaagcttttcatttttctaatcacttcttaatatgatctagttgcagatgttggcattggtgtttgactgaaagcccacttagtaccttcatagccttaccttcagttcccatgctctttctatgtcaagaagacaaaatggcaaatataggctactgtcgtgtgccaaggcgcaaaggtcaaagtagcatttggtataaacactgccaggaacatcgacatcattattaatgaagtgggagaactggtttcccaactcaagcctggggaaggagaaacacaacaaaaccaacacaggacaatgttagtcaactgggctatcttcaaaaacattattctcatgtaagaaatgtggtaaagccgtcatatgctctagtttattagaacacataaaagaactcacactgtacagaaccctatcgatgaaagaaacacaagaaagcattcaactttcccagttctctttgaaaacttagaaaaacttgtattggaaaaaataatgaatgtaaaaaacgtgttaatgaacttgattttcccacatcttttcaaaggcatagttgaattttaatacgtagaaaaactacataatcttaagaaacatagtcaagccttcagctttttcatttctttgaaaacatgaaaggattcaagggagaaaacccttataaatacaaacatgtggtagggtcgtcagttgttccagttccacatgaagacaagaactcgtttctgaaataaaacctatgaatgtatagaatgcagaaatgccttcatttacgtgatatttgctccaagacctatgataacacacattgtagactggccttataaatataagaaagcacactggattggaactccagtagactacaaaatacaggaaagttttcagttttaatgatttcttcaaaatttatgtgaaaactccccctacagggaaatcctatcagtattcctaaattggaaagcctgatgcaaattgattattgtataatcttcaaaaatgcacataagtaaatcttatactacttatgaatattttgtgtttctcagcgattctttgagagagtctctctacttatttccacttcttttgcaagaaaacatcgaggttagaattttgtagatactctctaaacaatactatatgagtttaataggcagtgtttttttgttaagtcagttaataaaatttttctccatttatttaaaaatatcacagtgagctactagaatggctctaaattctgctttgaaacaaatgaaggctatgcagttggattcctacactaatgtccaaacaggacacagctgcttgcagtccattctgcatccagcaccccaagtttgggacaagcagaaaggtgacagcctctaatgcacccatgctgatgatatagggctcattcttcagagttcccttagtgcagctgcacaactcagactccatgctcactcacagagcaccacaatagtgatcagatgagagaaacggtggatgccatttactagtcgtcactattacagggcagtaaaactctttaaacttaggaaagcggaaagatcaaagagagacatcttggctagactaaacccgttttatgatatgccttttggtagggtgttggacttgcacagtgtattagtctgttttcatgctgctgataaagcatttatgctgataaagcataaatacccgagacagggcaatttacaaaagaaagaggtttactggattcacagttccacatggctggggaggcctcacaatcacggcagaaggcaagaaggagcaagtcatgtcttatgtggatggcagcaggcagagaaaagcttgtatagggaaactccttataatactgtcagatctcatgagacttattcactatcacaagaacagcatgggaaagacctgcctctattattcaattacttcccaccaggtccctcccacaacacgtggaaattcaagatgagatttgggtgtgaacacagccaaaccatatcattctgtcctggtccctcccaaatctcatgtcctcacatttcaaaaccaatcatgccttcccaacagttccctaaagtcttaactcatttcagcattaactcacaagtccacagtccaaagtctcatctgagacaaggcaagtcccttctgcctatcagcctgtaaaatccaaagcaaattagttacttcctagatacaatgggggtacaggcattggataaatacagtcattccaaatgggagaaattggccaaa

SEQ ID NO: 1883625 - DNA, 4001 bp, Homo sapiens
aggatccactctgtgctccaggcctctcctctcgacggtgactgcaggccgggctccagggatgggcggttctgcaggtgtgcagagtcccccttacgcaggtgtgcacagagtcccccttacacgcctttctcttcaggggtcccaccaggagggtcagtcggaggcttgatttcctgccccagcagctggaggggtgggggtccagggagagtgtggtggggacagtgagcggcagagctggaggccgtgaggctggggtgagctgtgtgagaagccttgaaggtcacagtttggggagtctcagcccaggacccagctctgaggggacagttcgggagggatggggcaggtgggcagggcggcctgggggcctgggactggccatgctcgtctctctccgtggtgctgatctttccagctctgcctgtgggtgggggatggaagggagggacacagctgtgtggtgtcgggggcacacgcccactcctgggaccatggctggcctgtgcgtggccaggcaggttgggctctcagggcgcatggctactttaaattttgggtctgtggctgttgggctgatggagcacagccagggatctgagatgggctctaaacttgctgtcagtatttaagaaggaactttcacgcaaaaacctgtgttttcatcttgcttgggagaagtccctggagcccccactctctctggagcagctgcctctggatctgggaggctgggcgggcagtgccgggctggctgtagaagagccgcccctcctgggggctggcctgttcgaagccgtccgtggcctccggtccaggctcgggctccaggtgctcactggggctgctgtgttccagtgccctggggggtcccaggcctgtggcggctcgcgaggatggctaggctggtgtggtgcggtggctgggggacaggggacctgcattctgtgcagatgcacccacagaggtcacaggggttcaagttcataccccgggagggtgggagccttgctcctgtgggcacgtggtggtggacaccccttcctgctctccttctcctccttcacactggagcggcagagttgcagattcacactgaggtgaggatggttgctaatggcttctcgggccctggactagaagaggtgagaaggcaggtgctggctgtggggctgtagagtggaggggcctccaccctgcgtgcctgtgtgcagccccacacgtgctgaagcatctctactccagccagacggacgctaacgcagattcattcctagcaggtcacatggtagcaccccccacccagtccctgccctcttcacgaccctgctgtgagctcctttctccagggctgggcaggcccttctagccaatgccaccctccctgtctcccctgagagcacaggagcctggtgaaaagggccttgcgccttggtcctcctcactcagtgtgcggcctctgtgtcttctccactcccaccccttcttccccaccaggctggcctctctttgccctcctccctccccgagaagtttccctgctggctcaccacaaagcccagcctctactgacaggctcattcccttgaacgactggacactggtctgctggggaggctggagcaaagcagcacagccgggcgctgcaacagcagacatttccttctcagtcctggaggctggaggtccaagatcagggtgttggcaggattggtttctggcgaggcctctcctcctggctggcagatgactgccttcttgtggtgggcggtgctgatccgatggaccccagaccctggggcaggcgggatgcagggccaggcctgcggggtccactgtggccatgtggctgttgctggtgcatcattgcatcgtgaaatggttagatggtttgatgtctgcagaatccgccatagttctccccctttcctctgactgtgggtcctttctcacgcttctctgtcatcagcctctgggcctgacaacacagctgcactggagccacaggcaccccgaaggggccaagggtgggaccaggtgaggaggaggggcactgtgagactgcaggcaggagggacgtcccccagcacagggcagcctcccgtccaagggtgggggctcctgagcaccacctcctgctctgcctgccggtcccaccccagcacctgctgtcttaaagccttgctctgggagtacagcgtgtggggagggaatggtgtccctgttcccatcacgggcctactcagcactgggtggaattcgacactgcaggcagacaggcagagactagagaccaggagcagcaggtggggtggccgccgtgtttccattggcatgcatcagaggtgcgtgggctcccagagcccgacaggcctgaaacgcccagacacacagatacagggacacacgggaggggggccgccatggcactccgtgtctcgcctggtgctgggctctgtgccatctccagtgaggggctctctccaggagggcaaaggccccccaccctcccaggaggtgcctttactccacggacttgccaggatccacagcctgggaccgtgggcatgtgggtgaaggcccggtgcacagctgctagaagtgagcagcacagctcctgagacatgaaaaggtaaaagaaaaaataaaagctggcccttttttttttttttttttaaagctgactcttttgtgaggtttattatgtgctggctgctgttttaataacaataattttataaatccaagaactagacgctgatattaacaactcccccctttaaaaaaaaaaaaaacactgggtgcggtggctcatgcctgtaatcccagcactttgggaggctgaggtgggcagatcacgaggtcaggagttcgagaccagcctgaccaacatggtgaaaccccatctctactaaaaatacaaaagaatgagccgggcaaggtggcacgcgcctgtaatcccacttactcagggggctgaggcaggaggatcgcttgaacccaggaggcgaagcttgcagtgagctgagatcgcgccattgcactccagcctgggcgacagagtgagactctgtctcaaaaaaaaaaaaatgaaacaaaataaaataaaataaaataaaggttttattttgagctaattatagattcataataggcagttgtaataaatggtatagagagagcagtgtactctttacccagttcccccaaaggaaacctcttaggaaactgtaatagcagggccacggtctcatgactaggtgctgagattgacacagggcccagaacagcccgtcccgggagggcccctcatgctgcccttctatggctgcacccaccttcctcctacttacctcacccaccttccctttactcgctggcaaccactcatctgtgcatttgtataattttgtcatttcgatgatcttagataaatgaagtcatacctttggatttgcctttttcacccatttgcttcatgaaatactatgaacaaagctgtatacacattcatgtacaggtttttgtgtaaatataagttctcacttctctgggataaatgaccaagagtacaaagagtacaatcattaggccatgctgtagtcacatttttagttttttaagaaactgccaaactctcagccagagtggatgtcccgtttcacatttccagcagcacaggagccgtcccttctccacagcctcgccggcacgggggttgtctctgtattttttttttttttttttttttgattctgatagatatgtcgtgatcgttgtggctttgatctgcatttccatgatattggacgtcttttcatgtggttctctgccatctgcatatccttttattttttttcagatggagtctcgctctgtcatccaggctggagtgcagtggctctatctcaggtcactgcaagcccctgggttcacgccattctcctgcctcagcctcccgagtagctgggactgcaggcgcccgccaccacgcccgg

SEQ ID NO: 1883626 - DNA, 4001 bp, Homo sapiens
agctcagggtcatcttcatcttctgtgcccccaaatataagtgacctgctcaaagttaaccagtaaaagaggggaaaacaaaactgtcttcctacttagggattctctggtctttggaccaaaccttggaatacaacttacatttgggccaatagccttgttttccctatttatactcatagggaaagccagctggaatatgcatgaatcaacattctaacctcagagatatatttctaaaattcaaaacagaagttatcactgatacttggttcagctgaacgactgtgttcatgaaagttgataccattgccattccttgatttttacaagcatagcaaacttaaaacgctcaacacacccagaatgggcaataaatggatgtgttggcatggtcctcctcgtgctggcacttcaacaacacagcaagctatgtacttttgaacaggggttggaacattttttctgaaagcaatcttcaatcttgcaattttgccaaattcttttattttgccataatctatgaattattctacttggcattattgaatgcaaaataagtttactaagcacctactatgtgccacaccctagggatacagggaaaaataagtctctgctctaaagtaactcacagtctaggaaagaagtcattaacaaataaataactatactttggttattggtcaagtattcctcatacttctttagaatgcccaaagctctcttggcataatgacacagtgaggggtgagggtggggtcatcaaggaaagttatatgggacttttttccccaagaaagggtcttgctctgtcacccacgctgtactgcagtggcgtgatcatagctcactgcagccttgacctccagggctcaggtgatcctcccactccagcctcccaagtagctgggactacaggtgtttgccaccacgcccagctaattatattttttgtagagacggggtctcactatgctgcctaggctggtcttgaatttctgggctcaagagttctgcctgccttggcctcccaaactgctaagattacaggcgtgagctaccgcacccggcccgtattggattttatttatttccttttcttggtgctcatcctccttcacaacttcaagatgggcataagatgtttgacaacatggttcttcattaagtccaactccttatcataatagggcttgggaaatattaaacacgagggcaatcgtgctaacacaaaaatgggcgccccctaaaccttgttacttgtttgctcacttataagaagagccaactcaaaggctcaactgaattctagcactaagattccttccttgctgtagaagatctgtacctggtcacttccattaaagttacataggcgttccaagaagcctcctgcaatacagttgtgactcagccggtatgggagtaatgacggtcctgtggtatttcctgcacccccagagtcccagagtttgttaaggaccgtgtaagaggacaccacgctggcttttcagtgggcgcgtctctcctgggggcatcaccagacaaccccaggcggaagtggcggtggcccatcctcatgcaaactgcagtgtaagaactggggcccgggactcctcgcaaatgtgggacactgacattctgtgatgctgtcccaatgccctttcaaagcgctcagcccccaaattcccaaccaacagccatttcagggaggggctacccaggaccaggcttttgatgaaccacgactgttcggggtgccgtcttgggagagccacgtcagtccctctgagattccaaacggccgacagcggacacctcgggaccacatccaagcctcggggacctgtcaagacgccatcgacggtcctggaccaaatcccgcccgggaagggaagggtcgcgaccggaccctggagacccacggctgcctggcgatctgagcccaccccggcgctgccgtcccgcccccacttccgatcggtcgaaggtcacgtgccctgaccccgccccgcagacgcgactcctccagctgcgagcgtcccggctttcccttccgccggaagtagggcgactttccttttccggctacgggtccccaagcggagcgggaggccggaccggggagccgagcggcggcgtcggcggcgtcggcggcggcggcgacggcggcgggggcggtaatggcggagctggtgcaggggcagagcgctcctgtggggatgaaggccgagggcttcgtggatgccctgcaccgggtccggcaggtacgggcgcagccggctggcaggagcacgagatcccgaggcggggcctggcgggcggggaagaggggttcgggcctggggggcgggaggcagcctgaaccgacgtctcagccgggccgggccgttccgtggagttcctacagccgggaggagccggggggataaggcgccactgcgaggcccaggcccggcctgtcgggcgggtctcccaggtgcctgaagtcgctgggaaagggtttgcttagagcgtctggccccatcgtgccccagcggccagcctggacccacagtgtagctagcgcggggttctgaacctcgcgaggggaggggtccgggaagcccacggggaggatctgggtgtagacataaagcagctgtctgacgcccagtagcttgttaaaacttggggaacatcgtctttagactttctgttgagtagaaggaactcgagggcatcttatatgtgagggtgctctttggagaggtgagagagggaggtgttacatgtgtgggggtggtccccaagatgtagaaatttctcatggcaagcttgcctctactggggagaatgatatggcctcattccgacattgaaactttactgtctgacaatgtcgtgcatttaatcaaagttaaattaactgggttttagaaggctccaggcttccccagagagtgaatatgggacctgccaaaaatacttactggcttctggcatggtacttagaacagaacgtgttcttcatttgtatctaaaacttacttacaagtcagccctaacacttcagcttcctcggttaagtgtcttatgtcctcctctcttcttatgtaattgtaagcgcactgatactttaaaagttgggctataactaattactgcttgattcctaacagaaagccacaggagtcattgtattagaagaaggtcttcactcgggcgcttgaagatatggtctttacatctctttccagtattccaggggagggaaccctacctgtttccctgataactgacttttcatgttatatattgatgctcctatagacattatattggatcccagaactttccaaacctgtggttccacctaaaattttatctgatgaattgttactttactgcctagctgccaaccagtacagtagtgagtatccatcttacttagacttcagatccacccatggctgtaatggatgaacatgccacccagctccccttccaccactctgcttgctggcgtgttacagtgctctcctctacagtacagggtcctgaaccttgtttctcactggctactaatatgtaatggctttcgctctgtgctgatgtgtgacagtcaccttgttggccttctatgtccgggaagaattatagtcactgccctaaagggctcagatcctcagtttgcagaaggcctgtagttgaacataaagtgaattttgaaccattgagaagacattccgcttctcttgagccagtggttgaactcatattcttggacaacctgctccagagggagaccctctggtaaatgctgacctaatgtggattgttgaagcagtggtgtttactactagcagtgaaaacttcattggaattgttctcagctctgaaatgcaccattgactggagcagtaataagcccaatggagacagggctgtaagtgtgttccttctgaatgttaacagctggaggtccatactatctccaaggatttgatggcctttaa

SEQ ID NO: 1883627 - DNA, 4001 bp, Homo sapiens
ataggtcttgtatttaattaaatattacgtccactttgcaatttaaaaatttttttatagtcatgaattttgctcctggatcccctctgggcttaaatttgcacaatttggtttctttgttatgagaggtccaaacaatattatctctggggcagctccatctggacttttcaatttgattcatcaaactgtactggggttgagaatgtttgctccaaagagatatgggtgcttgattttcttgattaccctggtactgccttccctttcatagagagtatccaatctgtatatctgtcttcctaaatgtcttataatgctgtgatcagtcacgttctgacttagaagtctagagtgacatcctgttgcttagcaaatcaaatttgctctcttgagaccttacttttaggacaccgtagttgacttccaccccacataatcaatttttatttcccatgtttcaagtaccctaaatgaagtcaggatgcttggaaccttggccatgctctaccatctactggatatgtgtctctcttattgtctatattattggactgtgctatcaagcatggtagccattagcctcatgtggctattaaattaaaattaaataaaattaagaatttagttcatttacatcaggtacttttcaaatgttcagtagccacaagagactagtgactgccttattggacagcaccaacagaacaactccatcactggcaaaaagcttattggacagtgttggtataagatgtatgtgaatgtgcgtgtatgcatgtatggcttaggaacccttacagagaaacaaggataacttgtgcgctgggcattgtggttcacccctgtaatcccagcactttttgggaggcccaggcaggtggatcacttgagcctaggagttcaagaccagcctgggtaacatagcgaaaccctgactctacaaaaatacacacacacacacacacacacacacacacacacacacacaactagctgggcatggtgacacgcgcctgtggtcccttctactcaggaggctgaggtgggaggatcgcttgagcctggagaagtcgaggctgcagtgagccaagatcgtgtcactgtactccagcctgggcgacagagtgatacgttgcctcaaaaaaaaaaaaaggataacttgtgctctgaagtcggtttgggttgaaatcctatgacagccatttactatgaccttaggcaagatgcctaaacctcttttgatttcagtttccccatctctaaaaaggggcctaataatagttactagcttgtggggttgttgtgggaactgagtgagatggtacacaaaaaatgttgagaaagagtgcgtgggattttttagctcagttttagttcttgacgccaaaaggtttgcatgcttcatttccttcaatcctcagagccttcggatggggacctcactataattgctatgcagatgaagcaaagtctgagaggttaagtaaccgggccacagccagagtgtaaacgttgtgattcattcaaatctacatcacttgactgtctcttttcattcaacaacctccttaccttgctttatttttctcctttgcacgagccttagtttatctgtcttcctcctcctaatagatgtaaggcccaggcggtcaggggcttttgcgttttttgttcactaaccctatcccctagaacagcgttcgggataaagaggtgcccaacaggttgtatgaatttggacacgtctcttaacttctctaagccacagctccctctcctccgtaaaatgaggataataagaaaaactactgcagagctggtgcaagatcagattggaggagggacataagcgcgctgtgcaaacctggatgtacggtacgaaaggaacctccgttctaggttgcacccagcctaagcaccgtgagggccgcgcggcacgcgttcagcttcccgggacgctcttctccccacccctactcccggcctccagcctcccaccacccacctccgggcggggaccggaagtgcagccgcttccgccgggagccgcggagctgagggacgcgcggagatgacgcaggcagcaccggaagccgctcccctgtgaggctgcggaccgggagcagcggccgcaggtccgggtctgtatgcgaggcggggccggtcggggaggggactcttaggcgcccgcggctctgctgacccgccgcgccttggctgtttttctttccctgcaggcgccatggctgcggagcggacccggccgctgcaaggctctggcggtccgagcgtgcctagtagctgtgaacccggcgcgaggtcccgggccccggggcgctcgctcaggtcagtgccgcgcggaacacgattccgagagcaagggacctgggagcaacgaatgggttgatgggatctggattttagagacgggaaaacagggttttggagttactgcctcctactgcctccatttccttagctgcgaaatgagttaacagtgatgtcccagggctaccaaacgtttgaaagacgatgaagtgtgatgaggtggtttatgaagtacaaagcgctatactgcgccataattgtgggtatgccatgaaaacaggtgtgtatgtggggtgctgcttgaagtaaagcaaagataacaatattaatgctaagtaataatggtaactgacatttactgtaggcttacagcgtgccgagtactgtgctaaacgctttacttgcactgtcttgtttaaccctcataaaaacccttgtaggtaatgctcttggctgtattttacaagtgaggaaacagggcatgagacaggtgaagtgatttgcccaaggtcacccagcaacaagtggagttgcagaacacatattttataaacattatttgtattctttcaaagctttaaaaaaattcaccttaaaactaaaggctattttttgatagtatattatacttaacatggttttcagttttaaaaggtatacaataaaaagggacccctcattcctattctgcagctctccagttctctctggaggcaaccagggttatcagtttcttgaatattcagaatacattttatgcatatgtaagtttataggtgtgtatacattttcagcgcctctgtgctctttgtttgataagaaaagggggaaatgaagcctccttccctctaccactaacaattatgttgctttcactcttgactaggccaggttctgatagaggaggaggggaaaacacatttacactgttttccagaaggtcctgtctctaatacctctgagtataggttttgggagaatgggtactgggcaaaatattgagcctgctacttcctgtgccattctgggaaggccactccacttcttgagccgtaaatttcctcattaatgttagttaagggcggcattactgataccttccatgaggttatgaagatgaaatgagataatgtttaccagtggtactttttctttaaaaccaatataaatatgtgagttgcctaggtaacatagggagttaatggcagaacctgagaccaaacccaggctctcattttccaatttaggagtctttttgttgcatgacccactttgtgattattgatactgaaggcaagagggcaagttgaatgttaactctggggtagggacgtagggtaagggggccaaacagcagggaatgtgggtagaataaggcacctactgggaaactagagcctccaataaacaggtgctcttctttataaaattaaacccctagtaagtttgagcccttgagtttttcttccaggtattttgaagagaaacttagtgataagatgatagggtcaaaagagatgttagtggtcatgtccattccacccttagtgtcacagaaatctttactgccaggtgttcatagtagtaaaactaacaaaaagtaccatttgagtttttacccgctagactgtacactgtgctaagcatgtccctgctatatttctgagttt

SEQ ID NO: 1883628 - DNA, 4001 bp, Homo sapiens
agatcatgccattgcactccagcctggatgacagagtgaaactccgactcaaaaaaaaaaattaataagtaaaagaagatagaaagtgacaatgaagtttattatattaatattctttaaaagcaactttttttttttttaagacagagtctcactctgtcacccaggctggagtgcagtggcacaatctcagctcactgcaaactctgcttcccaggttaaagcaattctcctgcctcagcctcctgagtagctgggacaacagatccacaccaccacaccccgctaaagtttgttttgtatttttagtacaaacagggtttcaccatgttggccaggttggtctcaaactcctaacctcaagggatccaccctccttggcctcccaaagtgctgggattacagacattagccaccgcgttgagcctaaaagcaacttttatacaaactggatttccaaaggatgcactagccctaacatgacaattaagaaatgtaaattcaaagtaatagctatctaatataagaaattacagagaaaaattttcactgcttcctgtaacattatcccaaaactgatcccagaagccttattgctggtatctaaaggtctatatatttagattcaaaaaacatacctgggccctaaaaggccatacaggacgtggctccgagtttcctgtccaaccttatctcctaatcaaatgggccctctaataaaaagggcctttttgctgctccatacacaggccaacttcatgcctacttcaggatctctgcactggctcttggtcctgcctggaatgctctttccccagaacttctaagcgaattctcttgcttcttcaggtctctgctcaaatatcaccttaacagaggctccagcaccctatggcacatttcttataaaagccatagctagaaaagacgccgtcttgcctcaaattgttaacgttacttatgttagattataacaacaaaacagggtgtccttttttatgtgctttaaagcaaaaaacaaacaaacaaaatgaaaaacaaaaacctcctggttaaattctgtgacccacagcatcatttatctttaggctcttctttaactcctattatttaactcttgctcttttacattcctttacagctttatagtttgtcttcactgcacacctgcaagaagtgatttcttggttagctaagtatataactaagactaacccatagcaatcagcgcctttgcacacagcaactcctaaaacattttttgatgaataaacaaatgagtgaataatgaactatgacaagacatctggaaagtttcagggacgtgagggaaaaggtttttgttccagtagactgacttcataccggcacttttacataagaatggcaacaatgatgtcaaacgaaaaaattaattttcatcgagcccagagtccacttttctcttctagtcataactgccattaaaaaaaaaaaatcctttcagcccaactacagttgtcaaccatgttcccaataaatggaggaggtttttctcagaagtgcaggaatgcaagagtctggaaatggaaagggcaagacaggagtctgaggtaacgcgaggagactgagaatctcaatactggggcggacacgcagtaaccacaggaccctgggtcccaatcaggtgctgctgggaggaggcgcgtcagccaggggtggaggaagcagaaaaggctctctcacctctaacgccgcagtggattagagcatctgagaagctctggaaaaaacctctcaggaaaacaacgacttcagcaggacccactagccaaggaaaggggataaaataaatagcaaagggaaggaaaaacacgcacctctgggatgctgcaggtcctgttgcagccgccgccatccctcgaagccaccgttgcttctgccagagctgctactagcgcgcttatcagctccgccaccgcccaagggggaaacttctgcagaaaccccaaccgagcttccgtcgtaagtagccaacgagcagccacgcagcgtgctgctagcggggcgggaggctacgcgcgggcgcgtggcctgctggggcagtggaggaccgagtcttcccagcccgcaccctggcctgggacccgcgctcccagtcccgggacccgcgctcccagtccccgcccctagcagccatggttatggaggcccgggccaacacgttctccttctcttccaccgcgcccactgctgcggtcactcggaccaagcctccaggagtagtagctcagaagcacttttgtagcataccgttacccctcaggagcttagcggttaagggcgtttgcatgtcttttagtaacacaagctccaggccgggcgccgtggctcacgcctgtaatcccagcactttgggagtccgagacgggtggatcacgaagtcaggagttcaagaccagcctcgccaagatgctgaaaccccgtctacgaaaaatacaaaaattagccgggcgtgatggtgggcgcctgtaatcccagctactggggaggctgaggcaggagaatcgcttgaacctgggaggcagaggttgcagtgagccgagatcgcgccactgcaccacagcctgggcgacagagcaagactccttaataaataaataaataaataaaaaataaataaaataagctacttcgagctccgttttccctaggttttatcatggctgccacaggtggccaagccctttcgtctccgtgatgtcactggaggctgcgtggtcttttcagggaacagaggggcctggatggcgcctggattccggcgatcgttgcgctgggaatggaaaagggctgggactcgctggaagtcgttctgaactaatagagctaaaggccttctggttcctggggagacgcgcctggcccccgtgtactattcattcccttcctcataactccacagcccaggctttcttcttagtgggcttcctagaccgaaagtgatctcagggccgctttgtttcccatcccggtcggtcaggccctccgtcagcgccctttgacccatgcagatcggatggggaaagctgccagcgccttccagggatgggggcagaatggggagctggagggagtggtctttttctaactttataccactatcaaactgtgttaattcatgtagctttataataagtcttgaagtcctgtgactttattctcccaagattgctttggcttattctaaggctattgtatttgtaggtgaattttggaattagcttgtcagtttaaaaaaaaaacaaaactgctaggatttgtactgggcttgcgttggatctgtagatctgtttggggaaaactagtatattaacaatactgtccttcaatccattaatatcattatttcccaccatttatttaagtggcctctaatttttcctggtaatattttgtagattgtacacatatttatatcttaatgtttggatccaagttgtgcttggatcgattgcagtatagagatcaaacatatatttcattagatttattcttgagcagtgttttaaatgcgatgttaaatagcattttatttttttatattctcgtttgttgtaagaatatagaaatgctattgatttttacatattgatgttatattcaagcatgttgctaagttcccttattatttgtaagggacaaaaagactacagagtcttttggaatttatgtgattacaatcttccaatctgtgaatagagatggtttaactttcctgtaatctttataccttttagttttgttgctggctagtatgtccactattgaatagaaatagtgataatggacttccttgtcttggttgtaaaatcaagaggaaagcattcaatatcaagtgctttttctgcctttattgaaatgttcatatgtatttttaataataatatgttactgttatataataataattttaaaataatattttaataataatgttacaatgtaaccaattacattgg

SEQ ID NO: 1883629 - DNA, 4001 bp, Homo sapiens; identical to SEQ ID NO: 1883628

SEQ ID NO: 1883630 - DNA, 4001 bp, Homo sapiens
ctcagaagtgtctttttcaaggacctgaaggccattctattgaaatgtaatatcaggaaggacagagcctctgtctcccagtctctgcaggagaacagagtcctaactttcaccattgccagcgagcacgcggagctgcctaatcacatttaccatgaccaaccctttggaatttttcatttcccttattctgctgaagccctcaccgtttccctccactccctcattctccctttaagccagacatggtggagcacgcctgcagtcccagctactctggaggctgagggggaagattgcctcaggtcaggagtttgaggccatagcgagaccccatctcaagaaagcagaaaaccaaaaccacaaaaaacatcagtcacctctgcacaaacagaagtttcagttggttcacactgggctctccgccctatcagtagtatattgttaattaaaatctggccttactatttgaactagtgttgggatgtttgatactagcacagtgcctaacccacggaagcttcagaattatgtgctgagtggataatgtgctggatgtccccactgagcacatcagatcctgcacccagtgcagtagtcaagacttagctgcaaatgacagacacccaactcaaacatctactcaggctagtcaaaggtgggaattggggccaggcatggtggctcacacctgtaatcccagcactttgagaggctgagttaggcagatcacttgaagtcaggaattcgagaccagcctggacaacatagtgaaaccctgtctctactaaaaatacaaaaattagctgggcgtggtggcatgtgcctgtaaccccagctacttgggaggctgaggcaggagaatcacttgaacttgggaggtggaggttgcagtgagcccagatcgcgccactgcactccagcctaggcaacagagtgaggctctgtctcaaaaaaaaaaaaaaaaaaaaggtgggcattcattgactcttgcaaccaggggatgcagagtcagtatcagcttcagggacagccggatctagagggctcagacaatgttgttcagaccatctcttgctccctcctttagtgctgcttatccatctctatgtgtctttataagttggtctcattttctccagccacagacagggtaagccctctccgcccagcgtaaagacggctcccagttgccttatatcccattccttaggcttgagatccaaaagaatgctccttcctctcagcatctagacagtaatctcatggaaggcctgtgattggttctgcagagtcgaaagcccacagcctgccgctcgccatcctatggggtgaggggcagtccctccaatcacatgggatgggaagtcgattccccaaccaaaaaaaggatgttgagctgagaaaaacaacagatgtcagaggagtatcctggaggagctgggatggggccaatcagagggaggcggaggaggatgctggtatcagtgggaggtgctgtggaaaggcggggctgagtggagaaggccctggggacacagggaaggaggacagcctgcagcctccggtgaggaaagtccgcctgtaggtggtggctcacagcaggagaggcaagacagtcccgtgctagacaaggcgcttccattatttaatcctcccaaacaccttaggaggaagacactattgtaatcccccttatagagacagaaaacagctcagaggggctcagtaactcgcccagggtcacacaggtaggaaggggcagtgctgggatttctgactcccgcctaagttggatcacccatagtcagaatgtgcaccacgtacctccacttttctctcgtccgtttgcaatatctgagaatacatagcaaggaggtaaagctgtcaccacagagcaaccttgggcgagccttggccctctcgagactttagtcatcacatctttgaaatgggtacaattttgcctcccggactcacagcaagccgctggatcttcgaagcgcccagggagctacgcgcatgcgcgaggctgcgagggcgggcacaggggaacgcgggggagggcacagcggagcgcgggggaggtgcgcgcgcgctccggcgctttcaaaagttacctggcgggtggggctggagttgagggagttaccagctgcgcgcgcgccggccccaccctcagcctcttcaggcacctgttggcttgagggtccattcggccgcagatgccatccaataggcagcctccctgacccagtccggccccgcccaacgcctagatccaccagtccccgggcggcggcgttcccctccctcggagggcccgcccctctgggcgcttcttccgggtggggccccgggccgaggcgatggcgccctgggcgctcctcagccctggggtcctggtgcggaccgggcacaccgtgctgacctggggaatcacgctggtgctcttcctgcacgataccggtgagccggaccccgagcgaccccggacccacccgatcccgcgtacttccccagacgttctggtcacactgggtctcccgcctaatccctggagatcctgggattggcccgatctccaccagctcctgaagccctctccccatctatcattccaagagccacctgctctctgtctgataccccgttgatccctaattaatcccagcatcttcctgatcattgccaaatgccctgtccatcccaggacccagccggtgcccaccagatccaaggaccgacttgagccccatgtcccctgatcctgggacccacatgatccttcccaggaactgaccccaaatcttcctatccatacgattaggaggctcaactagatgcaaagattggcattctgcccacacccacaccccccacacccccatggccactagctgcccaagtccaggcaaaccctcaggccagagaacactccatggggtgcggcctgtctcccatcttcccacagattcacccacccacccacctccatttccctcattcctcttagtagccccctacccagcgcctcacctgccacaggcagcctcccccactgtcccccacagcagaccccagccctccttccatggcggtccagcctcagtttctggactggggccccttctggctttcctcccaagacagacctcctccaccaccttcaccctttagcctaaaaacttgctcaggtctccgtatcagaaaacccccctcaaaacccaccctttcttctctgctcccccttacaaccaagggacacaggatttgtctacactctgctgtctggtggtctcatgccccctcactccttgccctgcaccctacctccccaaaatcctgtcacctccctgggctgaagcctgctggacccttccgtatgcccctctgcagcatctgagcctgccagctgcacccttcccactgtatctctctcaggcatttcagacctaaccagtctctcaccattgcagagccagagacgctggacccctcttccctctctcccacatccagtcaggtctggctcccttgacccagcagccccctgtccattccttcctccctcacttcctgccaggcctttgtagcgactctcttcttcctcctggccagattctctgcccccaggcttcccctgatccatttctttagcaatgaggttttccaaaacagatctggctctataaccttccatggttccctctgaccctccagataaaagtgcagatgaactgctggccacacacagccactcatggaaccaacatctccaggcctttgctcagccaggaacacacttccccacctccaactgcaccccaaccccacccactcctgttctacccggcccagcctcactgtgctctccggcctctccagagctgcggcaatgggaggagcagggggagctgctcctgcccctcaccttcctgctcctggtgctgggctccctgctgctctacctcgctgtgtcactcatggaccctggctac

SEQ ID NO: 1883631 - DNA, 4001 bp, Homo sapiens
gtctcatgagatatgatggttttaaaaacaggagtttctctgcacaagccctctcgttgcctgctgccatccatgtaagatgtgatttgctcctccttgccttccaccataattgtgaggcctccccagccatgtggaaccctaagtccagtaaacctctttcttttgtaaattgcccaatcttgggtatatctttatcagcagtgtgaaaacggactaatacaaggcccgagtagaagctgcaaggcttcttgtgatctagccttggaggccccagaatgtcagtcactttcactatgtcctattggtcaaagtcagtaaggcctacccaagactcaaggggaaggggattatactctgccttttgatctgagtagtaaggatgtaaaggtagggagaaaagtgatggagaccaattttggagggtatctaccacagtaagcccagtaaacaaataggttttggggatggaaatttagaagtgctcttggggaagcttaagtttgagatgtccttggaaccaagtgaatatatacatatggagatcagagaaagactgagattgaaaacatcaaattaggagatgcaatttaaaatcaaggcactagatgtggttacctaaggagttgagagacagaaggagccaccaggcagtaaaatgagagaacaggggagtatggagtttcggaagccaaaattttagaaagcgctttgaaaaggaggtgatcagtcatggccaatgctgctgaaacgtcatataagctgaggactgagaagtgacaatcaggtagagcaaggttttggtcactagcgactctacataatcgaatggaactcgattatgtagagtgaatcgagtggggaaagtgagtaaaagcaagattttcaagttttcatgaaaatgggatagtgactgaatagggacgtggagtctagaaggttttactattatgtttttttaagatagaagacagtatagcctattgtggtgaatggaaatgacacagtaaaaagtgggctgagaacccctcaggcttgcaatgctaatgctatgtgactgggatgcagaagtccccaaagcatgcagagctcttgggcctcccttaaaccccactgagagctgtatcaaggccaaggtggggcaagtgttaccaaaaacacagcaacaacacagaaaagaaacatgttaactttgagagcagtgattctcaaagtttgagagcagcattccctgagaacttgttagaaatgcatattcttgggacccaccagtccaactaaatcagaaactccaaaaactagggatctgagttttaggatacgtgctaaggtttgggtcccactattctaaaggaactcaacaaaaattcaagtaaagatgaaaccgagtgctgactttgttccttatgggcctaaaataacaaagctttaaagacaagaggggatttttcaattgtctaattggcttcgaaccttacctgtggagggatcccagacacagagaaggtgtctgagttgtccaagtcctccaggccggactgagaggacaactccaaataatagagaaaaaaaaagagacagagagccagggatatggttgttttgatgtgccatgaagttgcagcctttctggatttttttagtatcgatttatattgctgtttgtctaccaatactcaaatcagagcaagacggtccgccttacctcagtctggctcttttaaggtttgattttggttttggggactgcagaggtgcagcttcccacggcagaccaagcgcctctgaggaacgcagcagcttcagcaggtacaggaagatttcccgcagccggaggaatctcctagtgctgggcctccggctgtgacttttgccatttcaaattcacttggcctctagggagaggcagacagcccgacgctgagcgcgtcggagccccggctccctctgcttctggagaggagatttagccttaatttttgtgacagatggagttgatagtctctccacggaaaggggaggaaaaaagcgccagtttttgacaggccgcagacgcccgctgcctctggtggcggaaggctgcgttgcgccccagttaaggtagctcggaaactccctcgccgagaaggcagaggtttcctctgcagagcagcctcccttaaatatactgaggggctgaaacttacactttaatataaacctttggtgcgtgcccatttattccgtcttctgtcctgtgactgcggccaggtggtaattgctcgacattcctgaatatttttaatgctagttaaattttttcattattgcacgtgttgcaagcttatcttcctaagaaattatttcggttgattggatttcggtcttgcaatttgaaaacgatgcctggcgcacgggcggtacctgccagatggcctagctggggctggggggtggcgggcgggttgtaagcatctcatcaacatctccctaataaagtgtgtgcttctttcttgtatgcttctttaaaacagtttcagtctcacattttatctctggattctccccttcccctctgtggtgatcaagacccaaagacagggagcctggaagataaactgagttctgaatccagtcgaaagcacagatgggggccagcgagaattaataaaactacaaaaaaaaaaaaaaagaaaaaaaaaacaaacaaaaaaggcccgtggctgagccggatgcaaacagctgcccctaagccctgcccgctggttctgtgcgcgagctggggctgcatatccgagcctccttaagagtaggaggagctccgggcctccgtcaggctccctaagccgttcctttcaagccctgaatgcctgaatgtgagctgcccaccaccctcccgccctcccccactccgcaaccccactccagcggctcgtaaaaaaaaaaaaaaaaactttcaacaacaacaggcaggaccaatagcatctcgaaaagccgggaaagggggccgagcaaagggcgaaagagagtggagaaaggagaaagcgggcaggctcggagcgcgcggggccggggctcggcgagccggaggagcgttgctaatgtttttgtttgtttgcttttccatgcatgcataatgagggggcaccgcggcaccacgcgggggctcccggcccacttttgtatttaaagcctcgctgctaacgagtctgcagccgggctcagcggatccgctccccgggctcttggtcacccgagaagctgccgccgagtgaagccagggagccgctctccggcagcgccgactttcttgttctccccgcgcttcccggaaagagctccccggagctctgcggaggccggggttgccgcgggcggagggggaggggacgcggggcggccgggccgcgggaaggcgggcagcgcgcggacgccgggccaggaagcggcgcgatgcgagagaccgcggcggcggtggcggcggcgaggcactgagcccaggaggaaggagccgccgcggccgcagcgcgagcagccggcacggggacagccggccgcacaacggatctgcaggcgcggagcaaaatgcacccgccgcgccgcgcggtcctgcagccccgccacggccccgcggcccgcacccccccggggcgacagtgagcctctcccgccaccaccgggggccgagcggagggctctcgggtgggagagcgggaccagatctcgacagctgttcatttccaggaagccaccgcagccagagcgaaaggggaccttctgccaccagcggggcatcagccagcggcgcgcatggatttatgaagacactcatgcaagaagtgggcaggacttggacaaacttttccaccggctccgcgtccgccgctccccgcgcctcgtctcctttcccctcctctcccggcggccgccgctgcccgcgatggtggccgcgctgctgggcggcggcggcgaggcccgcggggggacagtgccgggcgcctggctgtgcctgatggcgctgc

SEQ ID NO: 1883632 - DNA, 4001 bp, Homo sapiens
agcttctggccttgacttgtgtttaccagaactttgtgtctacatgtacacccaatttgactttccttttggaggaaggtacagagaacatgccatgattattatttattaacaccctcctgagacgaacgtgaatttgttccaagttttatttttcacatttagtttagaaagcaatggtttttgggataatgagttaaaagagagacagtggagagagtccctgctttcattttccccccattgaccaaagacatataaataacttgccacaaatgacaaagagatctgctgtgccctgccagtctgtgagcagagaagggttattgtagagtgtatttcagtgtctttggccattgctctggaggctcaatgtggcatgttaggcagggattgggaagggggtaaagggggattgtctcgaggcagtgcaaagggttaacctttttatagagcattgtagatcatctctatacgtttcttcctttatagatgtaaatcagctggagttgagtttttttttttaaggtgcatttgaatcatgttttgattgctgtgtgaacagcatacacctagaccaagtgagatccattggtgctaagcaatcagggtcccaggcagccctgggactccatgactgactcttacagggtccgctagagcactcaacacagaatgaccagacactggagccctttgctgcctacacgtttttcaggcctgttgaatggttgatgtggtgtttgaacattttctacaaggaaacaattatccttgagtcagctttccttgctgacatttttgtgtggcttttaaatggtgggagcctcattggtttttaatggaattcccattaaaactatgtcatctcattggtctttatcgacattacaatagtttgtctttgattttttttactcctaaaactatataatggttaatttcaaaactatcccacatgtcacatcttaaaacatacatgcaaataaggcagagtcagataaaaaccatgcctcgagtcatgtacaaatgtgttcatttttatttcacactggattatgcaaacaaaattttgattaacattttacttctagggtcccatagctgaaggaaaatgggcaattggggttattcctttggcctagaactttacattagaaaataattattgacacaaaatattcataagaggagaacttctagctaagatattaaggtttgctgtaaaataagtaaaaagtcacaattttctagagtgtgcatgcattggaatatgaagcactggctaaagggcagtggaaacccaaccttatcccttgttttgtatccagggtcgtaccttgtacatgtgcttaggccagccccttgttacttgagctttttggtgattagtcagaaaatactgtagtaatggggaaagaacttaactgttccagaaagtcgatgactgtttcgtattcatctttgaacccccagtagagtgaatggcacctaagtgaccagcagtgtggattctgagttgaatcgagtttccagcaaggctgacctccccagataggatctttcttcctttgtttcaccctcgggtgtcccagaagtctttgtgtgtgaatatcataaaaccgcccccagattttggggaccccgtttgccaccagatgttattgatgctggagttgaacctgcttgtcttactcctgcctttgacacatccttgggtaccacggtgtgtccccgcactgtaggccagtgagtggctccagctgcctctggtgacttgctgcctgggtttgagctccatccaacactcacctgctgggtggccccctccagtctcccctttccaagactcagttcctccatctgtgaagccggagtgattaactctaacggggctgtcccttggttgccgtgggatgcccagcgccaccccacactcaccaagtgtgagcctctcttcaggattagctggttaagggagaggggcttaaagcccaggacacgtcatgacatcatgaaaattgttacagcgaggaaaacagacgaggcctccctttttgaggggaaaggaggcgcagtaatttttcttctgctgtttattgtttttcaaaaacagaaagaaagggctttcagtaataaaataacatctgctcagtaccctgtgtgtgcatgcctccctatgaaaacccgtctgtctgagaggtgcacggcccacccggtggtctcctgtcccgtctcccctccacgctcaccctgacacagactcctttcaccaccgagcccactgtcatccccaaattgttcctctagccagtagtgtcagaaggagggtttcgcttcttagagagacagaagggggcctgtgctccccctccctccccacacttcagaccccaagagcttaaccattctgagcactaacgcaaccagattttttttgaagcctttgaaatcatccaaggcatgtcccgaaatgaaataaacgcttctcccttcttactagccgtgtccaacccatacatgtacagcttgttcaaaagctgtggtttcctgagctgctggggcttgggagctctacttgggaggtggctgggaggggcaagggtgggtggggggaggggggtgtcccggagagcgtgcgcaccagccagcgctcagaccctaaggccgggtcaccggggccctgttttctcttccaacatgcttatctctttacagctgcagccaaaccgtcaggtctgtaatgatggttttgattactgaggccaagcgcagctgtgtgtggtgtgctggcgggctcgcccatcccccaggcccagaaagctctttcctccccctccccggcttgtggtttgtcatctgttctcacagagcctccttgtattggcctgtggcttcctgttctcaatcggatccaaatttaccctgtgaggtatttccctgcgtgcacacgagcgccttcccttccttctcctccaccccctctcctgaggaagggtggcagagaggaagagagcagtcgagagtgaataggtgttggctgtgatctttacacaacctggcagcggatcccacagcttgtgttagctccacaagtcgaacagatggaacaaattgacagaatcgtgttcgctcaccctgggctccagaagcagctgagctgctgtttgaagttgggggagtttgaatgtgctttttcccctctgtgtggaatttctggttgtattgaagaactcatgacttagcaccccgagtggcacgaaacggttaatgaccctggtgcgtgtctttccgtcgcactcttgccttcttttgtaattgtcatggggcgaaaggaggagagtggtttttcttaagataaaatatgagtatttgtttcatagaaacagataatctccttccccccttttgagcagtggctggcagcagctgcagttcattcatgaaagatccagtgctttcagtcaaagtggatgtgggacacagagggtgtgtttctgatggacgtctaagagccccctgccctgctcagtctcctcagcccaccccgctaggaccagggtccttctggctgcgagttataatgtgttacaatcatttgccatttctaggacttcaggatgcatttgacagtgactgggaaaccgggaaaatcatgccaaacaattacaagaatggatcagacgatggagtccttgcctacaaactcctggtgcaaaccggcagccgcgataagcccatcgacatcagccaggtactccagctgctgggcactgagggcgcttccagggctgcggggccgctgccctggtggaggctgcttgacagcgtgtgaccccaccctgtgctctctggagacctaaggcactgggagctggtagaaagaatattgggtgactctaattcacctcctcccaccagctaattgtgtgacctcaggccagccagtgcacctcactttcctcatctgtcaaatgggacaggcgtgttcctaccaccag

SEQ ID NO: 1883633 - DNA, 4001 bp, Homo sapiens
gagcacagagcccggccctgcggggggacagccagcccaccactgaccgcacagccactccactgtgatgaaggaagggggacacggagagcacagtataagcccccagactctgagtcgtcagatgctcccaggggaggggagatgacactgagccccagaagagggagaggttttaggacgaaggtggggtgggagggaggtgggagggaagctggcagaaggcagcttgtgcactcagagcctcctcccttaagcgggtcagaatcctcactgcacaggtctcccccaacaccagcactgggctcggcggtgccctctctccattctccacccagaggcgctgccctctgaccccagagtcaggcgacctcgttgccagcacggccgacatggtacagcccctcaggttttggtttccttgcccaaagtgtcttttgttttctaatatgccttgtacttattgattgattggttgattgagcgctacgaaagcccctgagtgggcaggcctgggttttattactgttaccactcttctacaatttactcaacgtgtgatcccaatcaggcagggcaatattccaggatcggcgctgaggactggtggaatgaattgtctctgccatggattcccgcggcttggccactgagtgtggttttcggggcctgtggtttctgggatctgtgactgcatcctggtctgggggccactgtttgggctgtccctgtgtcctccttctcgacagttggatggggggctcatgcctggcatctcgcgggtcccacctgtcaggtcatatcatcatcctgaccaggaaaagggcaggaagtggagaggagcggggctgggctgtgccgccgctgcgtgctcactcccctgtgaccgcacgctgagcccacacctagtcctctgttcttcacccctctctggctctggggccccagacccttcgggaccagggagctgtgtagagtgggcactgggctccctgcccggcccctgccgagctccttctaggacccggtgctgagagggaggatgtgggtctgtggggaggtggactgggatgggcaggagtcctggctgccccttacccgagaggaaagagccatcggaaagcttatgctctgggtcccacaggattttcttttctaagagcctagaggggtgtacttgacattgaataagctacatggctttgaagtgcacaacttgagtagtttgacagaggatgcacccgtgaaaccagcaccacaattgagacaaggaacagatctgtcacccccagaagcttcctcgttgcaatcccacccacccccacccggccccacttatcgtgtccccaggcaacatctgtgcttttctctgtcactatagcttattttcctaagattttttacgagtgaaatcacatcctatccactctctgctgcctgtcttcctccccccggcagacctattttaagggtcatgatgttgtactgtgcacagcagtttgtttcctttcactgtagtcatactccgtgtgtggatggaccacagctgtgtatccattcagcggagtcgtaccccgtgtgtggatggaccacagctgtgtatccattcagcggagtcgtaccccgtggatggatggaccacagctgtgtatccgatcagcagagtcatactctgtgtgtggatagaccacagctatgtatccattcaggtgttgatggacatttaggttgcttccaggtggggccatgacaaaccaggctgctatgaatctctgtgcacaggtctttgtgtagatatatggtttcatttctctcgggttaatatccaggcttggaaatggctggattgtacgataggtgtattagcccgttctcacactgctcgtaaagattgggtaatttataaaggaaagaggtttaatggactcacagttccacgtggctggggaggcctcaccatcatcgcagaaggcaaaggaggaacaaagtcacgtctcgccgggcagcagacaagagagagcgtggtgcgggggaactcccctttataaaaccatcagatctcgtgagacttgttcaccatcacgagaacagcacgagaagacccgccctcgtgattcagttacctcctaccgggtccctcccatgacacatgggaattatgggagctacaatgtgagatttgggtggggacacagccaaaccatatcagtgggtatgtttttaactttttccaaattgcaaagcagttttccaaaaaggctgcaccgcttaatccagcagtgcaagagaagcgggtcctccacatccttgtcagcactgggtaccgtcagtcctcttaggttgaaccaatttcacaggggtgtggtgacgtctcatcacgttttgttcccgttttccttatgactgatgacgttgagcatcttttcatgggcttatttgctatatccgcacatcttcttcagtgaagcatcctttcacattgtgtgcctgtttttttttaattggagggttagtttttttttttactgagtttgaagagttatctctgtgttccgagtaccacccctttatcaaatgtatgtgatgcatgagagcctattgctgctgtaagataattaccacaaacttagaggcttacaatcacacaaaattattattttacagttgtggaagtcagaagcctaaaatcaagttgttgatagggctgggttccttctggaggcttctggggagaatctgcttcgttgtcttttccagcttttagaggctgctgcgtaacaactcatggcccctcccttcatctgcaaagagtatgtctccaatcttggcttctgtcctcattgcctccttttcctccctgaccctaactctactgctccccatttagaaggacccttgggattacaccaggcccactcagagaggccaggatcatctccccgtgtcacgacccttcatctcatttgcattttgccatgtacggttgatggccttgggggccattcttcagcctacaacatatgatttgcaaatatattctctgagtctgtggctaggaagagtcgacgatgttaagctgcctattctcctgacattgatctgcagatgcaatgcagtctaaatgaaaatcccagcagccctgggtacaaatcagcttcaatttgtaataaaacagagctgctgggattttcatttgaactgtggctttctttttattcccttaacacagtcttttaaatggcagaactttttttttgtttgtttgtttgttttgttttttgtttttttttgtttttgttttttgttttttgatataggatcttgctctgtcacccagggtggagtgctgtggcccaatcttagctcactgcaacctccacctcccgggttcaagtgatgctcatgcctcagcttcctaagtagttggcagtagttacaggtgtgtgccaccacacgcggctaattttttgtattttaaatagagacagggtttcaccgtgttggccaggctggtctcaaactcttggcctcaagtgatttgcccagcttggcctcccaaagtcctgggagtacagttaggagccactgtgcccagcccaaacaacagaatattttaattttgatacaatccgttaatcaatattttgcttttggagattatgcttttagtatcctatccaagaaatcattgcctaattccaatgttttcttctggaagttttatacttttctatttcccactgagagctatgatctatttcaaattcatttttctatatagtgtgaggtagggaccaatgttctttttgttacatattcaattagtccagcaccacttaatgaaaagtctagcttttctccactacatttcctttgtgcttttatcaaatatcaatttccacatccacgtaggtctatttctaaaatctctattctgtgtcattgttctatttgtctgcttttacatccaaacaaccattttcttgatagtgatgctttat

SEQ ID NO: 1883634 - DNA, 4001 bp, Homo sapiens
ttcagcagtgccctttgacccatatgttactcaacaatttttttcggggtaggggagacagggtctcacactgtcacccaagctggagcacagtggcctgatcttggctcactgcaaccttcacctcccgggctcaagcgatcctcccacctcagcttcccaagtagctggaactacaggcgtgtgccaccatgcctggctaattttttgtagaaatggggttccaccctgttgcccaggctggtttcaaactcctggactcaagaaatcctcccatctcggcctcccaaagtgctgggattacaggtgtgagtcaccacacccagccttcctcttcattcttgctaagatggatcattctggtcctcagtcattcttagaagcatactatgccatttctagactgcacatctcactgctttaccatttctctaagccagcatttcttaaagtataggctctagaatcacctgcttcagaaacaagttgtttaaaatgcagcttcctgttgtcaattctaatgcacattaaagcttgagaaccactatttaagcaattggagtgttactaatgtcagattctaacacgcctagccttgatccttaacttataggaagggtttgggtatataaaagaaccactgccagagattactaaagctgtaccatgatttagaaaccagaacaagtatgtctatccctaaactgcttacgttcctagtgactcaggacaggtgtcgacctgtatagcagagaccagtagcttctgtgacattttctgattagtcagatcagaacttgtaattcgtttggtgtcagcctagccacgaatgagagaactttcctgtcattctgcacctctttgaagctagcaaggacagaaagtcaattctgcttatgattttccaatagctctgaacagttataattacagtgtacatctgtgagagcgaagctgcttttctaatctgttttcatattattttttcagcagcttctgcagacctaatagtaatttgggttttgactgaaggataccacttacatgctgagggtgctcatttcaaccctgtgtgtttttagcacattgacatggtgacaacctgagtagagtctgaaagctaaggcacaaacactatctagcaattcctggtcactaataaaggtttaaaaaatgtttgttggattttactgaagaagggccttgctttttgttctgggtttttgtttgttaggttggctggttttgagacagttttgctgtgtcacccaggctggagtgcagtggcacgatcacagctcgctgcagcctcagccttgtgaactcaagcagccctcccaccccagcctcccaagtggctgggactataggtgtgtgccagcatgcccagctaatgtttatattttttgtagagacagggtttcgccattttccccaggctggtctcaaactcctggactcaaataatctacctgccttagcctcccaaagtgctgggattacaggcatgagccactgcacccagccacgtcttactttttaaagacagaaaatgtagtgtttagcaagaaatatgaattgtactttttttcagttgcctaaaatataaacttcctaaaagttaaggtgtttatttatgaatgcatgtcagtgagaagttcttttttcccaaggtggtgttatggagggaaagtcagtgagtcagcctatttgccgaggccagcttgtccttcaggcatttataccaccagtattagtttgctaagctgcccttacaaagtaccatgaactggatggcttaaacaacagaaatttgtctcaccgttctggaggccaggagtttgaaatccaggtatcagcagggttttccctctgaggttgtgaagaagaatctgttccatacctctctgctagcttctggtggtgtgctggccgtctttgacattccttggcttgtaaatctctgcctttatcttccatggagctttccttgtgtatttgtgtctctatgtccaaacttcccctttttataagaacaccagtcataccgaagtaggacacaccctattccactatgacctcatcttaactaattatgtctgcaacaaactcattcccaaatagggtcacattctgaggtactgggggctaggacttaaacatatgaattttagggagatgcaattcaacccataacaacatggctctgaataaagctttgtttttctgagtaatttttgtttgtttgaatctgacagcagcaagtatagagattgcagagtatctggcagcaaaccactatccatgggaattatgccattgaggtgtagtacagagaaataatagtgcttaggccaggaattgtttcctgttcactgtgtcttaaacctttattggttccattagcttacacagcaaaaggcatttccaattcagcatattttatttccagtatgccactctgatctcaaactttagttagagaagaccaactaaggctaagaatcaaaacttttggaagctagcaagacctgatcaaatccaaactcctgatttttacagagaagggaactgtggagtacaggaaaattcaatgtcttacccaaatacagtactcacagctacttagtgccatgttgctaccacaaccccactaccctgcctcttgctgtagctccttctttcacatattgtactgctcctctgagccacaggggccatcggtgccctatgacagtggtccccaacccttttggcaccagggaccagttttgtggaagacaatttttccatggattggacggcagagtagggatggtttcagaatgaaactgttctgcctcagatcatcaggcattagattctcatgagaaacacaaaacctagatccctctcatgagcagttcacaatggagttcatgctcctttgagaatctaatgccaccactgattactgcctaaggcagagcttaggcagtaatgctcactcacccaccactcacctcctgctgtgcggcctggttcctagcgggccacagaccagtaacagtctatggcctgggggttggggacccctgccctatgattcaaaaggtcccaattcctgttgccttcatggtgcttttctctagctagagaacacagtcaaccctgttttcaatgtgtgctgtctacctgggaatgtttcatggatggcccatactgccattttttaaatctacctaagcctcacctctgggatctacctaaatatattctctcttaattccatggatatgagctctaggaagggaactaattataatgttagactctgccacatatgaacagtaaaacacattgtcctagagagcagaagccatccagtattgtgaagcttaatagaaattactttgatgggcctagcatggtggctcacggctgtaatcccagcactttgggaggccaaggcgagcagatcacctgaggttgggagttggagactagcctggccaacctggggaaatcccatctctactaaaaatataaaaaattagccaggtgtggtggtgcttgcctgtaatcccagctacctgggaggctgaggcacaaacatcgcttgaacccgggaggcagaggttgcagtgagctgagattgggctactgcactccagcctgggtgatagagcaagactttgtctcaaaaaaagaaagagaaattactttgatggtgaaggtttttattttggtttgctgttgttgttgtcttggatgttattttggtggcgtatttttttgcatttatatatttcataatcatataattattggcttcttttttttttttttttcgagacggagtctcgctctgttgtccaggctggggtacagtggcatggtctcggctcactggaacctctgcctcccaggttgaagcgattctcctgcctcagcctcccgagtagctgggattacaggtgtgtaccaccacacccagctaattttttgtatttttagtagag

SEQ ID NO: 1883635 - DNA, 4001 bp, Homo sapiens
tggtaccacctctaggcccaggggaatgaggagagagagagtgattactaggacccagaaggagcaaattttcttgagagggctgtcttgagaggagcagtgaccttcattggagagacacagccaggttgaggcaggggatcccagcagaaaaaatcctgtaatgttgttttctactcatctctgatttcttgctgatatccccattgttaattctaacgaagccagaaagcaaggaagagcccattaatgtcatctgccagtggggaagaaggcaggtggaaaggtgtaggtagggatttggagttgcaaacaaatggcacaaagtatattcttccaaaaagaagtcaagcacttttacaagaatatatagaatgttagaaaatggcatacattaaaatactgtgaaagaaaaaaagaaagaaaaagaactgatgccattgaaactaaaagactgatttatacaattgctcacaccagatggaaaattatttatctctaatgtaatcgttcagagataggtgggtagtctagggtcagctctgctcagtgaggccattgttctttctttttgctttgatcagcaccacaccatgtttaaattttagtctgtaggaagatcaaattacggtgtggggagcgagcagcttccccttaaggaagtggctgagacattatacatctctcttctgtagctcctcggagtccctgggtgttggacccttctgtgacctccagctatttgattcactttgcctgtctgttaggtctggcagttggacacctagggcagattcagccttttgccctcagaaagctctctacttggcctctactgatcagccaggcttcatacctaaattgtttggctgtgtcatcctatctgaacttaggtgaatgccagagcacatggtgttggggctctgagtgcctgccaatgggtcaaatacaatctaggtgtgcaggtaattctccagggggtaagtttggaccaacatagaagaatggaggaaacccggtttctctcttctttatcatacgtaccctttcatagtccttatcaaattctttgaagcacagtgtttcttggtagtccatctggagaagttctatgcatgaaatagatgcaactgccaaacaatcagctttgtgttgttgaaacatcattttacatcttgcatagctcacttgcctttgtcctcatcctggatcctctgaatttatgccttgccaaaaagcatcttcctttcatccttgattcaggctttgtgttctagggaagctgatatagaacacatctattcgcatttagttgatcagtcctggtccgtgataaaacttgaagtagagaagtgttttgctgaataagaaaaatgagaaaattatggaattttgggaatagtgagaaatttttgccaaagaagaagaaaataaagtcaggaatgagaccaaaacaacaacaacaacaacaacaacaaatctaaaacaaaataaaatgtgtaacaaaactctttatatcaagtagataaaaaacttgatttaacttttacagaagccaccacaaaaaagaaaatattatttatttttgtgttcatgatacaatgagaaggaaaaaaaacacacacaaacccaaatctttaggaaaattccaaattcgttgtataaatttcaattaaattttctttctgaatcctgtatcacttatgaatactatcagaaataaataacaatgtatgactaatagtgacttcataatgaagatatttgagtatctcactcaataggaagtatagaggtaagcatccaaaggtttatttggtggcccttcaggatcactaacgatccaagttattttcatcttttgctctcctatcttcagtacgttgcttttgatcctttagtttgtcttctcttggtggtgagatgcctgccagtattccaactatcaaaggtaggaagtggggaaggaagtacagggcaggagagaatttctgctctaatggctttcatgggattgcggaaggtctttcctggaattcccctacatcaacttctgtttatgtcacactggccagaactgggtcatcatggccattcaaacctgcaagagaggctgggagtgtgagcacctgcctttttgagcctgagaaactcataaggagaagagggttgagaaaaggcagagggagacacaactggtagtgtttatttttctttatagttctcataatgagaattacctgtgatatactgaataatatcctaggtaacacatcacagtagatatgtgacattccttatagctatacataagtgttttccatacatgctgatgacattataccaccatatgatgcagtagaaataattccttatagtgggaacaggtaggatagaaatggttgcagtttagatgtgtaggcaactgacctagcttgcatattttagaacatgggacagtttggtctgagtgttctaaaaacctgtccctgaatcgagatttgtaagactaaatgtacatgttacacagctccagattacacttcatagtgatgcttgagtatgactttgattttgccatttctacatagacccagtattactaggagataatcaagttaggaataaagttgcctgatattggggggataactaagaaatctagtatgaatgcatgcatgctgtctctgcttggatataattatgccagggggccaggattctgttcagaagattgtttcaaattggcttcagtgcctgcacaaatgggcaataaaacccccaagatatactccatattatatcacagaaataattatacctgaagaatttaaggcaagtaaaatcacacgcttgcctggacaaaagtaaaatatccataaactatccataaaatgctaagctttcagtagtgctattttctggtgtaccctccagaataaactgtgagtgaatatgcaccaaaataactaaacaaggtaattcattgtatgcggttgttatttatataccaattaaaagtaatagaatggcttccaaaaataactactttagttttagaataatttctctgcactcccttttggcaataatcagcaaacagaattgatgattcaggccacagtagtatgaaataataaaactatgctgtctttatataataaaatatttgccttttttgtgccagttttgcctttttttcttaaaagtaaaataagctaatatttattaagccctgtacttacttaaatctcttgacaccaatgacatagacactatcttcaaaatgttaagtgactcagaaaagttaaggggtttgtccaagttatgcagttgtaagtggtagatctgggataatgaggaggcctgaattttgtgaatctaaaagtggattagaattattaggaaacaaaaaagagaactgcccagaatttctgcttagcacggactcaggatctctgagttcaaggtcatatgtgagggaggtacaaagtgtctgtttacctttttctcaggttgtgtttatttcatgggacaaagcctatcaatgtcataaggtgaagacttcacaattttttttcataatctatctccacctgcttcacagtaaatgaaaatcccactcatattctagcattgggctgctggtggtattgttggctttcaccctcaactctgttttcatctgtgccccaatgataacttggatagagagtatgtcaagtattactaattagaggcaattgtaaatggaaagtcttgtttcatggatttttaaaatgtatacttatatgattatttactttttctcatatttctcaattcttaattctatcttttaaggccgaaattctagttttatgcattataactttcagtaccctgctcctcccctacccatacacattccatgtatagtacaagcctagaacacacatacacatacacacacactcatatactgtgtataccacaccatcacacacatttacatatacctg

SEQ ID NO: 1883636 - DNA, 4001 bp, Homo sapiens
catctttataaattatgacaatgcccaagaacctcaatttacaaaattgtctttttcacactactggttggaaaagatttagaaaaatggaaagttttccccaaagcccctttttttaagaaagcgaggaaattctccacaacctaatcccctatgagactctctaacgttagagaaagaatgaaattagataatttaaatttctaacagtatgtaactgtaggagtcagactgtgacttctacctcacatcctacgagcagtgaattcttggtgtctccctctttctattctactgaacacaggaaattgaaaatgtcaattagaaaatcttatgaaattggaaatccgaaaactagatggaagcttgatgtaattacagaacacctcttaaatgggcccattgttatcaggcttagaaaatagtgcaaagtcaaaagaattgaactcttgttcactttttatggtaatgtgttcatgaagctagatgcattatatagttttcttgtttgacactcatgacccttgagatattggtgttcttatatcatgtcagatgaggttattgaagttactggggctcagacaggtaacataactggtgagtgagataacatgaatgcattcagacattcctgattccacagctcatatgcttttcaaagcaccatgttttaaaaaaagtttagcatatgataaagacaaaatagattgggaagtcctccttgatgttttcttttctttcacatctcacattcaaaccttttggctgtgtctacacacttatatataaaatccaatcacctctttttttttttttttgaaacggaatctcactctgtcacccaggctggagtgtagtggtgcgatcttggctccctacaagctccgcctcccgggttcatgccattctcctgcctcagcctccccagtagctgggactataggtgccttccaccatgcctggctattttttttgtatttttagtagagacggggtttcaccgtgttagccaggatagtctcaatctcctgaccttgtgattcacccgcctcggtctcccaaagtgctgggattacaggcgtgagccaccgtgcccagccacctctcttcttcattgttgttatcatactactgcaagccctcagcatttctttcttgaattacacaatatcttcctaactggtctctctgtgtctacccttggcaacagaaacttgcatgaagcttttgcaagtgtttcctcccagtctaaggcttgtcttctcattctcttgacattttttttcatagagcgaagttttaaattttaataaattctaacttatcagttacgtctcatgtattgtgcctttagtgttgtatgtatctgaaatgtcatcactaatcccaacatcatctagattttctctgatgctatcttctaggagttttatagctttcattttacatttaggtctacgatccatttttgagctaattttcgtgacaggtgggggtaaaatctctgtacagatgcacttttgacatgtggatgtccaaatgttctaggattatttcttgaaaaaactattttttctctattgtattactttttcttctttgccaaagatcagatgactaaatttttgtgtatctatttatgggctcccagttctgttttattgatctatttttccattcttttaccagtcacattgtcttgattaccatttatagtaaatcttaaagtcaagtggagtttgtttttcaactttgtcaggtacaccccttcctctgatctggttgttctctctacctatatcactcttcctacagatgtccacttgcctgattctcttctttattttcttcttccttcttcgagccccaccactagccccagatggtcccgctgatgataaaactgaaagtaatacatcacattttctttgacctctccaaccatgtgttgtgaaaacgtagtttcctttgcatgtggtctcccatttttgagatctgtctaggtcacgtgatccatccgttgcttcagtaatcagttaagaggatgttaccgtttaaatgtaatcagtgtagcaaggggtagctgtaggaagtttgcacagaaaaagagggctgacttattacccaggatatgtgtctcatccctgtacaatgactggaattactttgctctgacagacaaagacaaggttattcctacctcagtatgactattgactatgaacctttcacagacaatttaatcagcacctcaacctagaaaaagtcccagccattcatggacctgacctaatacactgcacagagaaaagaaaaggaaaaacaaaaacaaaaacaaaaaacatttacaatagtagttaaaaataaaacccctagagtagagtttgtggttctttatggaatggccattcacttttatactcttcaagttatgatctagcccatttgtaaactctcacgtagagttcctactgggtgcctgctactcactgaccctctacccaccttctcctcacctatcctgttaatatgtatgccataacgcaaatactatatggattacatgctgaacagtcagcttcccatctgcttccccagcttctcaaccaccctctggattatgtccagaaagggtactctaggaatgaaggcagccaggcaggtctgtataaaaaactatttcatgagagtacattaagattgcaagctgcagagaaaggaaatcaaatgacaacgtttatctatcagtataatatgaacgccagtcctggctcagccccttagtggtatggctagaatgaatttaggcattaatccaagccttggttctttaatacataaaataataatgtattattattttatgtattaaatgtattattataataataataataatactcataaaatcgtaatgagtattaagtgatatgttgatgacataaaaatctatacctttaacccagacatatgagttttagacccatatacctaatgatctcaaaatcctttctttgatttttaaaagatacctcacaattttcatataaaaaaaaccctcataatcttaccccttctcagtaaggatacattaggtaatgttgcagctacagacaaccataaactctcaatgcttaaaaccatgaaagcttatttctctcttgtactacctgcccatcttaggtaggcagagggctctgctccagggcatcctcacttgaggaccccaatggacagagcctccatcatcaggaacatcactggttgctgtggcaggagaaggccacacctaggttcttcagaacttccatcccatgaataacacatgttactgctatgcacatgccattggccaaactgtgccatgctaaattcaaatgttcagaaaaatacaattctaccatgtactcacagggagaaaaaccagaatattggtaacaggcttaatgtctaccatccttcccaaatcggatccacctccactgttttcaatctcagtggagcagattggctagaagctcaccaatgccaggacatagaggaagactttatttcccagctctcttgagacatattaatggtgaattgagtgtgaacagaagtacgccaactccagtcttggccttaaaacttcccgtgagatcttcacttgttggctcgctaaaagcaaaagatcagtgtaggagtctctcaagaccccagaagatagaaagatctggcattcatgaatggccacctaatgaatgccctaatgtattgtgaatgagaaataaatatttacttggttaagtccctgagattttctttccagcaactagtacttcatagcctgattactgtactcaatgagagacatctcatccacccaagcacacaggccacaaacgtaaaagtcatccttgggacattctcttcactctcaatatcccatctgtcactgagctctgttgatcttgcctcctaaacatctcttgaatatgtgtatttctcagtttcca

SEQ ID NO: 1883637 - DNA, 4001 bp, Homo sapiens
tgtccggtcctggagctgattatgggatgaactggccgcagactggtatatgtggctcaatcactagataatttcaaggaaaacaggttgctaaaggccctgggatcctatgattccaaaaagtcctgtatgtcgagcaaaactgtcatcgtcaccaaatttaaccaaggaaagtgaggcagtgctttcttcttttttgttctccatgttagcaaaatgaataatacagccgccttcccaactgtacttaatgagaacaccacaaagctacaatgcccaacttgtttaagaatttactatggcttcgtacagactggttaaaatcgcttttttattttttcatttataattgatatttgggagtgatgcaattatagacaaatcaatatcatacatatttaaaaacaactccaacagtgaaatgtattatctaaaatgacttctaaaactatttcaagaaaaagaactctgtaaaagcacatctttaaataaaatgtatgtctgtttaaataagctccttcccgtaagtctcttgaaggtaaaataataaaataataacgtgggggttattaataccaaaaacttaactagtttccaacataagataaatacttgtccaagatgtgcccttatggaagaagttaccaccgtttggctaaaccagcattattcattcactgctcatgtggaaatgttcctcaaacaaaagcataaatgcggcaatactgacggttttctgctgtgtatttagagacatacacaaaaaccaaagactctcagcattaattatacagcatgtcttgattattacaatctcaaaatcccttttaactcaagttccacttcataagaaccttagccacgtcatttacctaactcttcccatttagctcttcacacagctcagctcaggagtaccacccagactgtgggggtggggtgtgcgggacaggtttttcaggtctcagtgctggtttattacattgtctctctttgttcccaggaattggaaacagactcgtagtcttgtagctgagaagttcctaaaaacctcagccgctccccacctctcccaacacagcgaagtcaggacttttaagacgaagacctgggatttcgcgccccgggcaaaacgtctcatctgcggacacgcgtgccttgttctggcagcaccctgggaatccttcccgccaaacgggacaggacgatctttttgaaaagtggcttgaaatcctgcaataaaaatcaaatcctaccactttgggtgcaaagggggtgggtggggtgggaggacatcacagtcgtctttgctggtgtacctacgccaaccgtggcgttgctcatttacgcatttccaactaagtgcacagtccactccctctcgtacatccgtaaaaaggcagctcaaggaaaaacaaacctcagataaatttttgaatgtggcctcacttttagagtagcatcaaacaaggggtccagcactgaaaaacacatttgctcgaattaccaaaagcccccctccgcctccaataagaaactccgcagctagtctttgagttactttcacttagatctgaggattttcattaaagggaaaagtgagcaagtggcaggatttttgctaactcgagccctcagcttccccggctgcacgctcgccagtccctcccgctagcgcgcgcccgcgcgctctctagccagccccacgttactttgattgacagcccagccccgccgctctccttcccaccgaccttcccatcatcagtgccaatctccgcgaatcgccgcttcccattggctggttttggcgtcccgcggctcctccaggaacagttcctcaccaagcccgggaggacgcggctggcggaggaggggccgggatgggaagggagaccgaggagacggcggagatggaagcgagaggagggggggagggagaacgccccgtccggcgctgcgctgccatacgctccggggaggagcgcgtcagcgccccacgttggttgcagcgcacgcgattggctgatgcgggccttctgccccccccccaccccccaacctcccgggctcacgtcccccgccggctccgcgctcgcgccccccgcccgaacggggctgggcggggccggcgctggttagctccggagtgtgaaaccgcgtgttaatgtaagcggcgcgagaggcgcgggcggcggcggcggtgggagcggcggctgcagaagcagcagcagcagaaacagcggcgggtactctgtgccccgcgtcccggaggcagccgactgcgccaccccaccctcgcacggccgggcgggacccgcgccaccagcccggacctccgtcgtcccgcggcgaccaaaacccccgctggccccaccgctgtgactactctggactcgcccgcagagtttgcccgccggggagggtggccgattggcggagcgcactcctgctgttttccccaccatctcgtggatgtcgtccctcgggtggtgagagaactttgcagtgggctggagcgccctttgcggagaagcacacgaaggtgaaggaaggaaagaaagaagaccgaggaagaaggagctcggaagaagggtccggagcggccggtccggccgtgcagggcgagtgcgcccgaggcgcggcgccctgatgctccccgggctcgaggagcattgggcacttgcgggactgctctcggtggagtagccccgtcgggcccggagggtttgtgcaaccgcggagaacaccgagtgctggtcgcacggggcgtgccgagccgcctcccggcgcgccctccgcactttccccgcctcgtcatccgtcgctccccggccaggagcctccgctgcgtcttcaacctcgctcccctttgcgtcccgggagcctgcgagcacccggccgaaggcgcagccgaatcttgcgggagtcgccccgaaagcgtcgggtttgtgtggggttagcgggggccgccgcgccacctgcacctcgcccgccgccgcctcggggaaagcccgaagaggaggcggaccaggagaagagcaaagaaaagcagtccgtctggatttgtttgcccaggactggcgccgcgcacgcggatcgccgaggggagtgcggtcggagtcaccgcgcccccgcctccccgcccgggcagctgaggccgggggttggagcgctgcccccgcgcacagtccccgagcgcccgacgtctccgcgcaggttcttgaagcagctgggcctggggcgcccactaatgtggccctgagggccggagcccgcaccgacgggagcgggagccggagcagctgcgggcgccgagtggccggtgcgcccggcggagcgcgcgtgcgtggccagcgcgctccccgcttctgcttggctttccggcttaattttcctcggcgggattaaagttggaaattgaccggagaattgagttgccggggaacagagccccggccgccgccagagcgatgttcccgcagagccggcacccggtgaggcgcggctgggtggtggtggggggccaggatcgttggggaggcgcttctcccgggcggtagggagactggtggcttctgaggcccggcggaccttctcgccctcagcggtgtaaggctggggaggtctggggccctctcttcctggggtggggagtgggccgaaactcttaattttctccctccctttgggctccttcctacttgacgtctataccgagcggacaggggcgctggggaaggctggggtttctctcctgcagccatatcccctctaccttccccgagtgggggcagggcgcccccccctttgtttctcctctcgcctatttacatgtcaatgcggccccggttccggtgcgtctggaggtggccccggcgactctgggaatggggagcgtaaaggagttgtttttctcctctggtccccggggtcattatcgccgccgtgggggaaggggcggcgacaccgacaatctggcctggtcttccctggccgcc

SEQ ID NO: 1883638 - DNA, 4001 bp, Homo sapiens
aaaatatgtataatctggtggtatggcaaggaaatacagacatttagacaggtaaccagaatgcaaggccaaatgaaacagcatggaatatttagaaaggtttcacatacatatgattcaacaacaacaaaaaagatgtacaggaaggtttcacagaggcattgccccttgaggggaaacttgaacaattaataaaaagaagaaaaaaaaggcattacagtctgagaaaacagcatgagcaaacacaagacctcaagaattatgtcacgtggagaaaatgctgagttatacagtgggaccagagtgggtggggaggacagagccacagctgaagtcggaagcagtcagtcaggggagtggagtgcttccaattccccttcaatgtggattcctcctgcctcaaggtggattccccttaaaagtctgcctcctcccctaaaggctgtacagctatagacaaagtacttaccttccctgagactcatttgtaaaatgcagacaacaaaatacctacttcatgctgttcttgaggggattaaatgaaataatgtaggtaaagaactttacacaatgcctagactatagtaggcacttcacagatggtagttactgttttcctaggaagctgtcatggactgaatgtttgtgtttcacaaaaatgtgtatgtcaaagcactaacccacagtctggctctatttggagatggggcctctatggaactaaggttaaatgaggtcatagggtgtgaccctggagtcttgattcaaaaggattagcctttatagaaagaaacaccagagagcttgctctctctctccatgagcaccaccaagtaaaggccacataagcacacagtaagaaggtggccatttgcaagccatctgccctcaccagaaactgaactggccagaaccttgaacttctagcctccataactgtgaggaaataaatttctgttgtttaagccccaagtctatggtattttattatggcagctcaagctgactagtacggaggccttgaatggcattttaaggggtttattctttattttgtggacaatggagatgccttaaacatttctgagaaggcaagaattaacatttatatctgactatctgagagttgaagagtaatggggatgtcctctttactgacctcctgcaccctgcccctgcctcttcccatccattcatgacaaccagtctatgattaatatctccaatatggctcagatgagctgctcaaaatgttggcctatagaatacagcctggatcccttagtttggcattcaagctgggaagatcagaccctggcttttgccacatttgtgtctttgctcaaactgttccttccaccaataatattatttcctactgttttcagacagaatccaatttatcctttaagaccaatgcccatgccacttgtcttatgatgtctcctctccactgaacccctaccgtttatgcctctagcatgtcacggtggtcaacctctctattctaaataatgttgtttatagctcctctagtagactgtaatgacctgaggtcaatttttgtggctttcacattacatggcacagaaaagaatttgaaggaggtatgagggaaaatctataaagcaggagagaaaaacattaggcttacataggagagagacagtctggaagagaagagggtttttgagagcaaaaactcttattgaaaggagaattagagtcacttgatgtgggtgtgcattgtgaaacagatgaatttccctgcaccccaattccctacagagtctccatctccattatactcccatacacgtgaattctctgaaattcccatgagatactagatgggaaagatggttattgggtgacaataatcataatcatagttaacatctgttgaagacatacctggtgcctggcgctgggctacagtacaggttttcagtattccatatgttatgttcttttttagtcctgaaatgcctgtctttctgttgatataatgtggccatttaagtgttcttttcatctgaaattttattcagagatttatccagaggattatatgctgcattaaaacaatgagttcagtcagggagcattcatttagaaagtttctaaccctatccctcctctgtttaagactaatattaagacccttacttaagactcaggcacttacatcactgtagttttaattccaactttctggcttactaatgaggaaaaacaacttttattttgattttgaaaacatctattaaatccctataaaatatcttggtttttttaaaaatacatctgagataatctttccctacacatattttaaaaaccttaaaaccttttcctttttttaaaatgttttatttccatacgttttggggggaatgggtgatgtttggttacataagttctttgctggtgatttgtgagattctggtgcacttatctccagagcagtatacactgaacccactttgtagtcttttatccctcactccctttccaccctttcccctgagtcaccaaagtccattgtatcattcttatgcctttgcatcctcatagcttagttcccacttatgagtgagaacatacgatggacaaacaacttttttatgtcattagtcatttctatatttgcaccccagtctatcagagtcactggtgaaaactggcaaagggtgaaggagaactcagagaggaagaggctaggtgcccaggattaatcccagcccttggcatggagcctgcctgcctcctttttcccaggacccagttctgtctccttccctcccctctattcctccaaggccagccccaacctttcctaagatttttattttatctaaaaacttcccaataattctacttggagatacttaagccaggaggacaaaggatacacagtcacaagcctggcgtactcgcaagtgaaacaacacccagagacaaaatttatttttaaataaaatatggagatttctggttacatgaaataaatatacaaattaccagtattctcaatgggcttcgatgtgtgcagttagtagccatgccctttgctgagaactctacttgcattatctatgtcagtcctcatggaggggggtgctgaataattactatctatctcctttagcaatgggaagggtaggaagttaccctgggtagatggcgcaggacactgagagtcctgttttaattttgacacaaggaaaagagattttgctatatgccctcagctagcttaggtaggaaagggagaatctcccttcttattttaatcaatatgtgactgatttaaaggagcctcagaggcctttagcactaacaaggcccaatctctaggaatttaagaatgacagtgagtctggcactgtgaggagcctgatgcatgataccaccggggcgctgaaagaacacggcttatatcacatctcacaccctgcctagagaaagccacttttattctaggccaaattccaaagtgaaactggcaatggatttgttataatgttaaagttaaataaaattgttcccagtaatacaatcactttcctgcttttgaaatctttattgtttgttattacaaaagcaaataaaacacacagagactgttgctgtgcacacctgcagttcttattgcaagctcccccaaccctccctgagggctttctctagcagcagaaattagctcactactgtgcagggcaggcaggtgctgccaggctgtaagccaatccctgttccccccataacgaatgggagatggagggtaaattgcccctcgggtgggacaacctgaggtgtgttctacacagttttcagaggcccccagtggaatgcagatccagttgcccccagcagtgacctgctctgaagtagtttccttcctttccctctcccttcacctctgtcatcagggcttcctgggatcacctcccaaataaactacttctgcataaatcactatatacatctgagaaagc

SEQ ID NO: 1883639 - DNA, 4001 bp, Homo sapiens
aatctttttgtcttctgtcactgatgcatcctgacctccaaaaacagtgcctggtacataaagcactcaatagagagttgttgaatttcttgaatggatcaataaattaatgaacaactaaataagtgatcctggctgtctgagtcagttcaaatggccataacaaaatatcacagattaggtggcttaagaaacagaaatttatttcttactctcctggaggctgaagtccaaaatcaaggcactggccattttggtccctggtgagggctctcttcctggcttgcaggtggctgccttctttgtgtgtccttacatggcagaaagacagacagaaagagagagggacagggagagatagtgagggctggtgtctcttcttacaggggcacaaatctcatcactagggccccactcttataacctctttaaccttaattacttcctcagaggccctacctcaaaatactgtcactttagacgttagggtttcaacatatgcattttgggaggacacaattcagtccataacacggcatgagtgcacacataaatttccataaacatagaaacaaaaattccgtaaattcactgtggcttgtcacctcttgacatgaacttctctgagctctggccatctcaggatacctgcaccaccaccattagcaccgtggcctttgtcttcttcgcaaggtgagtctctcccaggttcccctgactgcagctctaacaagccaattgtccagtgtgaccaaggaagaagagtcttgcagattttaaccaagaaagggaaggtccagttggtcttgtcaaaagacaaaattccaacaaatatagttatagatctaattggcttttatttgcaattcatgaatcagggcagcttccattctacaaaacagcatgagggttcctgctggacagcagcagaacagtgggttttgtaaggtgagaacaaggaaataggaaaaaaaaaattttaaagtcggattggctaacatgaggttactttttgtgtaaaaattaaagcagagaggacttccttattgcactgacacaggtagactggaatcttctgttctcaagaaaaactagtctatgttggatctatctgcttccttaaagcttctatttgatgacgaggcatttagcatgaatgactccattttggtttggtctcgtctgttggggcctagtacaggagttcagtccaaaataacgggctcccataattttgtttaacagcctaaacttaagttcttcagtgatctgaatcctcagctagaccaaaatcttctgctaagttgctctccttttgactgtctggctgagctgttgaaggccacaaaatatttagcaggtaaaagtactgttcaggaactataataatttattttgtattcatggtgcttttctggcttatagaacattgttaataagttgctgtaatgtgcgcttatatttatgaatttataaacattatgaataatgtgatgattattgagaggcatattgccaaatatccataaactgatcattagtctatctatgtatttatcattgtatataaatatgtcagttttgttttcagggaaaaaactgtttgcaatctataacttccagggctcttatctctgaattgaacatgtgcctaggggtatcaaacagaacaagactccagatagtaagtaaatagtcctttttcttatgacagctacttaatctgtaacaaaacaagcaaacataaaagctaagtgatatctaaagcttaccaccaagaaaataagttagcaactgaacaaagcgccttccttcaggctagatcttacatacacacacagtatcgacttcaagccacttcagaagagactcagaaagctgctgcgcctggccttgcccttaggtttgttagcttcagggtcacagtcccagcggggagctgacccattagtcacacctgcttcacagccctgccagcactcacggggcccaatgagaagccacaggcatgttggtagccaggccaggagacccaagggccacgcccatagttctacagagtcatgttaaccgtggttgttatggagacagccagtgttcttcatgaatgtgtagctgttttgtcactctgcctgggtccggggacaggctggctcgttacaaaggcacccactactgaagacaggctcagaggcaggagtggcccagccctgccttgtagatgctgattgagctctgctacagaaaatgcttgatacaagactgtgcaccccacccccatcccaaacatgacttgactcttaaaacagccctgtataaccacaattggcttgttgcccttttgttggctgcacacactgatttttccacaaccttcaaaacccttcctgaagggtgttgtggagcaaatcccagaagataaacaccgtgtgaatgaacccaaacacagagggctgtgattacagaccctagagcagccttcgaagtatgcagtgttcttccctaaggcaccaccttctcactaaccaaaatgggactgactggtgctgagtccctctcgcttattctgctgggatgaagcctgctggatgcgaactttgtgctgtgctttttgtatttgctatttgcagagcagaacattattttttggtggaagatagagatgtggatatgtgagtccctgccctcaattaactcataatctcttggactcacatattaacaataagagggtggaatagaaaagcggctcctaactgatacagggttaagcctgcgtaatgacaaatttcagagctgaacaagcagaggacaaatcacttaaatgcatggctttagagcactgaggtcagaactacacagccaccaaaaagaatgaggcaaagcctgtgtgctgatatggaataagcctaaaacacaccagagactgacaaagtaaggagcagtacagcctgtgtgatgtgttcccttttgtggagaggagagggggaggaggggagaggcagggtgggaaaatgcagagaataagcccagagcattcctaggaaactggcaacagattgtttgtttgtttgtttgttttgttttgagactgaatctcactctgttgcccaggctggagtgcagtggtgcgatctcggctcactgcaatctccgcctcccaagttcaaccaattctcctgtctcagcctcccgagtagctgggactataggcgcatgccactatgttcagctaatttttgtagttttagtagtgacagggtttcaccatattggtcaggctggtctcgaactcctgacctcaggtgatccacccgcccccgcctcccagagtgctgggattacaggcctgagccaccgcacccgacccccccaccgccttttttttaaaaaaagcaactttgttgggggtgtaactgacagacaataagctgcacatatttaaagtatatagtttgatagatgtatacaccagcaaaactatcatctcaaaaagtacacatcttcatccccctcaaagttttcttggaccccttggcaatgcctccctcttgatcttccccacccattcctcattccctagccaacgctccaacactgatatgctttctttcaatacagattagttggtgttttctagaattttttttttttttgagatggagtctcactttgtcacccaggcaggagttcagtagtgcgatctcagctcactgcaacctctgcctcctgggttcgagcgattctcctgcctcagcctcctgagtagctgggattacaagcacgtggcaccatgcccggataatttttgtgtttttagtagagacggggtttcactaatgttggccaggctggtctcaaactcccgaccttaggtgatccaccagcttatgccccgaaaagtactgggattacaggcatgagccaccatgcccagcctagaatttatataaatggaattatacgatatttgctcttttttgtctggcttatcacacaat

SEQ ID NO: 1883640 - DNA, 4001 bp, Homo sapiens
aattttaaaaacctggaaacaatccagttatctctcaatatgggtagattgtggaataggtaactaaatgatcatatattccaataatagagtacctcgcagcactaagagtgaatgaactgcagctactcacattctcaaacacagcactgcaatgagatactactgcatgcatattagaatggcaaaaatccagaactctgacaacaccaaatgctgatgaggatgtgaagcaacaggaactctcattcagtgctgatggaaatacaaaatggagaatagttttgtggcatcttagaaaactaaatctactcttattatacgaccccgcaatcttgtttcttggtatatacccaaaggagttgaaaacttatgtccacacagaaacctgcacacagatgtttatggacgttttatttataattgcaaaaatttggagacaagcaagattaccttcagtaggtgaataattaaacaaactgtattacatccagacaactgaataccattcaatgataaaataaatggctgtcaagccatgaaaagacacagtggaagcttacatgcatactgcagaatgaaagaagccaatctaaaaaggccacatatgtcacttccaactttatgaccttctggaaaaggtaatactatagaaatagaaaaaaaaatcagtggttcccaggagttaggaggaagagagggatgaataaccagagcacagaggatgcttaaggcagtgaaagtacgtgtatgatattttaatagtgaatacttgtcattgtaaatttgtccaagcccaagtgtgaaccttaatgcaaactataagatgtatcatgtaggttctttaattgtaacaaatgcaccactctggtgggggatgtttattatgggggaggctatgcatgtgtgggggacagggagtatatgggaaatctatacctgctgctcagttttgctgtgaactttgaactgctcttaaaaataatgtgtgtatgtgtgtatatatacatacatatacatgtttgtgtgtatgcatatctgatcataagaaacaatacatagtttcacttatttaaaaagtcaaatgtgcaaaactaaacaatatacaagtctgtaatgacaagcaatggaatgattaacaggaagttagggatagtggttacctcttgtggaaggagtgagtggcattgtagaagggcaatgggagtttctaagatactggaaatattctatttcataacctgaaggaaggacacatatgctcattttatattcttcttaagctgtacatacacacttttatatttatgatctatttcattaagtaataagacaattaaatatatgcatttgtaaataagtgagattaacaaatttttggatacatttaacttattaaagttgactcaaataattagaaaatctggatggaaatcataccattaaagtaattgagttgataattaataattctacaaagaaaacaggatgcccagatgatgtcacaagtagttccaatgttacactaattatttgcgaggggagaaaaaagaggccattcttcaattcatttgagactagggtaaccttgctattgtgtacctcatccatgcacacagagacaaatattgtaaacaaaatactaggaagtatacctagcaaagtataaaaaccatgaacaagctcggttagtaatacaaatttagttcaatgttagaaaatctactgaaatcatctccttatcaatgaattaaagacaaaagttatatgattgtctcaaaaggcctataaaattattttacaaaaattaaataattcatgatatttccacctatgaataaagggtaatttccttaacctgataaaaggagtcaacaaataacctacagcacctatcatgttttgtgattaaaaatatcgaaatcactccttttaaaatcaagaaaaagacaagagtaccattgtcactaaactgcttccaaagcttatacggaagataaaagggcccagtataactaagacaatcccatagaagactaaagtgtgtgaaggtgggaggtggagcttatgtgagtctatcacgtaccagatttactgtgaagttataattaccacagcaggaattgctattgtgaaagtgtatgcttgtgtgaaatcttgatgtatgccctggctaacattacagaacagtcagaaagggtctatataatccatggtatgagcagttggtatccatatgggaaaatatcagaatggatctctatcccaaaaatggatcgctatcacacaaaggccagatctaaatggacaaaggacttaaatttgagatgcaaatatttaaaaatcttttagaagaaaatataggagggtaacttattacatgccacacctactatgtgtactttgtacgatgcaagtgttgtatatgagtgtagtatgttaagtgtagatgcctctaagcagtatatgcatgcttgctactttacacacatgaaacactgggaatgggagcatgagaggaaaccctaggtcattctggtctccagactgctgctcctgcccacccccggttccagcactcccttccccattctcctatacagatcctctgttcccggcacagccacttacagcagctcaagccagcggcacccacggagaggccctcttcaccctactgctgggctgtcatgtcccctttcttttctttctgaaaaacagttttctctgcctgtgactcctcatgtttcactctctctaaagcacacggaagcccggttccctcctctgctttatcagacctgttgctgtgagttccactagtgaccctgcatgacaaattcggaggtttgctcccttttgcatagcgtaaaatgtttacctcgtgacctacttgataaatacaattttataattgttaagctatctatatattctgtatctgttttaaaaattatgtataggccaggcaaggtggttcacgcctgtaatcccagcagtttgagaggccgaggcaggaggatcatgaattcaggagattgaaaccatcctcgacaacatggtgaaactccgtctctactaaaaatacaaaaattagctgggcatggcagcaggcacctgtaatcccaactactcaggaggctgcagcaggagaattgcttgaaccaaggaggtggagattgcagtgagccaagattgtgccactgcactccagcctggcgacagagtgagactccgtcctcacacacccccccaaaaatataaagacaatgtcagttatgccacacatagattgtttttattccataaaactgctctccatatgtgtaatatgtttctacttcacacatagttttgatcaaagattaatctattgcatacttttcttagtaattaataaaactcagcttggatttctctagccagataaaacaccttatactaaatgaatcaatcaaagctctttgttggagtgagatctgaaagctttcgctcaagctggctgcctcagcttcacagcatcaaataatggagggagaagtggaggctgacatgcagcaagaatgactgtgtgtgtgttggagagatattttgtttaattcatttacaagatactcatgccacactgctacgtgccaaacagctgttcttgctacttggtaaaaattaatcatctaatagttgaaaagttaattgttgtaatgtgacttcagtatggccactctctgggattgggagccaaaaaaaaaaaaagcatcaccatcatgattgagaaatggagttactggcagtagtggagcaaaccacgattctgcacttggacacagaattattcctgacaagatcctggctcttaactcttccaccaaaactgagtctgcagctcccacactgaaatgctgctcatttcaccccaagtgtgttccagccgttccttcttcttctccttcctaccagctctgtaatgtctccatcacaatgctaaggtcagggtcaatggc

SEQ ID NO: 1883641 - DNA, 4001 bp, Homo sapiens
gtttatttgtgacttacccccttttaaactccattttgctaggactggtctgccgatgcttgcagctatcaccttctgaattcccttccttccccatctcctaagtttgctgggttgttcattttctagtcttctgagttggatcttggcctgtgaatgtccgtatttcttttttggcttcatgttcctctccacacacctctagctgcatcccacatgccctgacgcaggggtattttcagtgtcattcaatgctaagtattttgtcctctgcaattgccatgtagcattttcagtttcatcgcaacaaaccaggattttatgacatgagggcttcgtgtctgtgagacacgcacgtgtacggctgttcccacttcgctcagcccttcaccctcgccaagccctggtcttctctttgggcctggtcttgttttccacacagatgcctggacggagccatgtgtcctggccgtattgctggcccactgggcagagtgctcagtcccatcaccgaagcggcagcgcctgcagccctgccttcatgggacacagctcccgcctgctccttgctagtgtcgactaaaggtaaaataatcaagcttttaaagaattaaagtgagttttattcagaagtctcgtcgagggctacacacagaagccaatagcctgggagcagctctttagagaggatctatcaatggctctggccagggtttcagcccatagctcagatacaggtggtaaggattcagtacgagcaaaatcccatcaaacttgctcagaagttatattaaagcagagccaaatcaaggcttaagtgtaagagtacacttacaggttatactttacagaggcataatcactcactggtcagacattattttcttttctgagacagagtctccctctgtcacccaggctggagtgcagtggcgcaatcacgactcactgcagcctcagcctcctgggctcaagtgatcctcccacttcagccttctgagtagctgagactataggcatatgccaccacgcccaactggacattattttatgtgtaggaaaaggcaaggactaggatcatgtgtgttttgactataggaatgtagggactcaggtgagagacatggaggtgctctgtgctctattctgttttgtcttcaaagcaacccaccagagagctccacgttgtcacagtgtcaggggctttgtggaattatgctggccagcagaaatgagcaaatgtggcttcttacctgtgctactgtgtctcacagtgaacaaggcggccatgtccctctctgaagcctgcccggatggactccacccccgaatggactccacgcctgaccagcgcctagagattgcgggcagcagctggagtttgccactccagggctcagtgctctttatgcttttgctgctgggctcttgtgcgtatttttgaggcatcacattttatccacatcttcatgaatttctcataggaggaggtgggctcatgtgagctcctactgccctgtggttactggaaagtgaagccctaacagccaccttcctctgcctccacctatttgagatctcagtaggattggcagtgtctctacactgggaacctcactttccatttgattgatatttttgaaggatgaagagaaaaggagaagattgtaatacatgggtgaggatgtgtacatatgtgtgtgtgtgtgagagagagagagactaactaaatccttagtgtccagggaaaagcctaatgctggaaaaacagagtaatgaagctgagctccccctctttctcagcagctttattgatttacagttgacataccataaagttcacctttgtaaagtgtatggttcaaccgttttgagtatatttacaaagctatgcaattatcactgctttctaattttagaacaatttcattaccttgtaccaagaagaaacctcgtacccactagcagtggctcctccttcctctgcactttgccttctccagccccagcaacgcctactccactgtctgtgaatttgactcccctattacctcatagaagtggcttttgtgactagcttctctcactttttggctatgattaataatgtttctattaatacccatttacaggtttttgcatggttgtgtgtttaatttctcttcatgtatacctagcagtggaattgctgagtcatatggttactgtgtttaacattgtgaggatctaaccaactgttttctaaacaaagtggctttttaaaaaaaaaaataattttattttatttttattttaagttctgggatacatgtgcaggacgtgcagctttgttacacaggtaaacatgtgccatggtgttttgcgcacctatcaacccatcacctaggtattaagcccagcatgcattagccatttatcctgatgctctccctccacctgcccctaaccacagaccccagtgtgtgttgttcccctccctgtgtccctgtgttctcattgttcagctctcagttataagtgagaatatgctgtgtttggttttctgttcctgtgttagtttgctaagaatggcttccagctccatccatgtccttgcaaaggacatgatctcgttcctatttatggctgcgtagtatttcatgctgtatatgtactggctttgtattttaaggactgtttgagattgcacccctcatgcactgctggtgcatgtgaatgtgaagtaatacagctgctttagaaaacagcctaccagctcctcaaatggttagacatagagttaccacatgaccaagaaatgttacacctatgtatatacccaggagaagttagaacgtgtatccccacaaaaatgtgtgcacaaagttcaaaggggtattgttcacaattgtgaacaagtagatagcatccaatgttcatcaactgatgaatgaataaataaaaggtgatagatccacacaatgggatattgtttggcacgaaaaaggggtgaagatgctacagcatggatgatccttaaaaacattctgctaagttaaagaagccagtcatcaaagaccacatgttgtatgaaactatttcaggaaaatctccagaagaggcaaatccctagaatccgaaggtggaagagtgattgcctagggctgaggtgggaaagagggggagggttctttgttttgacataatgcaaatgttctcaagcgaactgtaatgatagatacacaactctatgaatacattaaaagtcattaaatcgcacacttgaaatgagtgaattgtatggtgcataaattatatcataaacacacggaaaaaaaaaacacaactaaaaacccttctgttcagtaccctatatcctgaatgctgtcacccttatgtgaatgaaccaccctggatggaaacattctctcttccctctttcacatgggttgagacacatgggaacttgctttctctaccccagcagagaactgctttttaaccagcatttagcattgctggctaactttgaagataaatccaatttatcctgcatgtaagaaaaattgactattgccaaggccaagtttgagagaacaaaactatttctgactgaagccctctcaaggatatgccagcccagctatactgggggcctgccttaatcttccccactgtgaggcagacagtgtgagtacctgtgcctgcctgtgggtggctggctgagatggggcaaaggaatgggaggaaactccagggtgatggaccgctaggaccctcactgccacaacacaggacatcaagtccctgtcactgccaggtgcaagagtgaaagccgagtggaggagctgatggaaaggaggtgttggctgggggcttctcagctctctgcttactgctgcaacacaaaattctggagatgaagacacccctgttctcagccactgactttgctaatgaagtaatcaaggccctgagagttgacctgaggtcccaggtggtaatacgactgacagtcccaa

SEQ ID NO: 1883642 - DNA, 4001 bp, Homo sapiens
accagctgcacacgcagctccccagtacataccaggttcacacccagcccccctggtacacaccaactgcacacccagcccccagtagtgggcaggtgcacacccagctcccctgtgtatataccaggtacctgcccattcccccagttctcaaaagaccctcacccctaccctagtctgctcctctaagctctctgctgctggctcctctggtgccccccacaccctgtgcccacttgcacctacctgcattggtgccagagacggaagggtcagccaaacccagccgcctccaggatgtacaggctgagatcactcaggtccaaggacggggcttccaaggcacagcaggtacagactcagacatgtggctgttgtcgaggttgccgcaggctcacctctgcgttctgctacactggcgtctggctcagagctgaagcatgagctttgacgctgtcccatcgcacttctgggtgctggttacccatgtgaccaccccaccagtcaccatggtcaggggaaggtgacatatggattgtccgagtctgggtctcagatactcaactgaccgctctgtgcctcagtttccttgtctgtaaaatgaagataacaatggcactcacctcactaggtgagttaaaacatgtatcatgtagaacagcacatggctcacagcaatggttagctctgttcctgtttatcgttgtttttatgctctgcatggtgaactcctattcatccttcaatacccaactcaaacatcactctgttttccctcccacccttgtcagtagctcattgccctctctggattctgggccacggttgcagggaaggactccgtgcatctctaggtcaccagccactctcacagacctttggtgcctgagtcccatgtctcttgcaggagaaaatgcacaagctcttggaggtgtacgagcagctgggtggggaagaagacattgtcaacccggccaatgaactgatcaaggagggccaaatccagaaactgtcagccaagaacggcaccccccaggaccgccacctcttcctggtgagcctggcccctgccagcccagccgcagagcctcccttgccatttgcctcaagcccagggcagtgccaggagggctctggctgcccaaggacatggctcttctgtggcctctcctactgggactgtggctccctctgagaccctcagcatccctcccccagccatagggagcctccctcctccacatccagacaccaaacttttgccagtggctcttccccatttgctgcaaatatctcattttttaatccctcgtagcccatacctctttcgtccccagaactgagcagacttcagcttgtagcaaccaggacagcacagagaactgtagcagtgaatcacagtttcaactattcctgagccaaaccctggccgggagggagggggaaggtgggatggaagtgtaattcgagacccccccgggtgccatggcgcggtagaaacagatgtggttcttctttcctcctccattttcctctagcttctgattctccttgaataaacaattatttctttgaaaggtttttttttaagtttttaaaaattacgttaactaaaactcatttttgctttacagttctgagttttgactaatacagttgtgaccacaatcaagttacagaacaagttttttttgtttgtttttgtttttgtttttaagacagagtctcgctctgtcacccaggctggagtacagtggctcaatctcggctcactgtaacctccacctcccaggttcaagcaattgtcctgcctcagcctcctgagtagctgggattacaggcgtgcgccaccacgcccggctaatttttgtatttttagtagagatggggtttcaccatgtttatcagtctggtctcgagctcctgacctcaggtgatccacccacccaaagtgctgggattacaggcgtgagccacctcacctggccaagttacaatttgatcactgcccccgcccacccccccagttcccttgtcccacccctttgtgagcaagcgctcgcctgccctggcaaccatggatctcttctctgtttctagaattttgcctttcccaaatgtcacatcaatgccatgagatgagtctggctcctttagctcaccatgtgggtttgagagattcatccatgttggtgaatgtatcagtagctcattcaaaagatttggtttggctggacgtggtggctcatacctgtaatcccagcactttgggaggctgaggtgggcggatcacctgaggtcaggactttgagaccagcctggccaacatggcgaaaccccatctctactaaaaatgcaaaaattagctgggcgtggtagcacccgcctgtaattccagctactcgggaggctgaggcaggagaagctcttaaacacgggagacggagtttgcagtgagccaagattgcgccattgcacttcagactgggcaacgagagcaagactccatctcaaaaaaataaaaaaaggtttttttttaaattatacaattagctcatgttcatggtttaaaaatttaaaaatagaaatgaacaaaaataaagctagcgactagagtctcctcactcaaagatgtaaccatagttaaaattactgcacatatcttttaaaaatatttttcactttataacattaaaaaaaaatgaaaaggatcccatgtgagaagctcactggggcccctggggggacctgcgggcagctctcgttcctcacctgtgccatccctcttgcagttcaacagcatgatcctttactgtgtgcccaagctgcggctcatgggccagaagttcagcgtccgggagaagatggacatctcaggcctccaggtgggtgagctcctccatctcaaacctgtccccctggaaggggcactgagcaggactggggacaccaggctctggccgctgaggcactcacctctgtgcagcctggcacccctacctgcttttccaagccatagaccctatctgtgaccaaggcattgtctcagtcctggtgccccaggctggaagggcaggattccacccttctctgcttggcccacctgccacgttgctgccaactcccctttctgcagagccttggaggatgcagggggcagtagggatggcaccaggacctggactgaatcctgtcacctgtgagactgggactcggggccctatttacaaacccaaacatgaagcccagggttgcagggagcaatcctggctggggcgggggccggcttcccttgtctggttcctgggtcctgagctctttcctgtcctcctgcaccggagccggggggagggttccaggcagatctgtagcatggtccagaatgaccttcttttttttttttttttttttttgagacggagtctcgctgtcacccaggctggagtgcaatggcatgatcgtggctcactgcaacctccacctcctgggttcaagggattctcctgcctcaccctcctgtgtagctgcgattacaggtgtgtgccaccacacccagctaatttttgtatttttagtagagaaggggttttgccatgtttgccaggctggtctcgaactcctgacttcgtgatccacccgccttggcctcccaaagtgctgggattacaggcatgagccaccgcacccagcctagtcagtcattatttttaatggtatttcttaacctggagtgcaatggtgtgatctcggctcactgcgacctccacctcctaggttcaagggattctcctgcttcaccctccagaatagctgtgattacaggtgcgcgccaccacgcccagctaatttttgtatttttagtagagacggggtttcaccatgtggtcaggctggtctcaaactcctgacctcgtgatccacctgcctcggcctcccaaagtgctgggattacaggcatcagccaccgtgcccagccatgaccgattttttgtagagaaaca

SEQ ID NO: 1883643 - DNA, 4001 bp, Homo sapiens
taacacggcgaaaccccatatctactaaacatacaaaaaattagccgggcgtggtggcgagcacctgtaatcccagctactccagaagctgaggcaggagaatggcgtgaacccgggaggtggagcttgcagtgagccgcgatgcaccactgcactccagcctgggcgacagagcgagactccgtctcaaaaaaaaaaaaaaaaaaaaaaaaaagttaaacatatcacaccacctagtcattcaaatcctgcttatttgcccaagacaaatgaaagtgtatgtccaaacgattggacaaacattcgtagcaactttatttgaaatagcaaaaacaactggaagcaaaccaaatgtccatcaagaggtgaatagatacactaactgtagaatatccacacaataaaactatttttttaaaaactacggggcaaaaaacaaaaaaccaaagatagaatctaatttcttggtaaatacattcactattagggtttttataacagagaagtcattctttattaacactcttttgactatgaaaatattttgacatcaaaaatctgcaaaatatgaagaaacaaaggacacacagctttttctattttttatttttattttatttttatttttttgagaaggagtctctttctgtcacccaggctggagtgcagtggcgcgatcttagttcactgcaagctgcgcctcccggttcacgccattctcctgcctcagtctcccgaatagctgggactacaggcgcccgctaccaagcccggctaattttttgtatttttagtagagacggggtttcaccgttagccaggatggtctcaatgtcctgacctcgtgatctgcccgcctcggcctctcaaagtgctgggattacaggcgtgagccaccacccccggccccaggacacacagctttaaaatttctccttggtctcacccagtgccaaccacctaaaacctctcattttcccccagacatttcttctgcctccaggatggaggtagagaatcttggccttggaccacgcactggggaccatgctgggctgccgtggacagtgacggactcaggttctcaccaggatccccaaaataggcccctgaaaaaaatgttaccatcagggtgcgctccctgattcttgtgtctgctggaaggaggaaatcaagccaggaacattgtcaggatagagatgaaaatggggctcacttttctgtcttttgtgatgtcagacaagcctttcagctctgtctcttcagccctcatggaattgtttggtgtggacgcaccgagattctgaactgggtcccctttccctctgcccttctctggggccagattctgagctctccattccaatttttcccccaatttgcccttgcatttatttatctggattactgtctgcctgtcccaaagaataaaagctttatcacagtggggattttgtttaaaaaaataataataacagctatatttttaggatccatgacactgtccagcatatcggtggtatctgataaaaaatgtttgttgactggatgaacaaatatattattcacaattcacattatcctgaactggctagaaaattaaatatctgatatcagtattggcaatattatgaagtaaatataagtctgatacagtgctcgtgaaagtctaatatgcaatgctcattttagaaaacattttcttgtagatttgaaaatgtttcatctccatgaactagttgtatatctgcaagttgtgtatctttgggttaggcagaataattgccccccaccaaagacagccacatcccagtcttcagataaggtgaacatgctaacgtaagttagcatgttcaaagagacttggcagatgtgattaccattaagggcattgaaatggggaaattaccttgaattaccttggtgagccagtctaatctcataattccttgagagcagagaatattttctggatgctgagattcagacagatggcagtatgagaaagatgtggcctgctattactggcttttaaaacagtggtagggggccacaagccaagaaaagccagtgacctttagaagctgggaatgacccaaagtttacaaccaggaagaaactgaggatctacaaccacaaggaactgaattctgccaacaacccagatgctcttttagagccttcagaaagaaatgcagcctgccaacatcttgatgttagttcagtgagagccatgccagatttccaaccaaaacaattctaagacaataagtctgtgtgtgttttttaaaactgactcaaatcttacaaaaatgtgttcttttaagccactgaatttgtggtaaattgttacagcaggaatagaaaactgatacaaccctagagaaagtcttgtacatgtgccctataaacacacagcagaatttttttaactttttattgagttaaaaaatatatatatataatttaccatctgtacatttttagaggacagtttagtggtgataaatacatttatattttcttctcttaatctcctcttcccactccccttgctggcctctagcaaccaccaatttactttctatcttcatgagatccacttttttactgcccacatatgagtgacaacatgtggtatttgcctttctgtgcttggctcattccacttaacataatggcctatgttcattacgttaaaccaaatggccagtgccacctatgttgctgtgaatgacagaatttcattcttctttgtttctgagtagtattgcattatgtatatatatgacttttaaaatctattcatttgttgatgagcacttacgttgattccatattttgtctattgtgaatagtgctgcagtacacatcggcatgtagatatgtctttgatacattaatttcctttattttggatatacatccagtaaagaaattgctggaccacatggtagttctatttttacttttttgaggaacctccatactattctccatagtggctttattaatgtggattcccaccaacagtgtactagtatttccctttctccatatccttgccagcatctgttattgcctgtctttttgaaacaagtcatttcaaccaaggtgagatgatattgcattgtgattttgatttgcatttctttgacgattagtgatactgaatattttttgtcttcctattggccatttgtttgtcttcttttgagaaaatatctgttcagatctttagcccatttttaaattgtatttatttatatatttttaactattttttttgagaagtaaggtcttgctttgtcacccaagctaaagggcagtagcataatcatagctcactgtaacctcaaactcctgggattaagaaatcctcctgaccgggcgcggtggctcacgcctgtattcccagcaatttgggaggcagaggtgggcggatcacgaggtcaggagatcgagaccatcctggctaacatggtgaaaccccatctctactaaaaatacaaaaaatcagccgggattggtgccgggcgcctgtagtcccagctactcaggaggctgaggcaggagaatggcgtgaaccccgggggagcagagcctgcagtgagccgagatcacgccactgcactccaacctgggcgacagcgagactccatctcattaaaaaaaaaaaaaaaaaaaaaaaaaaaaaaaaaaaaaagaaatcctcctacctcagcctcttcagtagcccatttttcaatcagattttttgtttgtttattattgagttgtttgagctccttatatattctacttgttaatcctttgtcagatagatagtttgaaaatattttgtcccattctgtgcttggctcttcactttgttgattgtttcctttgcttgaggctttttagtttgatataatcccattgtctatttttgcttttgctgcctgtgcttccgaggtcttacgcaaaaaaatctttgcccagactaatgtcctggagcattt

SEQ ID NO: 1883644 - DNA, 4001 bp, Homo sapiens
ctaacacggcgaaaccccatatctactaaacatacaaaaaattagccgggcgtggtggcgagcacctgtaatcccagctactccggaagctgaggcaggagaatggcgtgaacccgggaggtggagcttgcagtgagccgcgatgcaccactgcactccagcctgggcaacagagcgagactccgtctcaaaaaaaaaaaaaaaaaaaaaaaagttaaacatatcacaccacctagtcattcaaatcctgcttatttgcccaagacaaatgaaagtgtatgtccaaacgattggacaaacattcgtagcaactttatttgaaatagcaaaaacaactggaagcaaaccaaatgtccatcaagaggtgaatagatacactaactgtagaatatccacacaataaaactatttttttaaaaactacggggcaaaaaacaaaaaaccaaagatagaatctaatttcttggtaaatacattcactattagggtttttataacagagaagtcattctttattaacactcttttgactatgaaaatattttgacatcaaaaatctgcaaaatatgaagaaacaaaggacacacagctttttctattttttatttttattttatttttatttttttgagaaggagtctctttctgtcacccaggctggagtgcagtggcgcgatcttagttcactgcaagctgcgcctcccggttcacgccattctcctgcctcagtctcccgaatagctgggactacaggcgcccgctaccaagcccggctaatttttcgtatttttagtagagacggggtttcaccgttagccaggatggtctcaatctcctgacctcgtgatctgcccgcctcggcctctcaaagtgctgggattacaggcgtgagccaccacccccggccccaggacacacagctttaaaatttctccttggtctcacccagtgccaaccacctaaaacctctcattttcccccagacatttcttctgcctccaggatggaggtagagaatcttggccttggaccacgcactggggaccatgctgggctgccgtggacagtgacggactcaggttctcaccaggatccccaaaataggcccctgaaaaaaatgttaccatcagggtgcgctccctgattcttgtgtctgctggaaggaggaaatcaagccaggaacattgtcaggatagagatgaaaatggggctcacttttctgtcttttgtgatgtcagacaagcctttcagctctgtctcttcagccctcatggaattgtttggtgtggacgcaccgagattctgaactgggtcccctttccctctgcccttctctggggccagattctgagctctccattccaatttttcccccaatttgcccttgcatttatttatctggattactgtctgcctgtcccaaagaataaaagctttatcacagtggggattttgtttaaaaaaataataataacagctatatttttaggatccatgacactgtccagcatatcggtggtatctgataaaaaatgtttgttgactggatgaacaaatatattattcacaattcacattatcctgaactggctagaaaattaaatatctgatatcagtattggcaatattatgaagtaaatataagtctgatacagtgctcgtgaaagtctaatatgcaatgctcattttagaaaacattttcttgtagatttgaaaatgtttcatctccatgaactagttgtatatctgcaagttgtgtatctttgggttaggcagaataattgccccccaccaaagacagccacatcccagtcttcagataaggtgaacatgctaacgtaagttagcatgttcaaagagacttggcagatgtgattaccattaagggcattgaaatggggaaattaccttgaattaccttggtgagccagtctaatctcataattccttgagagcagagaatattttctggatgctgagattcagacagatggcagtatgagaaagatgtggcctgctattactggcttttaaaacagtggtagggggccacaagccaagaaaagccagtgacctttagaagctgggaatgacccaaagtttacaaccaggaagaaactgaggatctacaaccacaaggaactgaattctgccaacaacccagatgctcttttagagccttcagaaagaaatgcagcctgccaacatcttgatgttagttcagtgagagccatgccagatttccaaccaaaacaattctaagacaataagtctgtgtgtgttttttaaaactgactcaaatcttacaaaaatgtgttcttttaagccactgaatttgtggtaaattgttacagcaggaatagaaaactgatacaaccctagagaaagtcttgtacatgtgccctataaacacacagcagaatttttttaactttttattgagttaaaaaatatatatatataatttaccatctgtacatttttagaggacagtttagtggtgataaatacatttatattttcttctcttaatctcctcttcccactccccttgctggcctctagcaaccaccaatttactttctatcttcatgagatccacttttttactgcccacatatgagtgacaacatgtggtatttgcctttctgtgcttggctcattccacttaacataatggcctatgttcattacgttaaaccaaatggccagtgccacctatgttgctgtgaatgacagaatttcattcttctttgtttctgagtagtattgcattatgtatatatatgacttttaaaatctattcatttgtttatgagcacttacgttgattccatattttgtctattgtgaatagtgctgcagtacacatcggcatgtagatatgtctttgatacattaatttcctttattttggatatacatccagtaaagaaattgctggaccacatggtagttctatttttacttttttgaggaacctccatactattctccatagtggctttattaatgtggattcccaccaacagtgtactagtatttccctttctccacatccttgccagcatctgttattgcctgtctttttgaaacaagtcatttcaaccaaggtgagatgatattgcattgtgattttgatttgcatttctttgacgattagtgatactgaatattttttgtcttcctattggccatttgtttgtcttcttttgagaaaatatctgttcagatctttagcccatttttaaattgtatttatttatatatttttaactattttttttgagaagtaaggtcttgctttgtcacccaagctaaagggcagtagcataatcatagctcactgtaacctcaaactcctgggattaagaaatcctcctgaccgggcgcggtggctcacgcctgtattcccagcaatttgggaggcagaggtgggcggatcacgaggtcaggagatcgagaccatcctggctaacatggtgaaaccccgtctctactaaaaatacaaaaaatcagccgggcttggtgccgggcgcctgtagtcccagctactcaggaggctgaggcaggagaatggcgtgaaccccgggggagcagagcctgcagtgagccgagatcacgccactgcactccaacctgggcgacagcgagactccatctcataaaaaaaaaaaaaaaaaaaaaaaaagaaatcctcctacctcagcctcttcagtagcccatttttcaatcagattttttgtttgtttattattgagttgtttgagctccttatatattctacttgttaatcctttgtcagatagatagtttgaaaatattttgtcccattctgtgcttggctcttcactttgttgattgtttcctttgcttgaggctttttagtttgatataatcccattgtctatttttgcttttgctgcctgtgcttccgaggtcttacgcaaaaaaatctttgcccagactaatgtcctggagcatttctcctatgctttctt

SEQ ID NO: 1883645 - DNA, 4001 bp, Homo sapiens
taacacggcgaaaccccatatctactaaacatacaaaaaattagccgggcgtggtggcgagcacctgtaatcccagctactccagaagctgaggcaggagaatggcgtgaacccgggaggtggagcttgcagtgagccgcgatgcaccactgcactccagcctgggcgacagagcgagactccgtctcaaaaaaaaaaaaaaaaaaaaaaaaaagttaaacatatcacaccacctagtcattcaaatcctgcttatttgcccaagacaaatgaaagtgtatgtccaaacgattggacaaacattcgtagcaactttatttgaaatagcaaaaacaactggaagcaaaccaaatgtccatcaagaggtgaatagatacactaactgtagaatatccacacaataaaactatttttttaaaaactacggggcaaaaaacaaaaaaccaaagatagaatctaatttcttggtaaatacattcactattagggtttttataacagagaagtcattctttattaacactcttttgactatgaaaatattttgacatcaaaaatctgcaaaatatgaagaaacaaaggacacacagctttttctattttttatttttattttatttttatttttttgagaaggagtctctttctgtcacccaggctggagtgcagtggcgcgatcttagttcactgcaagctgcgcctcccggttcacgccattctcctgcctcagtctcccgaatagctgggactacaggcgcccgctaccaagcccggctaattttttgtatttttagtagagacggggtttcaccgttagccaggatggtctcaatgtcctgacctcgtgatctgcccgcctcggcctctcaaagtgctgggattacaggcgtgagccaccacccccggccccaggacacacagctttaaaatttctccttggtctcacccagtgccaaccacctaaaacctctcattttcccccagacatttcttctgcctccaggatggaggtagagaatcttggccttggaccacgcactggggaccatgctgggctgccgtggacagtgacggactcaggttctcaccaggatccccaaaataggcccctgaaaaaaatgttaccatcagggtgcgctccctgattcttgtgtctgctggaaggaggaaatcaagccaggaacattgtcaggatagagatgaaaatggggctcacttttctgtcttttgtgatgtcagacaagcctttcagctctgtctcttcagccctcatggaattgtttggtgtggacgcaccgagattctgaactgggtcccctttccctctgcccttctctggggccagattctgagctctccattccaatttttcccccaattttcccttgcatttatttatctggattactgtctgcctgtcccaaagaataaaagctttatcacagtggggattttgtttaaaaaaataataataacagctatatttttaggatccatgacactgtccagcatatcggtggtatctgataaaaaatgtttgttgactggatgaacaaatatattattcacaattcacattatcctgaactggctagaaaattaaatatctgatatcagtattggcaatattatgaagtaaatataagtctgatacagtgctcgtgaaagtctaatatgcaatgctcattttagaaaacattttcttgtagatttgaaaatgtttcatctccatgaactagttgtatatctgcaagttgtgtatctttgggttaggcagaataattgccccccaccaaagacagccacatcccagtcttcagataaggtgaacatgctaacgtaagttagcatgttcaaagagacttggcagatgtgattaccattaagggcattgaaatggggaaattaccttgaattaccttggtgagccagtctaatctcataattccttgagagcagagaatattttctggatgctgagattcagacagatggcagtatgagaaagatgtggcctgctattactggcttttaaaacagtggtagggggccacaagccaagaaaagccagtgacctttagaagctgggaatgacccaaagtttacaaccaggaagaaactgaggatctacaaccacaaggaactgaattctgccaacaacccagatgctcttttagagccttcagaaagaaatgcagcctgccaacatcttgatgttagttcagtgagagccatgccagatttccaaccaaaacaattctaagacaataagtctgtgtgtgttttttaaaactgactcaaatcttacaaaaatgtgttcttttaagccactgaatttgtggtaaattgttacagcaggaatagaaaactgatacaaccctagagaaagtcttgtacatgtgccctataaacacacagcagaatttttttaactttttattgagttaaaatatatatatatataatttaccatctgtacatttttagaggacagtttagtggtgataaatacatttatattttcttctcttaatctcctcttcccactccccttgctggcctctagcaaccaccaatttactttctatcttcatgagatccacttttttactgcccacatatgagtgacaacatgtggtatttgcctttctgtgcttggctcattccacttaacataatggcctatgttcattacgttaaaccaaatggccagtgccacctatgttgctgtgaatgacagaatttcattcttctttgtttctgagtagtattgcattatgtatatatatgacttttaaaatctattcatttgttgatgagcacttacgttgattccatattttgtctattgtgaatagtgctgcagtacacatcggcatgtagatatgtctttgatacattaatttcctttattttggatatacatccagtaaagaaattgctggaccacatggtagttctatttttacttttttgaggaacctccatactattctccatagtggctttattaatgtggattcccaccaacagtgtactagtatttccctttctccacatccttgccagcatctgttattgcctgtctttttgaaacaagtcatttcaaccaaggtgagatgatattgcattgtgattttgatttgcatttctttgacgattagtgatactgaatattttttgtcttcctattggccatttgtttgtcttcttttgagaaaatatctgttcagatctttagcccatttttaaattgtatttatttatatatttttaactattttttttgagaagtaaggtcttgctttgtcacccaagctaaagggcagtagcataatcatagctcactgtaacctcaaactcctgggattaagaaatcctcctgaccgggcgcggtggctcacgcctgtattcccagcaatttgggaggcagaggtgggcggatcacgaggtcaggagatcgagaccatcctggctaacatggtgaaaccccatctctactaaaaatacaaaaaatcagccgggattggtgccgggcgcctgtagtcccagctactcaggaggctgaggcaggagaatggcgtgaaccccgggggagcagagcctgcagtgagccgagatcacgccactgcactccaacctgggcgacagcgagactccatctcattaaaaaaaaaaaaaaaaaaaaaaaaaaaaaaaaaaagaaatcctcctacctcagcctcttcagtagcccatttttcaatcagattttttgtttgtttattattgagttgtttgagctccttatatattctacttgttaatcctttgtcagatagatagtttgaaaatattttgtcccattctgtgcttggctcttcactttgttgattgtttcctttgcttgaggctttttagtttgatataatcccattgtctatttttgcttttgctgcctgtgcttccgaggtcttacgcaaaaaaatctttgcccagactaatgtcctggagcatttctc

SEQ ID NO: 1883646 - DNA, 4001 bp, Homo sapiens
acgtctttacttcatcagaagagcatttaaagcaatttaaaacaattgctttatatcacacataagtttcccccaaatttcatattttattttctaagagaaatagttctttcttgcaggcagattaggcctacaaatccaaaacaaaatgaaaggtaactatccagtgaatccgtaatggttaatttagatacttctttaacaggctggctgctataagcatcatgaaagcagaaacttaacttcgtgtatgtaaactagtgacatataaatgtctctcttctgttatagaaaaaggactgagccaagaaagttttcaacgtttcacagattaaggtagtcttatttgatttcctaaaagaagagataaaaaagttaataaaattttttaaaaaggaaattgagattactgaaatagtcacattacatgtgccttacagaatattatgcctggtttctaataaatccgacttttgaaaaggaatagagcagtagatactaattcaaaaaaaaaaaaaagactcgagaaaaactaattctgtttgggtcacctaaagaacagcatacgtttagggacataggattaagcagaggatggtgtctccgtctacgagacagctgtgtctctgcttccatgaatttccatttgagtttcaaaaggctgccactcagtgacctctccagcagtcagtcccccttcctaccccgagaagcactgagccacgaacagttgattggctcagggaggtcagacaacagccctcagtctaacagagcagtccaggaacagatattggccacttgataggaagaaaaggatgtaaaggagtaaggatgtaaaggaaggaacggatgtaaaggagtgaggctgtaaaaaacagaaaaggatgtaaaggaaggtggaggggagaagggaggaggatgcacagaagtaaccaagatagaggtccagaagacacacccactcaaagagaggaaactttgcttggaggttctcagccagggagaagagtttttttgttttgttttgttttaaatttaggtaaacaaggatactgctttgaaacggtcactggagcccaactcatatgaacaatttagcagctttataacaaccctgagtgggcaaggacctttcatacatattaacatttagaaaatgtagtttattgaataaattcattgaaagatgtcatgtttcctaaaaactgtacctaattttagggttcctgcttacagtgattccagttctacatgagagttttaattgaaggaggattaggggggtgagggaggtgcagaacacaaatgaaatttttacagcatggaaataaaagtatttttaaatcttcttgggggtgaagagttaggcaagaagtaatacgtggaaactgtcaagtgcttctctacacatccacccaccagataccatcgcagccggctgggggagtctccctcttcttgcctgacagcttcactttctttgagatctggagctggtgatcacactggcccgtcatggtattttcagttaacaaagcagttactcaacggggcaaaaagccacaaaggagcagagcagctgctgctgcacccgtgatgcaagtgcaggatgagccccgggccgccaccgccgcctcggctcctccgtgacgtccgggaagggtatccccggcactcaggaagtggtggccgcgggcagctccgcccccacgcgactcggggctggccgagctgccgggtggtagaaccgccgggccttccgcagggcgggcggggatcaccgtctccccacctccgtgcgcacacacatgcacgggcctcgcgccccgctgtcgcccgcgcctcgccctgctcacttctcacagcccgcgccggacgaagagagccgccagcgccccccctctctcccacggctcgcacccactcaccccgacccccggcgccgagcccggcccctcgtcgccggtcaccagacctggtcgaaccgagtccaagatggcgactccgcccccgccccctccgcactcccggcggggtcagggcgccccctcacgcggcgggctcgcgcccgagacccggctaaaaatagccaggcccgactatatttggttcggccggatcctggcgcggccgcgcgctccccgccccgccccgccccgccccgcgcgccctgccccgccccgcgcggcgttgaatggagaaggggcgggggtgaccgaggggaacctactccgctatctgcggcgcgcgccggcggcgggtcccggccaaccgccgaatttagtaacatcgcctgcgtcaatcacgcgcctcgcgtgcgtcagcgccgcgcggctccaggtcctgctcccccccttcaagcctttgaatggatacaatgtagcagcgccctccttccttccgaggctggattggaacccgccgcagtgcagagactcggttgctctcggctgggtcaactttcggggcattctcccacgatcctctccgcaccaccgtgtctgaattggaagtggaggcgaagaaagatatacatgccatatttacctatatgtagtttgttttcaagtttctggtcctagctcgaaccttcttcgattctgaaatgtgtgctgtctacaaaggaatcttgtatctcccctcggcgcagcgccccccgcccccgccacacacacacaaattgggacaggtcaaacatataaaacggtatttgtgattcaagcggaccacatggggaccactctatctgcattgtttcactcaaatattttctcctgtccaaaaattcatttctgaaagagactgcgttcactcagcagcaacctttgggactaggggtctttaactctgataaattttgttttcatcaagaaatttacacttaaatttatcatttccaggaagaaattgctctccttcatacagtcacccaggctttcggcacaccatttcatgacaaatgtgtccgaggagaccaaagcaaatcccctagcgagggactgactaataagtcctgttgattgatttcgaaatgtttaatttgggagatgtgggcggagggcatctacaaccatcaaaaagtgaaagtgctagttgagagttccatttctgacccggtgccggggaggaggaatgatttgcaatagtcagacccgctcagctgttcaacacgtgtgtgtttgttttacacacagagtagtttctgctgcagcgcgcgtgtgcatgatggatgtgcacttcgctgggttataacgtgtccagttaagaaacccacgccgtacgtgtaaagaaatcaaaccttatccccggaaccatctgcatccctgtgtgaaacacgcacccagtaaatgatgcggggaggggggattagcctgggcgcagaggaccggagcaacgtaaacagctttagaacctatgcaagaggaaagtgcagctgcacctcagggcgtcttcgggctggtgccagacgccttctgcaccggctgccaggtcactggagctggtcagaagctggctggcggagccttccctttcggaagagctgtcctctcccttacccccctcgccctggctccgtgcctcggggcagcctcggaggcgcgccagcagcactcctccaactctactccacccgagcctgacagctgggcggtcccgcctgacccgtgggcaggccgctgcaccctcccgcagacgcacgccctggcgagcggttccgctgcaaaaagagaagcccccaggccggggccggccgtgcggcggagtttccattgtgcggccgtgcgactggccgaggaacgcgcgcgcgcgcgcgcgcacacgaacacacacaccctccctcgcacacgcggaaccggctgggccaggggagggaggaggagggtgacgtagcgtcccatggcgtcacattgacgtctcgcattccaggcactctatggagaggccgctagggctcctgtggcataaatgacgtgccgagagagcgagcgaacgcgcag

SEQ ID NO: 1883647 - DNA, 4001 bp, Homo sapiens
ttttaaatacatcaagcacttccaaatatctagaaaaactagatatttcatataacttgtccaccacgtacacagcactgttaaataaaattgcacacatggaacaatggttatcaactgaggtatcttctaaatgtgaatattttggccttcaatcattccctcctcacttccttctctctctgactttaatacagtggacaaatacgggcacatgtaatgcttagggatggttgaacaaattcctatgcaaaagtcattcacagaagacaagttttcctatgaatttcaacacaaaagcatacaaaatatactaattttactaaatactttgtcatacactggcaacctctttaacatctagagactagactagatgctgcaaaattaggactcacctgtccattatatacactatatacagagcaaaacaaaatgcacaaaagatacagaaaaatggtgtctgaaaaagtccaactatgaacatactagcgtattaccttttgcaatttcttccctcctacctcttctaaaccattgaacaagtatagacagcactatacttctcacaaaggtggcttcacaattcaatttccaaaagacagtatttcctatgaatttcagcaaaaagatatttacaaaatggtattttactacctctacatttaacattcatcaggcacttctaaacatctagatagactagatgtttcaagtaaggagttaatttgtccactttgtacaaagcagtcttgaataaaccgcaaacatgtaacaacagttataatttgaaagaatcttccaaatatgaacgttctggcctagaacccttcctatctccaacaacccagtgggcaagaatgctcaaattttcagaggacaatctttcctaggacttgtaaaacaaaatgtacaaaatatattagtttactaactttacttttgtcagacactggcaacctccttagcatctagaaagactagatgttgtaaattagggctcatttgtcctttatgtacactacatacacagataagtaaaacaaaatgcacagaaatagatgattcatcttgccccgctgtaggcagggtggcatagagctctctgcactttcccctcttccctcctcccctgaaccagcgcacaaacacaatgagtattactcaacaggtgatttggccattccccaccaaagcaacattttctatgaattgtaacaaaaagatacttacaaaatgtgtttttattacctttaattttaacatatatcaggcacttcagaacatctaaaaaaacagacatttcaaaaaagcttagcattgtcaactatatataaggtagtgaggaataaaatgcatacaaaactatggatagaatatgaaagtgtcttctaaatatgaccagtctgtcatagaaccttcttctcttccttctcaggtcttccagctccatgtcatctaacccactgaacaaacgtggatgtatcgcttccaggggctgtctaataactccatttccaaaaatcatctccagaagacatttattttgtacgacttcctttaaacaaatgagaatttacaagatgtgactttctaactctactttatcatacgtcaggaacctctttccatctagaagggctagatgtgacaaatgttttctatcaacaggctagggtggagttgagggcaggtttttcatattgtatacacaggccttccataaatggccagtaaatcttcccaaagggtggtgggcatttccaacgggccaaaagtggcctgtcattctaccatttctcccaacagcaagatctggtagaaggaagaccagccgccccatggcccctaaccttccacccgtttttcgggacttcgctcacctcccaggccccttaaggcctttgtcggtatgttaaggcctttgtctaggtaggtctcgcccaatggggacagatcagtcgcccagggttccggatctacgcagctccgtggcctaaagagacagccgagcctgcgtgcgtccctaggccgccttccggttccgccacgccctaacggcttccatcgcctggcgtttgggtggccgccatgcttccgggcccgccactcccgccgccacccaaagacactgcgttccggcaggcttgggctgggagacccggtgttgggtggggtcccggcagggacaagccgctgccgccatcagtcaccgaggtggggtggggatgagaggttcgccgcggcttcaagacctgggtccggccagtgggcagccacatcggaggcctcaggtgtctgcaggacagagggcgcggcctgtcctggggacccccagctcacccgccggcccgcggccgaagggcctggagggccctgggggagcgggccacactctgtgtctctctaataaatcttagtatagctaaaattctaattaatgtaatgaatataaacaacccactattaagatattaatttagccaacaatcaattttgataaatcactaccgtattgttgctttttaaaggccgtcatctgaaaatatgaattcaaaataggagaatatctttgttcactcatttgtaaaaagacagtgtagtagcaaagtggaaaaaccagcagaatagaaattaagaaacttagtctcagcaaggccattttctatttgtgtgacattggacaagtcaggtagtactttaacatgaccccgtatatgttccctgttttcctgcttaggtttgccgcatgtcactttcccctctttatccattgttggaatgggttagcctctctcccacctaaaacctttctaaagtgatgcctagccttcttttactttttgccggggtaactcccaatcatccgtgtgatttcagcttcaaaatcccttaatcagagaaggctttcctcaccttacaatctaaattataccatactgttataatttacgattgcacccttttcttcatagcgtttgttatagttagtagtataacatatttaaatcctgtttcctttactggatttaagacccatgagcacagaatccatgttgattttatcatggctatatctttcatgcctttcttgtctaacgcccagaaaattctcaataagattttaaaaataaactctccagatcttgatttcctcctctgtaaatagtgaataacaatcacagtgttgttgcaatcaatatgagttaatatatattttagtaatagtaatccagtatattatttgaataaaccagttttcattactaataaactagtgtatctcagtataaaagttgaaggaagacattttataaacatacttttatataattatgaaaacacttttaaaatacactggacaatgcacaattcaaaagctttggattcaaagtgggcctgccaaacgatggatatttcctgtgggactgttaccagtctttcaattgcagtcctgattgagaatgctgcagttggaagaagtgttttgcaatgacaaaggaatactggttgaactctgatgagtagacttatcatgtgtggcaggaagtaaggttatctgtgtccaggaaacagatggaaacccatagactgcttatgaaagaaatgaattcaggggattagaaagtcataccatttagttttgaggggaaattattgacggagtttgcagtaatttggcttgtcatccccaacatctgttgcctttgccgttacaccacttagctcctgatgacaaattgaacaagatcagagtgagtgcatgataactaataagcatcttcatgggtaaaatcagttaacatcaaaaacaggccagtggcattagtgtatgcagtttcctggtagtagtctcttcattttcactattcttagataattctttcactcctcaaggattcctaatcgtctctatgccgtctagaaaagactttaattatactatcttgcttatagaagtggccctaaaagaaacacatgtgtaatacaattataagaat

SEQ ID NO: 1883648 - DNA, 4001 bp, Homo sapiens
tcccttcaccgtgacccctgacctttgtcaggaaggtgcagtttttcttctcaatctaaatgcctttcaggtgggccgcttccttggctacctggttccagggggctgttttgtaatgagatgctgctggcaggccactcagaggctcccagctgggttggtgggacagccaggccagatgacctgattccagcaaaaataaaactcagatttgggcaaaatgagacttggagtttggggctctgtctcgagtgggtttgctttcatccatgtggtgtggtttttcttcaggcacacactgggaccccagtgatgagagatgggacgggcactgtgtgtgtgaggcgcatgaatgaggtcagcagaggtgccagctgccactagagggcaccgtcttcagcagtggagctcgtgacaagcccacagcccggccagcctcattcagcagaacaggcttggtgtggacccagtttcaggaaagacgggcacttgctgacagggacgcttaacatccctcacctgtggggatacagctgtgttcctggaacaagctgcggcctcctcccagccccatcccgagctgcttaggacataggccccccatgcacctgaccacccaaggagccgtctctgggcagagtctgggcagcagggccctgtggagtctggtgccctgggtagggtgaggcctgccctgcaggagcggcacagggcaatgggaggctggagtccagcgcctatccctgtcccttcagggttaggctggtgaggggttcatggtaggtgtccccaggtttgtcacaggtttgtgatctggtcgggacagggagctgagcttcaggttggtctctggccagcatggctttaatttgcaaagccgaagtctgaagatgcacgtgtataaaggcaggtgaagtgagggcccctccaaggctccccctagaatccctctcagggtgggcaggtgagacactctgagctgggtctcctgtcccaccatgctggggaggccagctgcggggagccaggaccctggagatgagacaggagtaccaaacactggggactgactggggggcttccaggaggtgcccctggagctgcgactgatccttccctgggagaggcctttgtagcttgggtccaggcctggcccttctctgctaagccattagtgaggacgttgcaggcagctccaggggttggacctcaggagacacagtggggcacaagcctacaggagggacggggcggtctcttctggggtcattaattttgaggccgggtggaggggagcagcccaggcagagctgtggctaacccaaggcgccttgtaagaatggtgggggctggcaggcccgggcaggctccctgggtcccgaccggtcccccttaccttgcgctgatggcctgcgtggctcctgttgtcctcccactggcccctgcacctggcacaggccggcgaggacccgctgaggagctacgagtgggcgcttgctgggcttccagggcaggaggggccctggccgaggggatgacccagtggataagcaggcactagtgaccatgaggagcagggagggacgggaagggtgcagcgcagaagccgcgggggccatgctgggacagccagggtgggcctgagggccccctcggggagtggaaagagccagctcccaggattcagaggggctctgggtgaaacaaaggttgagggctgaggggatggggtctcgctgaccccatccttgactctgccaggaggggccctccaagttttccaccctggagatgaaccccaagagcccccagaagaggccaacggagatgatgagagtgcctgaggctggggaagggcaagggagctgccccaggagtggggagaggggccccccggccctttcctcctgtggccacaatgcctgcaggccccattagaggtggccttctctggactgtggcaaggctgtgcctggaccagctggtgtcccagatggtggggaagaccagaggcagccaccagaggatgggcctggcagagctggctcagggcagggtggggtggggagggccaaggagcctttccagccctgccgaggctgggccactcccactcctgaggcccggaagatccctatttgcctggaggagctcagggcagccctgaggtcagcacaggccaggcttccgctctgatcccccgcaaccctccctgggtgtgtggggggaggggacaagaggggagagcctgccctgggcaagagcagggtgttggggcaggagcctagcggcccatgaggattgaggccagctgggccagctactgatgtgggccctctgctgatgtgggccctctgctgatgtgggccctctgctgatgtgggcctctgctgatgtgggccccagcccttgagatggatctcatgtcatcctggctggaggtctacacagacacggctctgtgcctgatccggagagcagaaggtcaggtgggcagaagtgacaagggccgggccgggctctgatgttcctaggtcgctgtctctgcagagctccacgcaggagactggccaagggggcgacccccactctctccccaagtgagggacagggactcctcgacaccaacaagggccagtgctggctgggggtgcaagtgtgcaggggaggtctccacaaccagggcccctggatggctgggaaggcctcctgcccagatgtcaccaggtggctcccagggtcctgctagagttctgcctctccagcagcccccaagtcccaatcccagcaccctaggcctcctcccgccctcaccccaccaccgtccagccccagcttggccaggtgcaaagtgacttttcatattcctataggaaggaatagcccagaaattcttcctgaacttctccaattcacatgatggcgatgagcgactgcattttgttcatgttcatatgtttgggccgtcctccctttggctcaccccagagtgaaaatgagtcagccctgttcctggatgagacctgcagggtgggagtccccacgcaggctgcacagagaagctagagcgtcacctgggggcagagcagcgaccgttcctcgttcctgctttcctgggcacgtgtggaagctttgcccccaccccacagatgctggacctgctgttccacaggcgagcgtgtcccgctccaccgcacaggggctcctcgctcccacacccaccaactgtgggtcttggcaatgccccttcacccctctgagcctcggttggtttgtgtgagaactgggagctaaggggacctcgtgaggctgctgtcaagcctgggtgggacgggccgtggaaagcgctctgctcacgcctggccctggggaatgggctgcccgggctgtagtgttcttatttatgattttcctctcccctccatggggaagctgtctgccctaggcctcacttgtatgtgcaaagcagttttcccacctgtagagaacattccagattccatgtgggaggttcccatcctaggtatagcagagcaggaccctctggggagggctgaagagcccaagggccactcagatatctgggaaggagctggttggggctcattcaatcaacaaacatgaagctgccctcccggacctccctgaacccacaacagcgtgtacgcactgattaaacagtgtggaaataaggaacagaatgtggagaggcacagaggcaaatgtttaggacgacttttgttctattgaaagtgtttaaagcccggattttcttgaaagatttccatgatttagcacaaggaaaatcttacagatgaggacactcgtatccagaaggtggagacatctgctccagtcacagccagtgtggaaccttggcagagtttgggtctctgaaagcagacagggattcggggacatgttgtttgctgcagctgatcccaggaagcctgagggaggacctgggaaggtaggcctggaggtgggaagccggtgagtgg

SEQ ID NO: 1883649 - DNA, 4001 bp, Homo sapiens
tcttttctgttgtgaagtgcagatgtgaaaaattcacctgttctcacctatggtcagacagactgttcagacttttaaaactgtggcaggagcatttgctagccctagttgccaatgagctggatatgtgggtttcccccactaaacggaacttggtcttatggcaattataaagccacattgaccatacttgaaagagagaggctgggggtggccctaatgagttaatggcaatgttcaagttcacttaacttttgtaatcatccagtttgcaaatgcatagcatctactaggagaatgtataatattcattaggagttaaagatgataatgagaatatttattcatttgtttaacacctatttgcctgtctcttgctatgcattgagtattgtgctgggaagtgaggaatttagatgaaccagggggtttgtccttaaggggctcatagcttagaacaggagacagacaagcaaagtgacaatggtaacccattgtgatcaatgtcattaaagggaaagtacaggatttaggaactaatagtggctcagggtgtggggaaggaaggcttgctagagaggattacacttgaacagaatcttgaatatgatttagagcttgggaggaaaagggaagaaaggaggcagtgggagagaggcagagatgtctatccataccagagtgtgaagaggagaaacagcatgctgcatttggggaaagtccatggagtgagggtcaggaatggagggagggtttggatgagacagatgaaattggcagaatctcatgtaggaccttgagagccctgggaaggattttgaactcttcttttctagaaaagttataggaggccatttttggatgtcaacaaggaggaataaagatagatttgtgcttgaaaaatatcatcttggctataattgtgaagcagaattgcaagcagattggagttggagagaccagcaaggggctgctgtagtcatttaagcaagaaaggatggtggctcaaaccagggtgggagttgcagggatggagggaattgggcagagtctagtgatattaaagacaaacttgcaagggtttggtgattgatgggatatgggtaaagagtagagagaagtaatatcctgaaatggaattggcaggtagggagaagagggagaagtgactgttgtttgggcctggtagttccagcttaggaatagaggcaatcgaaacaaaaaaattctgttgtagacctggcctcagcaggaaaccgtgcctgtgctctccttatctccagacttggcctgccagcacatacatatatcaccctctcacttaagatggagctaacagcaggcaaagttcatctcttagaggcccttaccctattggtttggcatgtctttattctcacagtccacagcagtaaaataataatattgcttacagagggatggcaccatggttaagtgcatgtaagtcagactgctggatttgtaaataggctcattcttaattagctatgtgagcttggacaagttactgaagccatctgtgattcagtgtccactttgataaagtaggggccatagctcttatttgacaaatttgtttaagagaaaaaaaaaagcagaattatatgtacatgagtaggcacctgataaatactgataaaacaaatgaatagttcttaccttattcttggttcattttctcttctcagtatataatactggatgcactttgtcttggggattcagagccctgctttctttaagggagaaagggaagttgaaaggtcaattaaagttttttggagaatctgtatcctgtgctgcattaggcatttttctcatgtcctctaacctcggattatcattctaaagtctttatctcatcatgttccttcctgttgcccaaaggatcaagttcaattttcaaatgttgagtaaggctttctagagtctgaatgtttgtgtcctctccaagttcatgttgaaaccaaatcctcaatgtgatggtatttggaggtggggcctttgaaaggtgattaagtcatgaggtggagtcctcatgaatgggactaatgccttcataaaagagaccccagatagccgcctttcttcttccactatataagggcacagcaagaagacaccaggaaggggccctcactagacactgaatctactgctgccttaatcttggacttcccagcctctagaactgtgagcaatacatttctgttgtttataagccacccactgtatggtattccgttacagccacctgaaaagactaagacaactttcatggccctttgtgacctatccccaacttgcttctttagccttatctcctgcctccacctgctaggtgctgactctaccctctgctttagatatgatatattttctatttatcaaaatgtcatgaccacatatggccccatgctaaaatgtgtgctgtaccttctgctgggactgtcctcagttcttactccttaattaaggctttgctcaaatattaccacctcttatagaattgatcattctatcctctgatccctggaaccttgagttttttctaatatagagcttattgcagagcatctcaattatttgttgagttcatctttcccttagtaaactgtgactcttcaagggaaaaacctgtaccttcttggccttggtagcccccaatcctaacccagaacgtggcgcagagtaagtgtttaggaaaactttactgaatgaatcagtggataagcagattcaagttaaaactgaaacaacagtaggtagatgacataccttttttcctcccaccaccttcttgctttgccttgccttcaccccagctcagcaatctgctcagaaaagagagcatcagaactgaccaaaaaaggaaggaatatcctaagaaatgatgcagctacatattgcttggcttgtgtttcctagataaggcattgattcctaggcactagaattatatactataattaaagagatttttttttaaatctatcaacaaagacctagagtttgaaaatctttcagttttctaatccaaattagggaaccagttacacagggtagcataggtcaaagggtagggctataagacctggattggctggctgaggataaataaggaagtgtagacttagtccaattgcagcccaaacttgacgtgtaacatttatacttagaaaatgtgtcattctcacgtcctttatacagatttgtccatcagtacattggattttcttaaacaactaccatttgattcccctattataattattgaagtgaattcactctgataaaatacagtccttagtagttcgctttaatgctctctaaaatattcttggaaaaatatgaacgtttttaagttgacaagtgcttttattataaaagtttaaatagttgtgagggatataatgtaaagtatattgaatatatagtcatttaaaataaaactaactattataaatagatttaatggattgaaattccactttaatttgataccaccattcatccatttaaaaatatacaagtagaatcttccctaacagttgaaaacttacatagttcttttgttttccttaaatgtttatttccatttcatttgctctatagaaatgtttcctaatgtagtatatttttttatactggaaattctttcactgatcatgttgttatattattctgaaacaaaacatgtatataaattcatattaaaatttctttaatgttctgtaaatataagatgctaacaaaacccaatttcttctggattaaattatcataacaattattagatgtatacaactgatcaatctaccatacacttattaaaattttgctaaatgtgatgtgaaacataaggttttattagaaatgcttctctgaatgaggtgaactttttaaaaaattaggccatatgtctgctgaggaatattcattattgctaacgtgagatggtatttcataaattttattta

SEQ ID NO: 1883650 - DNA, 4001 bp, Homo sapiens
gggtactgatctgattggaaaaataattcccaaatagtctcattcaatggctttaaatgtgttcactctgttatcccatgctgttcatctttatttatttatttttaacatgtatgtccctttgtgaggttcatgtattcctattattttctaggtttgaaattcttatttccagggtagaattacaaagaagggagcaattgaaaacatctgctctgctttcaaacactgacaggcacctccatcacactcctttctgctgctggacaattaggtacagctacaggcagaattgtttttacctttgactggggttctcttcttggcagcgaattaatgaaatgcacggaataaaaagctgtttctcgcccactgaatggatgtaactgtcactcgctctgataaggaacatctatcccacgcaagacagaagtggcagaaatcttacttagttgactattctaatgactctgtttgttttcctaaagctcaggctgtttgaggcagtgtaaataatggattttgtctatgttgctacagggtgaggagaggagggaaagaagagctgctcctaccatgagtttctgaagtggatgaaggctgtagatgcagaggaaattatccacatcactgcagatagtctcgatagcagcgccaatgaagttactgagagttgtattattaaaaacacctatcatttgctgagcacttacatttagaaggtgcaatgaaaagcaattcaaacagactcgatcctcatgaagtctttctgagtttggtattatttttccttctttttttcagatgaagaaacaggctgcaaggccagagctataatgttaaaaaggtgaagactcaggatccaaactcaggtgcaggtgataccaaaatctgtgctcctaactgctacatggtagacagactttagaggcaaacacacacttaggctagaaagcaaatctacagctaatgtgtcctgaactttggccaaaatatttcatctctctcaaggtcaattttcgcacacgtaaatatagataatcataattaccacagagtggttattggaattaaattcataacacattgaaatgctggttgaagtgcctgatgtacaataggttctcagaaagtgggtgtcagttctcctttttggagatattcaaaggggacagctacttggtaggtattttatttggcattactaccccttgtgggagagaggtggataagaagcctttctaatgtctcccagcccagagcgttcatgccatcaatcatttgttcaggataacacaaacttgctgtctgcctcctaactcagagatcttacttcactctcaaaggtataagaaacagagaaggtataaattgttgttcaaacttttctaataagatcatgaaacctcaaatctaaaagctttacattgtcaaatgtaaagtcccttcaatgtccacttataagaacaaaaaagaaacccttactctgaaaaattaatgcactgtttgaatttttccttgggaaaggagagacatagacctggtaaagggggagaggagacgttagggcacaggggactctggtctggtcctgcagcctctccttttgtgactccacctattacaggggaagagaccggagttacaccgagttactggcggaagtatccgtccaggtctgcagcaacgtcaattcttgcctcctaagaaggaagaattcgactgaggggcacaaagcagaaagggcgactgagtcaagttccagagcaggaatgaaagtttattttaaaatgccttagaacaggaacgaaatgaaggtgtgcatggaaaagacccacgcaggcacatgaaggttaaagagagaaggtcagtgccccgtttaactgtaatcttgggactttcccaagggaaactcacctctttcccatgattcttcccttagggtgggctgcccgcctgcacagagccctccttagctttgggaagcaagcatgcgccatgtgttaaaggcgttattggcatgcccctccgaggcttttttcctttttccggtggcgtgtacccggaagatcatacttcgccattttcctcttaatacgcatgcccaggaagtttcttctccctgggctctgcgttcatttaccattttgatgttaacaggtgtggactatcaggaaatggcctctgcctgacgctgctaaatcatcactctcagagaggcaatgcgagaattgccaaaccagcacctgacacttctagtgcgtgggggaagagccctcttctgtctggctcacgcctacctacctacctgtaacacatcctagatgcctatctggacttagtgttttcatcttttaaatgagcaaattaacgtaatactagaggatcactggaaactttacaatccagtgggtttggttctcccatctacctctctttctgtccctgcccttggatctcctgtacttcttacgatattgtgatggcttaattttatgtgtcaacttgattgggccatgcaatgcccagatatttagtcacacaatattctgggtgtttccttaagagtgcttttagatgaggttaacatttaaattgttaaactgagtaaagcagatggccctccctaatgtgaatgggcctcaccaaatcagttgaaggtctgagtagaacagaaaggctgaccctcccccaggtaagagaggatttttcttgcttaatggccttcaaactgggacatcagcatttttcctctcctcagacctaaactggggttcaagtctgctggccttaggactgaaactcaacatcagcctgagtctccaggttgtgaactcaccctgcagacttgcaaaccatgacacttgccggcctccaaaattacaggtgtcaatttcttatggtaaatctcttcatttaaaagctctctctcacacacagacacacacacaaagcttatctgtcctaaagaatcttcactgtgaagcctcataaattcaatttaagacaatagtacagtagaaatgactgacaagtcataataagtaacattagcaatatataattaaatatttgcaaacattctttatactcacctattctttgatatttccatttccaactaaccccactgagcagattaatgcaatcctactttccagattaaaaaagaaaaaaaggaagttgagagtgatccttggccatatagcagagatagatttcaaattgcaattgtcctcaatacacagggacatacctttctattgcaccacaacgaatttctaactgatacttgcacttaacagagacctttgaaaactcacttcaaagcaatgaataacctagctgagtccagttaagtagcctgacagaggagaataatgcctatggtctatggttgctttgcaatgaagatctgtccttggtacagaacctttttataggtgcaaaaattgtaatcctgattatcctgctcaatagagatcagagtggtagagcagcagttgaaaatacagcagaatgaaatgcttaccttatcttaggctctgatgtcagaatttctcttcaggataaaattatttttaaaaatagaaaataccttaataaaccccttgggatgatttagtgaagggaaaggtccaaagacaattatttctgtgcaacaaaaaatgatccctcactagactctattaagtcaggatgaatttttgtttcccttctggaagtaagagctggagctcagcttatggggaagagattagagacaagaggcaggaagatcaaaataggttgagatgatgaggtagaagcgacagtgaaaacattttagtgtctggacaactgaaaatatttttggcacactgcagactaagacttgagtagtgaggtttttggggataaagagttaagatgtggaacaaaagggaacacatagatgctgaagttaggagacaaagatgattttgagaacaaaaaaattcctagcaactaacaaaaatctt

SEQ ID NO: 1883651 - DNA, 4001 bp, Homo sapiens
gacaacaaaatttacctaaaaaaacaaggtggcggccatattagccctggggagtttgatttgtgggagcacagctggggtgtggtggggtgctgagcggtagaggatgggccctcggggaaggaggcgacgagtcggggcctggcgagggagcagggcctgagcagaggctgggtccccctgggaagggcgtccttccaagctccatggcctcacaggaccctctcctgggatctcgaggaagaaaatcccaggtcaagggagactggacaacgaggtacagggagcctctgtgggtttgtggatcgggggctggcccctgctcctccctgtgctgcgggttcgaggtcccagcagaggcagtgggaaggtctcaccaggctctgggcttctcagcgcatcgaggcccctcagcgcggcagaggggtccacagccacgggtgctgggctcggtgttgttgccaacgttggtgcagcaagaggtgaggaagggtccgttagcgtctctgcggcagatggtggtcctggctgtcgtgcgccacggtcatgtacgtgaagcactgttcttagctgcttgcccatccctggtgggcctgtgaggacctgacgcaagtgccgggggcatgggagctgggagggagccacgcaacgtgggcttcatgtgcactacaccccttactcgggggccctgtgtccttgtaggtggtaacgtggacctggaaagccaagcagaggggaagaaggaggtggaagcggatgacgtgatgaggagcggcccccggcctatcgtcccatacagctccatgttctgtttaagccccaccaacctgtgagtctccttgcctgctggtgtgtgtggccgcccactcacccatgcatcatgacccgtgggatctcagtagccagcgtgcactgattctgcgcacttatgtagagaaacggctctaaatcccatggcagaccccagaggcacgtgcccgtgtgacctcattctgcagaagaggacacgggcacaggaggcagcctcagcggagctggggtgagctccaggcctgggctcctcacctcctctgtggtgtgcgtgtgtctctgcacacagggacgccgtctgccctgtgtcgcaaacacacttccatccatctgccttcccatcacacctggcacctgtgttgcctgcgtgtgtgcactgtgtttatttgcatgtctatccgtgtgtccacgcctgtgcttttcatgcattcatcatccactcttcagtccagggcttccattagtccagccagtgtttctgtggcagacagcactctaggtcctgggaatagttaggaatgaacaaaacaggtgagaacccctgtccttgctaagcctgtgtgctggtgggagaggcggacgacagacacgacaaataagtaaaagacataagatgcagatagtgttaagtactaggaggaaacacaaagcaaggcatggagatgcggaccattgggtgctaaaacttagatgagaaggtcaggtggggcttctggggtgagactggagcagagcttgaggaggaggaggcagagggagaggcagacaggggtggaaccacacaagagcttgcccggccagagcaggggctgggcaggtggacgggagggcagagggcagcaaggctgcatggacgtacccctgttcgttaccgatctgcccatccccttcttctttcaccacccaaccgtctttctaccaagccctgcattaccccgctccctgcctcctccccccagtcactcttttatccaacacacatgtcttgggagcttaccctgctacgctgcggttaggagtaaagcggtaatggagacagacgtggaccctgccatgtcaggactgacagtgcagtggcaggtgaggggtggtaacccggtgtggaaatggaaacacaggaaggcactggcattctgggagcaggtgatagaaggccagggaggttttctggtggaagtgacatcttggttgaaacctgaaggatgaataagagttaaggtgaagaggggagaggggaggaactagcggagcattcacagtagcccagaagtagaagccagcagttggcacacagccaaggacagaactgggtcagaacacaaaagggtaggcagagctggctggttgttctgttgtggggttggggggttgcaccatcccggagcacactgagaagcgtgggacgtgtgcacagtgggggtactcggattgcagcccagcagggcccttttatggggagactacagatggaggccactgagtagatggtaagggtttcaggcagagagagtggtggtttgaccagggtactcatagtgttgaggtttggaagtcaggtgcgtatggaggaattttagaggcagaatctacagaatttggtgataaattagatgtggaaggggaaggagacatcgaggatgtctgactgaaacccagtttctgcctgacagtggcggaaggcactgcgttcactgagaccagcagtgctgctggggtcccgcctgcagaccctgcaaagcctggggtggctggggatgtctcatggccaggtggacttaggatctgagctgggggctagagctgagtgccagaaacccagacacaagttggagtggatgacggctgaattagaaggaaaggcaggggaagtggcaagggttgaggcagcagcaggctggcggtgggccagggatgaacagctctgtggacacaggggcaggagctagatggctgagttcccttcaaggaagagggagatgtgggcagccgcttaagatgaatggcccttgggggttcgcaggtgtgggtgagaggaagagcttagaggggctgggggcggtggacacgcctgcgaggcaggggaggcatctccagagcacagccctcgtgatgggggccgtctgccccacctgctccgtccacggctgcctcttctggtcccccacccgtagatgggcttcccagcctcctggttactgtgcactctcacgttgtggctctgccagtagcagggaggcccctgcttgttgatttcctcgctgcttcctggtgttttgactgctgaatggagcttcatcaggcctgttctggtcacccctgtgtcccccagtgtccagcacatgcctggcagggtaggtgctcagtaatgttgaacaagcgagtcgggcaaatgggactggagcaaaaggcgagcacgtggcagtgtgtggagtgtgtccccgtgcagcgtgttcacgtggagcgtgttcacatgcaccctgggagcctggacagggcacacaccccgcacaggccccagagaactttcctagggcaagagaggcctgctctccgtgagaatgttgacgctgaaattcttcctctctgagcaactccctccctgctgcccacagctgacctcttctgtgaaagggctgggtagttgatgctgttggctttggactgctgttggctgcatggacagttggtagtgaatggatgtagctgtactccagtgaagttttattcacacaaacaggtctccctatctggcctgtgagctttggtttgttgacccctgccatgaggttctgcagccttccccaccccccgtcccgggaggccctctcaggaatctcagccactgtccgtcacctggctgccaccaccaaccacagggaccattagcaaagcgaagctctggggccacagcttcctgaggcagcccagagccctttctgcgggacgggctgagcctgccctgtggcaaggggtggcgcgcccggctggggggccttgtggtgatccgtgccttccctcacaggctccgccgcttctgccactacatcgtgaccatgaggtacttcgaggtggtcattctcgtggtcatcgccttgagcagcatcgccctggctgctgaggacccagtgcgcacagactcgcccaggaacaacgtgagtggcccggatggccgggtccccgccaggctgtgg

SEQ ID NO: 1883652 - DNA, 4001 bp, Homo sapiens
accatttcttcaacttaagaagagttaaaataattgtatttaccaccatatatgccccacaaggattcattctataattaacatgatataatagtagtataatcaatgaagtaagcaagccattaaaaaggggggagatcggatctcaacacatccttgcacctgatcttcctccactccttactcacccttttcttcaactaaagggcacttctgttctcatagatgcctgacaatcactcctctcccgctttggggttttctcctgttattttcttagtctagaagaatctccctgcccacctccacctatacatgccaaagtctcacccatccttcaaagctcagctcaaaagcaattaattttttgagcccatgctacatactagacactgattagttactctatattaactcactgaattctcataaccacccaaagttgagaacttttattatccccatttcacagacaatggcactgagacccagaaagattgattaatggacttcccccaaatcaaagaactcgtgtttggtgaagctggagtttgaatcctgtgatctaacggcagagtctcatgccctaaacttctatgctcaatgccttctgtgattgtctcttggaatgtttttccctcctttgagttttctatatgttcactttatgttactttaggttcagttcttttaagacacttttcattcgatttttttgtttttgagacaggatattgctctattacccaggctagagtgcagtggtgcaagcatggctcactgcagcctcgacctccaagactcaagtgatcctcccatctcagcctcccagggagttgggactacaggtgtgtaccaccatgcccattatttttttgtttgtttagagatggagtctcactatgttgcccaggctgcttctgaattcctgggctcaagggatcctcctgctttggcctcccaaagtgctggaattacaggaatgaaccacgacactttgccttcacattctaccttgcatttaaattatgtctcccccttagctttctcctagtagactagttgagggcttaacccacttgttttccttgttgactttttagaaaagaacacatgataggaaccccgtcaatatacaagcatagaaaccgtggaccagaataaaaccacacaatttttctgcagaatgagtgacatccaagaggtcactctcaaacaatggaaatttagggaaatagtctgtggttaaacaaaggattttcccccttactcatgcaatactttgggctggaacgttggtttataaactgactgattatgagtgtgctggggacttttaaaaaaaaaaaaaagagtagaagatttgtcttctcagcaggaaatgaggagggaaagattaggcaactgtaaagaagccaatttgtttttttcaaacatgaaaggagaaaaatatataatttaaccaagaaattatctccaaatgcccagggaaccccctgcttgtccaaacagacaaaacactcaaacattctgtgtgtttttgcaggatgtcaatttggcgctggcagtggaggggagtaggattaggcatccatagacacagacatgcaaggcaagacgtagaagagccagccagggaagatgagcgagactagcaatggctgtgaggccaaaggctatgagcaacttcaatgcacacgtggtgtgactgagagaggaactcagctctatatgcctcccattagctcttcagtaccttcccaaatttgcttgatattaagaatcatctgagatgatggtccaaaacacagattcccagccttcctcccaagcctcccgagtaagtctctccacgaggtaccctggaatttttaaactcaacaagcacgcttaatgattctgaggacccacctgaggcagggaagcactgttgtgggcaatgggagctgaattccggttctgcgatacgctggaatgtccaagtcctcagggtaaggtagcagaagaagggctgcattggaagttgagagaacagtgggtcctgtagactcattggtccttgatgcttcagttaggagcgcttgcccatctcacactttttctgatgtgtccatgtagtgctttatgaagtggacaccttgatttctgagggtctgttgccaatgttaccccatcatgaccatttaactaaaaagactgaggcattcccaaaacaaattcttagtaaaaaactatgagtctagagtaggagcaggatttgcaggctttgcaggaggaggctttgcagcagccagcttccaagattgccctttgttattctacttgattgatagtgtgcccctgtgcagactacttccatactgggtagagctgaccaatgtcacctgtaagatgttgtgaagatggtggtttgacttttaagataagccataaacaacactgcaggttccatcttgctctcttggatggctctttttgtaaggagccagccaccatactgtgaaggaattcagcaaacagccctatggagaaatccagatgaccaggaactggggccattcacagcagtcatcatggacctgacagttgagccacctgggagacagataccccaaccacaggtgagcccttagatgactatggcccaggccaacattttggctaccacctcctgagagatgctgagccatgatcacccataagcctctccttaaattctgattcacataactatgaaaggtggcagagtttatcatggttttaagttgctacattttgagataatttgttatgcagcaatagataaataatacagtttctctctcccttgtgtctgatattggttgaaagaaggtctaggaggctgggcatggtgtctcatgcctgtaatctcagcactttgcaaggccaaggtgggtggatcaccgaggtcaggaatttgagaccagtctggccaacatgacaaaaccccatctctactagaaaatacaaaaattagccaggcatggtggcatgtgcctgtaatcccagctactcaggaggccgaggcaggagaatcgcttgaacctggggaggtggagggtgcagtgaaccgagattgcaccactgcactccagtctgggtgacaaggcaaagtgagactccgtctcaaaaaagaaataaaaaaataaaaaaataaaataagaggtctcggaatggatggttcatgtagacggtatgtggcataataacaaccagcatgtgtggaatccatactaaacactttacatcatttcatttcatttaatttcatctcatttaatcttctcaaaaggcaggcacatttatcctcattgtatagttgaaaaaactaaagtttgaaaaagtcatgtcttatgtccacagcttttgatctagtaagagtgaagtcagaacttgaaagaaggtctgtttccaaatgacttccctgctcttggtctgcttcctggggcatctgtgggcattttgtacccatcctaccttaccctcgttgaatgtgtgccacctcatttagacttggtctgtacatctgcagaaagaggatgcgttaggctgctgctgcttggatgtagtgaggggaatgctggcccaagttcagtctggctgaatcacagttgcctcattgacaaaatggggaaaataattactatctcacagggcagttgaaataattcaatttcataatgcctatgccattgttttacaaactctaacagctaacaccaaagtaaattattgtttttatcatgatttttgttatgttcatctatgccaagctcataaagattatgggattagaagagccaattacaacagcccacccagcgtctatggaagggccccaactttaaaggcagtcaatatatccattttttccagaacatgaaagaaacgttgaatagctatttattgtcttccagctataattgattatgggatgagagttgttttgtcgatcttccattacagtgcttgaataaaag

SEQ ID NO: 1883653 - DNA, 4001 bp, Homo sapiens
gaaaaaaaatctgtttttattctaatttctgagttatctgaactttatcttccaacccttttgtgttatctcaacattcccttaagaaatatatacgtaacatttaaatcttattttatgactgcagtgccttctcgtatctttcaggggatgttatttatgggtgtttatttaaatgtattgtctctttttcctcctagttgcctttttctattttcctgaatctttggtctctggctttcattatagagttttccacaaatatctggtgactcttgactgcctgtcattcatgtttaaaagtgtggtgtaagaagctgaccggggctgggcgcagtggctcacgcctgtaatctcaacactttgggaggccaaggcgggtggatcacctgaggtcaggagttcaagaccagcctggccaacatggcaaaaccctgtctctagtaaaaactaaaaatataaaaattacctgggcatggtggcccttgcctgtagtcccagctacgggggaggctgaggcagaagaatcacttgaacccaggccaagatcacaccactgcactccagcctcggcagtagagagagacttcgtttcaaaaaaacaaaaaacaaaaacaaacaaaaaaaagcaagctctatgcacctgggtggggcccaagggtgaccaggccgagactggagatttcattagagggtttcaaatctcaaatcgtggtccctgtagaccttgtccccatgccaagtggtttccccagaaaagaattctctagtctcctgacctggagagggagggagacatgggaacagcttgaagcccaactgcccacatcccgtaaacagcgtgggaagacaaggtgggaatcccaccctttaattctttaatttgttttcctcccagttttagtctgggtctcactctttcctttgcgaatgccccaaatcctgagtcgcctccagtcagcttctcaaagagtcgacttcttctgctgtgctgggaggtatagttggtcgcctggctaaatgaggcttcaacctgtccgctcctgtcgctccctctctctgacctgtggtcctagctactcaagaggctgaggcagaaggatttgcctgagcccagaaggttgaggctgcagtgagccatgatcatgccactgcactccagcctgggtgacagagtgagagtctgtttcagataaagaagtgccaggctcccatgtttgagcctttcccaggttcccaggtcccaggggctggttgctttgctcctggcaggctccccttcctgcaggctgagatgtcggctttctctgctttgcaagtcccttaccctcatccatctgccctccggcttccaaatcttgttaaaatctcctgtctgcttttgtctcctctcctcttctctttattctgtgggtttatacattttaaaattccactaaagtccattttggtgaggtttcaggagtgaataggaaaaacacatcttcaaccagccatcttatctcacattcctgacatttctccatggttttctttgtgtgagcagcatcagcttcctctccagttctcaagcatgccagcgtcgtcctgcctctgtgcctttgtgtgtgctgcctcccctcctggaacatgctcccctcctttcacctgcttgtcacctggctcacagtgacttaccagacatgtgtcagcttaaaaatcgcccctcagagaggctcccccaatcccgggcctcctgcctacctaaagcagttctagtgactaacttatcacacaccagcgctgctgctcctgaatcttctgtggcccattctttccctctcagactcaggcggttttcagaaagagatagagaagccaggagggcttccttcccggagcccagagcgccctgcgggaagcccctcgggcctgggcctagtttcactcaccctctgcaccgatgcctggctgctgccctgagtagctgagcccgtccctgggatcccttccaactgctggccaagagcgagaggtcagctgaaacaaggccttctctttgttctcccagcctccccaggcatcctggatcttttcattgcactctctttttctctgttcctgtcactctctgtgtgtctctctctatctctgtttcagtgtctctctccctggctctgttttctcctctcctccttctccccacctgccttctcttctcccattctctctcttcttttctgtccacccacctcatttcccctttgtctgtctccatgttcctcccacgccctccctggctctggctctgaggatccctctctctctctccctggcacccatgcactcagaaggcacctccgcctccttccactgcctctcttcaggtgcatggctgccagggccttcctgcagtgaggcccaggtgtagtgtggcccggtggccggccggaccgcctgctgtctcacacccttgtaaggttactatttatctagtgcaaccgaagttggcgcacacatctggggcctggtacttagtgcaattatttatgatttccaccaagatttaaaagctcatcgccggccttgtaatgcagtaactgattgcgctgctaatgtaattaagaaaagattatgatgtccacgtggcgtaccagatggtggcattcatagtaatcggcgtgcacaactggcagacaactgcacaagggcagccgagcggaggcagctggagaccagcatcttcctccagtcactcaggaaggagaggaggctgctgggagtgctggacagggaagggtggggaggggaaggggaggaggagaacccaaaaggagaggaggggtccagctcccctgatctgtggctccgaagtgggttctgttattgcacacacacacatgcactgataaagttttgctcatacacatacactcaagggcacatgcagacacacacacatacacagatgtccatgaataagggactcttgccttcgtgtattcaaaaacttagactgtctcgttgtgctaagccttgaaaatatatcagtaaataaaacagtgattcccttccttgtggagctcaacagattagagaaggaaaacccattgatcaaataaccacaagaatacatgaaaagttgaattgcatttaatgttacagagagaggtgggttgtgttatgatggcttcgtggggcgtttgactgggtcggggagttcagggaaagcttctctgaggaaataacaactgaggtgtgatctgaagaatgaataagagctaacaggtgataagagaaaggaaaggtgtttcagcagagggaggatgtgcaaaggccctggggttagggcggagagcacagctaatacacgagtctaagaaaaatccaaggcaaacttgaagaagaaaaacaaaactgtatgccaagacttttaataaagctatggtaatgaaggcagtgtggtattggtgcaagggtggacaaactgaccaatgaaacagaggagaaagtctggaaacagacctacacatacatgattcctgtatgtaggacaaagacagcaccatcgtccaatgggaaaggagtgatcttttcagtaaatggtgctgggtccgttggagatccataacaaaataagtgtgtcttgacccctatctcacatcatacacaaaaatctattccagaattttgcagaactaaatgtgaatggtaaaacaataaagcttttttttttttttgagatggagtctcgctcttttgcccaggctggaatgcagcagcacaatctcagctcactacaacctctgcctcctggattcaagcaattctcctgcctcagactcccgagtaactgggattgcaggcgcgtaccaccatatccagctaattttttatatttttaatagagatggggtttcaccatgttgatgaggctggtttcaaactcctgacctcaagttatccacgtacctcagtctcccaaagtgctgggattacaggcatgagccaccgtgcctggc

SEQ ID NO: 1883654 - DNA, 4001 bp, Homo sapiens
ttgctcctttcaacgccacacgcacgcctgattcctgggcccttttctctcccccagtcccttcctgccacacacactcctatttctccacatctttcccctctaaatgacggggtaaccagaagtgacaccacagccgctggacccctcacggcgcgaacatgaaactgggcaggtctgggtttggccacccgttccctgacttgctggctgtgtggccttatgcaggtcacttgccctctctgagcctcagctttctcgcctgtaaagtgaggggcacgtgagctcccgccttgcagggctgtgtgtgttgcgggtggtcttggaagccgcactcagtgtggacaggcagcagtgctcccatgcaggtgccacgtcaatatcatcacgtggttcctgtttaggtcctgctcattcctccaagggccgaggcagctccgggggaatggggagggcgtggcctctgccctggtcctagccgggtctgcggctgctggtgtccacctgtggttctcaaagggtggtcctcctggccagcagcattggccttgcccaggaacttgtcagaaattcagattctctggcctggccagtcctgggaatcagaacccctgggatgcaaccagccacctgtgctttcacgaggccccaggggcctctcgcaggcactggtgtgaaccaggagatcctggagggtggcggcccatcttgtgccccctaccctcactcccatcacagggtctggtcctcccatttctccagtcactctgcactaaacgctggacaatggcccctaagtacaggccctcgtctgctagttaacaactggggggcccaggttctccaaatgtggtccccagagtacccacaccagaccacgagggagcctgacaaaatgcaagcccctgagtgccccctagaccggctgggcatggctccccaagaatttgctctggggacacccacaagtcccagaacagggggaggaaaatgaagggcacaggaaaagccgggccctggggaggagatggaggaaaagggaagtcagacaagattccccagtgccagtgacgggcaccactgcctccccagagccaccacaagccagccgccccttggcagcaggggtctgggagcccttggcagttcaaccctgtacggacaccgtttgaggggctagaaataagccaggatgaaatgttatgaaataataataatagtcccttctctggcccactgcagaaccctagaaagtaagggactggggccaacggcagctgcagtcaaggtgcctgcagctatgtgaccccagggcctagcccgcccctgcctcccgcccttcacttaattccaaataccttttctcttgtcagccgcaagtcagtgggcttcaaagtcaggcggtggctcccgtgaccctttgtggggagggcaggggtgggcccagcttctgtgtgttctgctcagtgggccaggaggccccaggcctgcaacgagagggagggagggagctcggcctgccggtcattgctccgcacctaggcccttgcagcttggaacggaccagcagccgggaacagctggtccgatcccaccgccctgctagggaggctgcccaaggtacccggagagccttggactggggagctcagggctggatgagccagagctccaggagaggaaggctgcgctcacctgaactaaaagtcgtgttacaatcatacctgcaggtgtcaacctcactttcgttgcagagaggagggtctggaatcacatgctcctccaggcagcattttacagaaagctgccctgacagccacgacgtactcccccacttctacctctatctcggattctgttgcagaatgtggcgaggtatcacagggctgccagccacggacaggtttgaggggaccggagtagggggttgcagggacgagctggcaggatccaaatccctcccgtcagatgtgtctccacccacagcttccttttccattggagcaaacataacaaaacaagtgtcaactacacttcctgattcctgagttacgaaaagccagtgccacccacaggtccgtccaccccctcctcttgacccggcccttccagtggcaccttattctgttatttgctctctatttttctttaaaagcattcactgctattacttaggtaaatgcatccataagggaactttatgtgactactgttaggtggaaaaaaaactaagatcatgggccataaatagaaggtaaaagtaaaaataaattacaattaaaataagcaatgttaggaaattctagctggctattgttgcctgccgatggcattttgatagaaaagcgttggggagttgcaagcttcccctccaggggaccagagggctgagacagagaagggaatcacctttgtgtggtatgaggctgtgtgatccctgacgtcactgtctcctaggtcaccgagggtgcccaccccacactggggaaacactgacctgaggggcacccctaagccagtgaaccaggggacagggctccttgcgaggcaaggaccagatggcatttaacgctgataggcactatcatgacctcctgggcatgaaacaggtacctccctggtcctttttccagaagaggttgcagaagccctctggacaggcctggctcatgtcctcctgctggagcgggctgacatagccctcagccctccactcccagcgtggcccgtccgctctccacagatgtgccacgctttctctagggtccccgccctgggattccctcccgacctggcacatctcagtcaaccccacctgccttccaggtcccctccgccagccctcggcggcctctctggggcaggacagcatcctcctgaggaccatgatgtctgtagtactgttctgccatccggaacttctcgtaagtgggaccccactgaccaccctctcgatttctaagtgaagccagagagttggatcacaattatcccctgtgccaataatttcctttatgagaaatgcagttgtaagtcttagaaagggacatgtgaattaaaacaggcagtcacgcagaacaagggggagggaacgcatgagggtgccaggaggtccccaaattgtcctccaggtggagaccagctgggatggcggtgacgtctcacctgcaccaggactggcagctctgtcacatccccacaacacagggccctggcaggcctcactctgcactggctggctgtatctggggcacagacacacgggctggtggcgtatgtcacaggtggcaaatgtgtcacttggcctcaagactccctgcatgcagtggagacagtgaggcctctgtccacacaggccccagctgggccatgacccgctcttgaggcccatcccttaccctgacctcacagcttccctggttgccttccagggtcagcagagcagcctggatgcactcagaagccccgggggactcaggccactctccctgagacccaagagcatccccctgcagcttgtgatgagccctgggtagggaaaaggtgacacaagggggctcatagccaccaccaggtccagctgggccagggcactcatcccagtctatggggagagtccaccttggctccagctggcaggatgaattaggaaatgagagccagccctttgcagcctagagcagtggctcaggcagggcctggccaggggctgtgggcaggagtgtctgaggctggaggagcagcccccaggcatcccatcgcactccctcagggcatccgaggaatcccaccttgactcctctcggtcttagctccaaagccacgtccaagcaggtgaaacaggaagccccctccccaaggggctttctagggcagaatgcctgaaagatcagggcaatcaccacaaacacagatggaaatcggaaagccggctcctaaaacatctcagggctccacgctaacacggagacaggagaggaccacgggtggggcaggggttt

SEQ ID NO: 1883655 - DNA, 4001 bp, Homo sapiens
actgctaacaagagtagctctcctctagatataacaatgtttctccttctcattaaccaccttaactcatctttgatattcagaccttgttattctaaagaatatttccccgcggaacaaaccataaatttgcaaagttaattaggactctgatcttaacgcatttccccccatttcattcctaacgctctgccgggggtgtccaagggagaggaatacagccgtgggttcttggtttctgtttctggttgagccaataaagcctcttcctcatccctcttttccgcttatcactagagacataatagaaaaactatataaaaatagaaggaatgtcttaaactccttttcccttttataattagttggcagagagacatttaaagtgtgcatatacttcaggaagacaccatataaatatgatttttatctaggtatgacatggcttcaggctgctaaaagcctaaaacaaaacaaagcaaaacaaaacaaaacagaaacaacaacaaaaacaaaataaggcgggttggacaagattgctagtatagcaggagtgtccagtattttggcttccctgggccacactggaagaagaagaattgtcttgcgttacaataaaatatactaacactaatgatagctaatgagcttaaaaaaaaaaaatcgcgcaaaaaaaaaaaaaaaatctcacgttttaagaatgtttatggatttgtgttgggctgcattcaaagccatcctgggctgcaagcggccccacaggttggacaagctcgccgtagagggttggttctgttcagctccaggtaggaaagagacaatattaagatcagacataaggggaaagttaggcaactagaagtagaggcattaagaaaagcaactgctaacagattctgatcattcaatcttagccaacaggcttttgaagtatgatggacttgggtgtaagtgaaagagttgagtagttgtatagagaacatacggaactaccacttactacctggataatctcagagtcctcatctataaaacaaaataataacgtagttactggtgctgttattgtgaggattgaatgaaaaatgcatataagtcatttaatagtgcctgagtcacaacatagtaagtccttaataggtacctaacaatcattactgagcaaagttcctgctaaaagaatagttgctgttagaagcagaaacaaaggtggagcacagaagaagtcacaagggaaaaatatctttcttgattttcttctgagtcatatacttggagaaaaaggaaaattcttagtgcttttggtcccaaaaccctgtgtagcgttacctgtgagcctgacaagatccttcatccagtttcaacatcaaggggaaagaagatgctgcttcacataatgcaggtctctgcagacgatgctgtgccacaggaatcaatcaagaaatagttacatccccagcattgctccgtgggttgtaaaataaatgtttcttagacaaagaaagtataagtagctgaaacattaggaaaataatatcactgatcctaacacggtgaagtacttggcttaaattcagccttacaaggttttcttaagaatatactattggtttacaaaatttaactcagtatttttctaaaattgtaacaccttctacgtgaggtccccagacacaggcacaagttgtaggaacagagaccatggcaaataataaaccaggaaaaccagagttgacttcatgataaccagggtgggaacaaaattgacataggtctctataaatgaaaaccaatacttgatttgtaactagaagcaaatgggcacccaggacagacaacacaacacagctgcgatgacttccagccactgataatctcataaagctcacctccgtggcaactccctgaaagcaaatcaagatcaaccccgctcctctcggcagatgcttctttttccaagttccatgggtttaggttacatctgagctcactttcacgcatgttgcgagctaattacaaagaatccagaaatgtgggaacaaactgggaatactgtaggctgtttcagcaaaccttagcaccatctgctgaaatattaagatgcttgtttaaaaagttggctgtcagagaaggaggtcacagcacagacagtggggaagttctcttaaataactacttcttacttctctttcctgtatacaagctgtagggcactgagccaaaggtgaaccgtccagagaaagaagaccgtatctgctaacttctcctggtccacgtgccagcaggagagaacctagagcatgctggtcatcaaaagagaagagatacggtcaaaagactgtagcatgtttgtgcatttcagtgagcaacaacagtcatttgggaaaacagaatggaacgtcttaaactccttttcccttttataattagttggcagagagacatttaaagtgggcatacacttaaggaagacagcatataaatatgattttatccaggtatgacaatcccttagtaatctgagacttgtgagatttggggattccctttgtaggttagatgtttctctcagaaacagagcagctgaaaagagcctcaggtgtgtagacagtgatcaagtcaatggttagagttccaacgggcttagggaaaacaaaagaaagccttgcatcatttaatgtgttgaaaggccccaacagaatcacatattaataataataacagcagcagctaacatctttcgagcatgtaccaagcattatgttaatggttacatctgttatttattaagtcttccagcattctcaggtaggtactgttgtctcatattatagaggaagaataaagatgctttcagaaattaaagaacttacaagagctcatcagtttggaacggataaagctgttattgaagcttagctgctgactccagggactaatttcacttgtaactatgaaactatattgaccatggactgagattcatgtaaggccgctcacacaagggagtgtcatcataaggatatgagtggtaaagtggaagacaaggataagagcccaaaaacatgcttcagggagacaataagtggagccaaagtaactagaaggatgccaggcagcacaagttcatgggtcttcactcctgtgtatcactattactgacacagctactctgcctacctgctttcccttctattaacttgtttctgttctctgtaactggtccaagtcactcattgtctaggctacagattggttgtcggctgagttaggtagcaatggttcaattaactgaggccaggtacaagagcaggggcctcaagggctgctgagggccccaacttcagctgaagttatgggaaaggcagatacctatggaaggagccataagaacagtgggccccatgctgctcatgtagtacagaaagcaattctgcatccatgtttgtaatctgcctcacattttttggcttttacagagattgtttatatccaaaagggcacacgggattacttttcagtcccagcagtctatgtgtagtgactacatggatacaatagtatatacatacgtgaagatctttcctactaataagtacaaagagtactaacaaagacaggttacttatggaagggtttcctcttccttcttcactctgtttgtttcaaagtcctgtttattagaattaaaaggtgcatggtcctgatttccacttaccaggaggctggtcatttttcatcattacgtagaggggtggctcccagtttagctcaaccatctgtcgtccctcgcaagcctgagagattcacagcaggaccagtagagtttgccaaccctctcaagcaggctctgagggcagggttgacaagttacttcccaagcctgggtggaccagacaggaagaacagatccatacatatgactagacagagccagacacgcagggataataggtcatcataaaagcaaagttggcctccagaaagaagaaaacccaccc

SEQ ID NO: 1883656 - DNA, 4001 bp, Homo sapiens
ctcattcatctctgctgcttggcctgagcctgcacatttggcctccttcttaaaacaggggctcctagagagtcccaaaatccattaaccattcccatatgtgggatcccttccctgatcacacaaagcagaagcctgagaaaaaaagcaataaagagtggcctcctggctctccttctcctcttccatcccttgtctgggaaaggggttcccaaccccagccccaccaagagcatattaagaagctttcttcctcccttcctttcctatctccccctcagatgctgtgatcctgactccttctgtctccacctcaaaatatttcctcttgcattttattgttattctgttatgcagggactgttaactactgttttattattattattcattatttattgttattaagattgtcgttagagatttgttcaccaccgttcaagggacagcagcctggcccagggggaagcctgcctctccctgtctgtctctctctcacacacacacacacacacacacacatacacacacacaccctaacacagtgcacactcacgcatatatgctcacaaatgcctgctgtgttcaggcccctgcacagcaatccgaagaggcaggcatcctaccccagcacgcaaacaacacactgcccacgcacaccagcattcaggcagaacaccacccccagaccaacgccaaaacccacacgcaccgagcttgcaaggaaaggaaaatacataaagaatcccttctctccaaaacctggaggggcgagtcaggcctctgtctcttccccccagtcgctttcgctttctcttttttttttctccttgtttacagcttcagagagctcaaggcccataaatcttgaggggtctacagagcgcagagcacatttgtatgcatcgttaggactcactaatacattactaagcccattaaggagagtgtatgcgcatggtttccggtgtgtattaacttatagttaaattctggaggaaagggcattgtgaattaacatataccaaatccatcatgggcttttgtcatatcagattagtcagtcatgggtttgggggagtaacttgcctgggtcggggtgtacccacccttcaaactttgtggagcaggcccgggggtcttgggaaacacgaaggcattcctatccagccccagtcattcggatcccccaggcctagcggctgcacacttgtgagatggcggagggactgcagacccaggtgcgggaggccagtgctagcgaagagaggtgggcaagggaggcccctccagcgtcctgctggggttgagttggggtgactcgtcccgtggccgctgggtcgtctggtttcccctttccgaaagaaatgagaggagaggcaagtggagtagctgaactttgattaaaccgtagagaagacagtgggaggagggaaaaaaaaaagatcggagaaggaggaggaggtggccgagagatcgaggaaaggaagtcctagaagctccggggaatttggaaatctctccaaggggctgaaagctggaagttgtatgaaggtgttcttttctcacaccccagctactccgccccagtcgaagaggctaattccgggcctcttataaaaataagaaagaaaaggtaaagaaaaagaaaatctaattatgtggcatgtttcagccaggtgttcctggttccaatgactcagaccctattggagccccgaggatctggataattgggcctgcctagacagagatgaaggatgccatttctaaaaggaggaaggggagaggaaagtccatctcttggggtcttgtagaaaatgccaaagaccaaccaagctaaattattgtgtccctgtagatctatttgcctatttacgtacagcaggctgtgggggtggggggtgagggaaggccgggaataaacgaccaggatggagcgggctggcaggagagaaaatgcgccccccactctttgcgggaacagccaacgggcctcctcagctcgcagctcaagcggccgcgcggcgggcctgtccggggccgggggccggggccggcctgggggaggggaggcgggggcgggaggggaggcggaggcgggccctccccgggcgctgtgaactttagctgggccgccgcctgtcagcgccagaaagcgttaaaggtgcagcagcccgcgccagcctccgcagccgcctttgtacgagtgatttatgacttcagtcttggttcaccaagagttcacacggctttcgctgctgttgaaggttaaaagatggtcttcgcttgacaagttggactattgaaaattccttcttcttcttcttttttttttattttagaagcgaagagcagaggctcaggagagaaaaacattggggagggggcgggggacaggggttgcaggtgggccaaaatggtaagtcaggaaggtttgtcttcctatatttaggattttttgttgttaggatttgcgtgcgtgttggggagagggtagagaataagagggagctaggcaagagatgtaaagatctctcatatttagaggccaaaggagtgaaaaaaaaacttgcttccacagttaattatctgggtaacttgggtcacaccccctaactgatcctcctctagagaccggaaatgggccaggtaagggagagagtttgggtaaagggtaaggtttgtgtgcttctcactgggtgtacttgatcatccaccttacctgggtaactactttttttttttttttttttttttttttggaaatggggtccagctctgtttcccaggctggagtgttgtggcaccatcatagttcactgaagcctcaaactcctgggctcaagtagtcctcccaccttagcctcttaagtatgtgagactgcaggcatgtgccacaccgccaggctgggtagctgcctttcaatgtgcttctgcacccacagatttggaaaagggcatttttaggcagcagtctttcaactctcttcatcctgtaggtttagcctgccatttacatttgatgcacatgaagaggctaatgggaaggaaatctatagaactggaattggaagtcctttcaaatcccaaattcccttggtctaagagccagtctctcttctttctagcattttgacaatggtcgtgccacagcagaggtggtggtcaaagatctcccaaagaccaggatctaaggcccctttgtgatctaaggctctgagtacttggagagacaaaactcactccttctttgtagattcagagagacagagagagagagagagagagagagagagagagagagggaatgaggagataccttgaagctgagggtctgcttggcttttcgaggttttttttttaagatatgtttttaaaaaattttctggagtgggaattgggattgtgtgcactgggaaggggaacagcagagagctgggtctggagttgggtgtgcctccctagccctattaaggccccatctccattaccaatgctaggtaaatgtcttcttaagagatagagccagcccctcaaatccagatctgggaaccaaaggcatccacgctagaaggggcactccctgcttctctttctacatagcattagagaggtattttcccaccatgtgaggacttagataagagaaggagaagagccagaaagatgtccacatctcgccgggacacctagcaccaggccctcctacaggggacctcatatgtaaatagcagaatggggagcaggacccatttaccgggcagtgatactcttctattagctctagagggtctcaactttcgctgcacattggaacccccagcgagtttttttgtttgctcatttttgtttttgagatggtgtcttgctcttgtcacccaggatagagtgcggtggcacatctcggctcactacaacctctgcctcctgggttcaagcaattatccctgcctcagcctcccgagtagctgggattacaggtgcttgccaccatgccc

SEQ ID NO: 1883657 - DNA, 4001 bp, Homo sapiens
cctcattcatctctgctgcttggcctgagcctgcacatttggcctccttcttaaaacaggggctcctagagagtcccaaaatccattaaccattcccatatgtgggatcccttccctgatcacacaaagcagaagcctgagaaaaaaagcaataaagagtggcctcctggctctccttctcctcttccatcccttgtctgggaaaggggttcccaaccccagccccaccaagagcatattaagaagctttcttcctcccttcctttcctatctccccctcagatgctgtgatcctgactccttctgtctccacctcaaaatatttcctcttgcattttattgttattctgttatgcagtgactgttaactactgttttattattattattcattatttattgttattaagattgtcgttagagatttgttcaccaccgttcaagggacagcagcctggcccagggggaagcctgcctctccctgtctgtctctctctctcacacacacacacacacacacatacacacacacacaccctaacacagtgcacactcacgcatatatgctcacaaatgcctgctgtgttcaggcccctgcacagcaatccgaagaggcaggcatcctaccccagcacgcaaacaacacactgcccacgcacaccagcattcaggcagaacaccacccccagaccaacgccaaaacccacacgcaccgagcttgcaaggaaaggaaaatacataaagaatcccttctctccaaaacctggaggggcgagtcaggcctctgtctcttccccccagtcgctttcgctttctcttttttttttctccttgtttacagcttcagagagctcaaggcccataaatcttgaggggtctacagagcgcagagcacatttgtatgcatcgttgggactcactaatacattactaagcccattaaggagagtgtatgcgcatggtttccggtgtgtattaacttatagttaaattctggaggaaagggcattgtgaattaacatataccaaatccatcatgggcttttgtcatatcagattagtcagtcatgggtttgggggagtaacttgcctgggtcggggtgtacccacccttcaaactttgtggagcaggcccgggggtcttgggaaacacgaaggcattcctatccagccccagtcattcggatcccccaggcctagcggctgcacacttgtgagatggcggagggactgcagacccaggtgcgggaggccagtgctagcgaagagaggtgggcaagggaggcccctccagcgtcctgctggggttgagttggggtgactcgtcccgtggccgctgggtcgtctggtttcccctttccgaaagaaatgagaggagaggcaagtggagtagctgaactttgattaaaccgtagagaagacagtgggaggagggaaaaaaaaaagatcggagaaggaggaggaggtggccgagagatcgaggaaaggaagtcctagaggctccggggaatttggaaatctctccaaggggctgaaagctggaagttgtatgaaggtgttcctttctcacaccccagctactccgccccagtcgaagaggctaattccgggcctcttataaaaataagaaagaaaaggtaaagaaaaagaaaatctaattatgtggcatgtttcagccaggtgttcctggttccaatgactcagaccctattggagccccgaggatctggataattgggcctgcctagacagagatgaaggatgccatttctaaaaggaggaaggggagaggaaagtccatctcttggggtcttgtagaaaatgccaaagaccaaccaagctaaattattgtgtccctgtagatctatttgcctatttacgtacagcaggctgtgggggtggggggtgagggaaggccgggaataaacgaccaggatggagcgggctggcaggagagaaaatgcgccccccactctttgcgggaacagccaacgggcctcctcagctcgcagctcaagcggccgcgcggcgggccagtccggggccgggggccggggccggcctgggggaggggaggcgggggcgggaggggaggcggaggcgggccctccccgggcgctgtgaactttagctgggccgccgcctgtcagcgccagaaagcgttaaaggtgcagcagcccgcgccagcctccgcagccgcctttgtacgagtgatttatgacttcagtcttggttcaccaagagttcacacggctttcgctgctgttgaaggttaaaagatggtcttcgcttgacaagttggactattgaaaattccttcttcttcttctttttttattttagaagcgaagagcagaggctcaggagagaaaaacattggggagggggcgggggacaggggttgcaggtgggccaaaatggtaagtcaggaaggtttgtcttcctatatttaggattttttgttgttaggatttgcgtgcgtgttggggagagggtagagaataagagggagctaggcaagagatgtaaagatctctcatatttagaggccaaaggagtgaaaaaaaaacttgcttccacagttaattatctgggtaacttgggtcacaccccctaactgatcctcctctagagaccggaaatgggccaggtaagggagagagtttgggtaaagggtaaggtttgtgtgcttctcactgggtgtacttgatcatccaccttacctgggtaactactttttttttttttttttttttttttttggaaatggggtccagctctgtttcccaggctggagtgttgtggcaccatcatagttcactgaagcctcaaactcctgggctcaagtagtcctcccaccttagcctcttaagtatgtgagactgcaggcatgtgccacaccgccaggctgggtagctgcctttcaatgtgcttctgcacccacagatttggaaaagggcatttttaggcagcagtctttcaactctcttcatcctgtaggtttagcctgccatttacatttgatgcacatgaagaggctaatgggaaggaaatctatagaactggaattggaagtcctttcaaatcccaaattcccttggtctaagagccagtctctcttctttctagcattttgacaatggtcgtgccacagcagaggtggtggtcaaagatctcccaaagaccaggatctaaggcccctttgtgatctaaggctctgagtacttggagagacaaaactcactccttctttgtagattcagagagacagagagagagagagagagagagggaatgaggagataccttgaagctgagggtctgcttggcttttcgaggttttttttttaagatatgtttttaaaaaattttctggagtgggaattgggattgtgtgcactgggaaggggaacagcagagagctgggtctggagttgggtgtgcctccctagccctattaaggccccatctccattaccaatgctaggtaaatgtcttcttaagagatagagccagcccctcaaatccagatctgggaaccaaaggcatccacgctagaaggggcactccctgcttctctttctacatagcattagagaggtattttcccaccatgtgaggacttagataagagaaggagaagagccagaaagatgtccacatctcgccgggacacctagcaccaggccctcctacaggggacctcatatgtaaatagcagaatggggagcaggacccatttaccgggcagtgatactcttctattagctctagagggtctcaactttcgctgcacattggaacccccagcgagtttttttgtttgctcatttttgtttttgagatggtgtcttgctcttgtcacccaggatagagtgcggtggcacatctcggctcactacaacctctgcctcctgggttcaagcaattatccctgcctcagcctcccgagtagctgggattacaggtgcttgccaccatgcccagctaatttttgtatt

SEQ ID NO: 1883658 - DNA, 4001 bp, Homo sapiens
atatggctgcctgaacaaatacagcttgacattcactttcttgctactgattgaagtgtattaacttgtgtaatcacacaactaccctatggggtaggtgcccttatttctccatttggcagagagggactaagtatcttaaccaaggtcacacggctttcaagtgccagagccaggactcagatctacataggtctggctccagagcccccaatctaacctcttaacctctctgctttactgggctaaaccttcaccacctatcatatggaaaaagaaattcaatagaaagttatatggaaaaaatacaaccctgtgttaatattagaaaatccatagtaacatgtagaatgaggaagcttcctcaagcccaactatacaggtcagatcggttgaaaaaataaaactaacaaatttttacatgtcaaaatatgcaatatttgaaaatccaaggctaatatctttaaataggcaaagatttattaatactccttgacacacaaacaggaagtgagaaaatgggcaactgacacaaatcgataattaactgtgaggacataggtggtggagtctctcctaatcctctattcttggagatctggatgcctgccattcgcgtatgggaagaacagagacagtcatggaaaacagcatttgatctagaaaggaccataatgaggtcaaagggcggtctcagggcagtcttaagagctccccatccccaaagaactggcaaggactctccaggtgctcgtatgcgactgctgcccaactcccatcacgaactcaggagacctgtcattttctgaaattttcatgacttctaagacactagttattggggaaaatttcaaattatttaaataatgagaggcgaataacattgctaaactcatgaatactctgtatttaaaacctccactggcgatcagggcacatagaatctctactactgatccctgacgctggccatcccccaacccgtcggcccacggaccccagccctgaccccacctcctcccagcatcttacacaaggattctcaccacactccccagagactcgcctgcccagggcccctctctaaccccatatagctcaggtctctgatccagagactgcatcaccgacctctcctactacctatttccagattagagtccctgatcccagaggcattgtctaaaataactagctcttacaactacgtccacttcaggaaccgccctgtgatgtcagaactttgaggccgcccggccagggctgcacatgctcagtgaggtcggcgcccgccagtaacaaacatggctccctgaagccgctcaggctcaagagcaacatggaggtctgcacttaatcgctcctctccgggggcggccatactgaggaggcatctcttccgtgcaggcaggctctcctggggacctcagagattctctccagcggcagcagaaaacgggcaatgggtggattcgggtccagattctggcaggagggagtttgggatcgagatctggaaaaaagcactagactggaagaggacgcgatggagtcggagccgctggcgggtacaaaaaccagaggccggggaaggcgccggtgggaggcaaggcacggatggactttacctgcgcacgcgtcgcagccatctccgcgcacagtggtggccaccgcgactggtgctgaagtgtcggcgtgtgccgggcgctccgctgggacccgggttgctcgccctgagtctcagctttctcatctgtacggttgggacaagtacagtaaccctcgcccgtcaagacgggccagggctgtggcgagggtccacgccttagagcaggcacctatcttgtgcagggccctgagatggggtctgactcagttcctgcggggaacttcaccagtgacccagtcagtgcccttcagttaaagaccaccaggagcacacttgtaagtaaatataattacattgcagcaaggaatggggtactatgggtcatctcagtgggaggagttagagagaaactattatacgatttggactttaattggttgatttcggacaggatctcagaaagtgaagactttagattggatgctgtcagaaagcaggagcaatatgattattaagtattttgtgggtggcatcaagaccttgttttttatctgcacttagacaacattataaagtgcccttgtttttgtttgcacttatcacggtctcagattaaccttctgaagttgatattctgtgagattgtttatgtccaacaggaaaacaaaatgtcctggccatgaacatcagaccagcgtgtaatcacattaaggcctgtgaccaaaatattgacagaattgaagttagaaatagttctacagtaacagagtcttcaatactccatttaaaataatgcatagaagctggacatggtggctcatgcctttaatctcagctacctggaaggctgcggcaggtggattgcttgaggtcaggcgttcgagaccagcctgggccttttggcctgtctcggcttttaacataccttcctcactcagcttaatcatttctcactttagatttataataagagatgtgtgactcttactttcacttgaacacatagaggcctttatagagttattaattggcctaatttcaatattgctgtgtctcagaaaacagacctgaggagagggtgagatggaggaagggcagatcgatggaaccattcgaatacacatatgtatcaattaagctcattgtcttttggagcatggcttgtgatgccccaaaacaatgacaatagtaatatcaatgatcactgataacagatcaccataacagatataataataacaaaacatttgaaatattgcaagaattacaaagatgtaacacagaggtgcaaaataagcacatgctaccagaaaagtggcactggtagacttgcttggtgcagggttgccacaaaccttcaacctgtacaaactgcaatatccgagaagcataataaagtgaagtgcaataaaacaagttaagcttgtatatgtatgcatgcacacaccagtacacatccacctatccacacacaaatctttgtactaacaaagcctgtattttcaattccaacaatacatcatttgtaccttaaaaatctctgtcatccttgtagtgtccttttctgtctttgttatcagggtaatgctggcctcataaaaaatgtttggaagtgttccctcctcttcaacttttggaagagtttgtgaagaaatcgtattaattcttcttcaaacatttggtagaattctccactaagctatctggtcttggattttcctttttcaggagctttttgactactgactcaatatttttaatcattatttatctgtttttattttctatttcttcatgtttcagtctagtggatgtatgtttctagaaatttctctattctaagttaaacaatttgttgacacatagttgtttagagtagactattattatcctttgtatttctatggtaccaattttaatatctccttttttgttctaattttatttacttgagatttcttttttcttggcctagtgagaggttggtcaatttttattatcttttcaaaaaatcaactcttcgtttcattcatcttttctattgtttttctagtctatttcatttatttctgctatgatctttgttatttccttctaattttgggcttgattatttttttctattttttgaggtttatttgggatcttttttctttatttagcacttatctgtataaacttccctctcttagaacggcttttgcttcatctcatcagttttagtatgtcgtgctttcattttagtttgtctcaagatattttatttcttttttgatgttttctttgatctactggttattcaggagtgtgttggttgatttccacatatttgtcacttttctaagttttctcctgtttttaatttcagtttcatgccactgtagtcaaaaag

SEQ ID NO: 1883659 - DNA, 4001 bp, Homo sapiens
tatggctgcctgaacaaatacagcttgacattcactttcttgctactgattgaagtgtattaacttgtgtaatcacacaactaccctatggggtaggtgcccttatttctccatttggcagagagggactaagtatcttaaccaaggtcacacggctttcaagtgccagagccaggactcagatctacataggtctggctccagagcccccaatctaacctcttaacctctctgctttactgggctaaaccttcaccacctatcatatggaaaaagaaattcaatagaaagttatatggaaaaaatacaaccctgtgttaatattagaaaatccatagtaacatgtagaatgaggaagcttcctcaagcccaactatacaggtcagatcggttgaaaaaataaaactaacaaatttttacatgtcaaaatatgcaatatttgaaaatccaaggctaatatctttaaataggcaaagatttattaatactccttgacacacaaacaggaagtgagaaaatgggcaactgacacaaatcgataattaactgtgaggacataggtggtggagtctctcctaatcctctattcttggagatctggatgcctgccattcgcgtatgggaagaacagagacagtcatggaaaacagcatttgatctagaaaggaccataatgaggtcaaagggcggtctcagggcagtcttaagagctccccatccccaaagaactggcaaggactctccaggtgctcgtatgcgactgctgcccaactcccatcacgaactcaggagacctgtcattttctgaaattttcatgacttctaagacactagttattggggaaaatttcaaattatttaaataatgagaggcgaataacattgctaaactcatgaatactctgtatttaaaacctccactggcgatcagggcacatagaatctctactactgatccctgacgctggccatcccccaacccgtcggcccacggaccccagccctgaccccacctcctcccagcatcttacacaaggattctcaccacactccccagagactcgcctgcccagggcccctctctaaccccatatagctcaggtctctgatccagagactgcatcaccgacctctcctactacctatttccagattagagtccctgatcccagaggcattgtctaaaataactagctcttacaactacgtccacttcaggaaccgccctgtgatgtcagaactttgaggccgcccggccagggctgcacatgctcagtgaggtcggcgcccgccagtaacaaacatggctccctgaagccgctcaggctcaagagcaacatggaggtctgcacttaatcgctcctctccgggggcggccatactgaggaggcatctcttccgtgcaggcaggctctcctggggacctcagagattctctccagcggcagcagaaaacgggcaatgggtggattcgggtccagattctggcaggagggagtttgggatcgagatctggaaaaaagcactagactggaagaggacgcgatggagtcggagccgctggcgggtacaaaaaccagaggccggggaaggcgccggtgggaggcaaggcacggatggactttacctgcgcacgcgtcgcagccatctccgcgcacagtggtggccaccgcgactggtgctgaagtgtcggcgtgtgccgggcgctccgctgggacccgggttgctcgccctgagtctcagctttctcatctgtacggttgggacaagtacagtaaccctcgcccgtcaagacgggccagggctgtggcgagggtccacgccttagagcaggcacctatcttgtgcagggccctgagatggggtctgactcagttcctgcggggaacttcaccagtgacccagtcagtgcccttcagttaaagaccaccaggagcacacttgtaagtaaatataattacattgcagcaaggaatggggtactatgggtcatctcagtgggaggagttagagagaaactattatacgatttggactttaattggttgatttcggacaggatctcagaaagtgaagactttagattggatgctgtcagaaagcaggagcaatatgattattaagtattttgtgggtggcatcaagaccttgttttttatctgcacttagacaacattataaagtgcccttgtttttgtttgcacttatcacggtctcagattaaccttctgaagttgatattctgtgagattgtttatgtccaacaggaaaacaaaatgtcctggccatgaacatcagaccagcgtgtaatcacattaaggcctgtgaccaaaatattgacagaattgaagttagaaatagttctacagtaacagagtcttcaatactccatttaaaataatgcatagaagctggacatggtggctcatgcctttaatctcagctacctggaaggctgcggcaggtggattgcttgaggtcaggcgttcgagaccagcctgggccttttggcctgtctcggcttttaacataccttcctcactcagcttaatcatttctcactttagatttataataagagatgtgtgactcttactttcacttgaacacatagaggcctttatagagttattaattggcctaatttcaatattgctgtgtctcagaaaacagacctgaggagagggtgagatggaggaagggcagatcgatggaaccattcgaatacacatatgtatcaattaagctcattgtcttttggagcatggcttgtgatgccccaaaacaatgacaatagtaatatcaatgatcactgataacagatcaccataacagatataataataacaaaacatttgaaatattgcaagaattacaaagatgtaacacagaggtgcaaaataagcacatgctaccagaaaagtggcactggtagacttgcttggtgcagggttgccacaaaccttcaacctgtacaaactgcaatatccgagaagcataataaagtgaagtgcaataaaacaagttaagcttgtatatgtatgcatgcacacaccagtacacatccacctatccacacacaaatctttgtactaacaaagcctgtattttcaattccaacaatacatcatttgtaccttaaaaatctctgtcatccttgtagtgtccttttctgtctttgttatcagggtaatgctggcctcataaaaaatgtttggaagtgttccctcctcttcaacttttggaagagtttgtgaagaaatcgtattaattcttcttcaaacatttggtagaattctccactaagctatctggtcttggattttcctttttcaggagctttttgactactgactcaatatttttaatcattatttatctgtttttattttctatttcttcatgtttcagtctagtggatgtatgtttctagaaatttctctattctaagttaaacaatttgttgacacatagttgtttagagtagactattattatcctttgtatttctatggtaccaattttaatatctccttttttgttctaattttatttacttgagatttcttttttcttggcctagtgagaggttggtcaatttttattatcttttcaaaaaatcaactcttcgtttcattcatcttttctattgtttttctagtctatttcatttatttctgctatgatctttgttatttccttctaattttgggcttgattatttttttctattttttgaggtttatttgggatcttttttctttatttagcacttatctgtataaacttccctctcttagaacggcttttgcttcatctcatcagttttagtatgtcgtgctttcattttagtttgtctcaagatattttatttcttttttgatgttttctttgatctactggttattcaggagtgtgttggttgatttccacatatttgtcacttttctaagttttctcctgtttttaatttcagtttcatgccactgtagtcaaaaaga

SEQ ID NO: 1883660 - DNA, 4001 bp, Homo sapiens
agaaaaagaagatacttcaatacctcagtttactaatgaggtggggctaccatatggctgcctgaacaaatacagcttgacattcactttcttgctagtgattgaagtgtattaacttgtgtactcacacaactaccctacggggtaggtgcccttatttctccatttggcagagaggggctaagtatcttaaccaaggtcacacggctttcaagtgccagagccaggactcagatctacataggtctggctccagagcccccagtctaacctcttaacctctctgctttactgggctaaaccttcaccacctatcatatggaaaaagaaattcaatagaaatttatatggaaaaaatacaactctgtgttaatattaaaaaatccatagtaacatgtacaatgaggaagcttcctcaagcccaactatacaggtcagatcggttgaaaaaataaaactaacacatttttacatgtcaaaatatgcaatatttgaaaatccaaggctagtatctttaaataggcaaagatttattaatactccttgacacacaaacaggaagtgagaaaatgggcaagtgacacaaatcgataattaactgtgaggacataggtggtggagtctctcctaatcctctattcttggagatctggatgcctgccattcgcgtatgggaagaacagagacggtcatggaaaacagcatttaatctagaaaggaccacaatgaggtcaaagggcggtctcagggcagtcttaagagctccccatccccaaagaactggcaaggactctccaggtgctcgtatgcgactgctgcccaactcccatcacgaactcagaagacctgtcattttctgaaattttcatgacttctaagacactagttactgggggaaaacttcaaattatttaaattatgagaggcgaataacattgctaaactcatgaatactctgtatttaaaacctctactggcgatcagggcacatagaatctctactactgatccctgacgctggccatcccccaacccatcggcccacggaccccagccctgaccccacctcctcccagcatcttacacaaggattctcaccacactccccagagactcgcctgcccagggcccctctctaaccccatatagctcaggtctctgaccccgagacagcatcaccgacctctcccactacctatttccagattagagtccctgatcccagaggcattgtctaaaataactagctcttacaactacgtccacttcaggaaccgccctgtgatgtcagaactttgaggccgcccggccagggctgcacatgctcagtgaggccggcgcccgccagtaacaaacatggctccctgaagccactcaggctcaagagcaacatggaggtctgcacttaatcgctcctctccgggggcggccatactgaggaggcatctcttccgtgcaggcaggctgtcctggggacctcagagattctctccagcggcagcggaaaatgggcaatgggtggattcgggtccagattctggcaggagggagtttgggatcgagatctggaaaaaagcactagactggaagaggacgcgatggagtcggagccgctggcggggacaaaaccagaggcggtggaaggcgccggtgggaggcaaggcacggatggactttacctgcgcacgcgtcgcagccatctccgcgcacagtggtggccaccgcgactggtgctgaagtgtcggcgcgtgccgggcgctccgctgggaccggggttgctggccctgagtctgagctttctcatctgtacggttgggacaagtacagtaaccctcgcccgtcaagacgggccagggctgtcgcgagggtccacgccttagagcaggcacctatcttctgcagggccctgagatggggtctgactcagttcctgcggggaacttcaccagtacccagtcagtgcccttcagttaaagaccaccaggagcacacttgtaattacattgcagcaaggaatggggtactatgggtcatctcagtgggaggagttagagagaaactgttatacgatttgggctttaattggttgatttcggacaggatctcagaaagtgaagactttagattggatgctgtcagaaagcaggagcaatatgattattaagtattttctgggtggcatcaagaccttgttttttatctgcacttagacaacattataaagtgcccttgtttttgtttgcacttatcacggtctcagattaaccttctgaagttgatattctgtgagattgtttatgtccaacaggaaaacaaaatgtcctggccatgagcatcagactagcgtgtaataacattaaggcctgtgacccaaatattgacagaattgaagttagaaatagttctacagtaatagagtcttcaatactccatttaaaataatgcatagaagctggacatggtggctcatgcctttaatctcagctacctgggaggctgcggcaggtggattgcttgaggtcaggcgttcgagaccagcctgggccttttggcctgtctcggcttttaacataccttcctcactcagcttaatcatttctcactttagatttataataagagatgtgtgactcttactttcacttgaacacagaggcctttatagagttattaattggcctaatttcaatattgctgtgtctcagaaaacagacctgaggagagggggagatggaggaagggcagatcgatggaaccattcgaatacacataggtatcaattaagctcattgtcttttggaccatggcttgtgatgccccaaaacaatgacaatagtaatatcaatgatcactgataacagatcaccataacagatataataataacaaaacatttgaaatactacaagaattacaaagatgtaacacagaggtgcaaaataagcacatgctaccagaaaagtggcactggtagacttgcttggtgcacggttgctacaaaccttcaacctgtaaaaactgcaatatctgagaagcataataaagtgaagtgcaataaaacaaggtaagcttgtatatgtatgcatgcacacaccaatacacatccatctatccacacacaaatatttgtactaacaaagcctgtattttcaattccagcaatacatcatttgtaccttaaaaatatctgtcatccttgtagtgtccttttctgtctttgttatcagggtaatgctggcctcataaaaaatgtttggaagtgttccctcctcttcaacttttggaagtgtttgtgaagaaatggtattaattcttcttcaaacttttggtagaattctccactaagctatctggtcttggattttcctttttcaggagctttttgactactgactcaatatttttactcattatttatctgtttttattttatatttcttcatgtttcagtcttagtggatgtatgtttctagaaatttctctattctaagttaaacaatttgttgacacatagttgtttagactattattatcctttgtatttctatggtaccaattttaatatctccttttttgttctaattttatttacttgagatttcttttttcttagcctagtaataggttggtcaatttttattatcttttcaaaaaatcagctcttcatttcattgatcttttctattgtttttctagtctatttcatttatttctgctatgatctttgttatttccttcttctaattttgggcttgatttttttttctattttttgaggtttatttgagatcttttttctttatttagcacttatctgtataaacttccctctcttagaatggcttttgcttcatctcataagttttagtatgtcgtgctttcattttagtttgtctcaagttattttatttcttttttgatgttttctttgatctactggttattgaggagtgtgttggttgatttccacatatttgtcacttttctaagttttctcctgt

SEQ ID NO: 1883661 - DNA, 4001 bp, Homo sapiens
aagaaaaagaagatacttcaatacctcagtttactaatgaggtggggctaccatatggctgcctgaacaaatacagcttgacattcactttcttgctagtgattgaagtgtattaacttgtgtactcacacaactaccctacggggtaggtgcccttatttctccatttggcagagaggggctaagtatcttaaccaaggtcacacggctttcaagtgccagagccaggactcagatctacataggtctggctccagagcccccagtctaacctcttaacctctctgctttactgggctaaaccttcaccacctatcatatggaaaaagaaattcaatagaaagttatatggaaaaaatacaaccctgtgttaatattagaaaatccatagtaacatgtacaatgaggaagcttcctcaagcccaactatacaggtcagatcggttgaaaaaataaaactaacacatttttacatgtcaaaatatgcaatatttgaaaatccaaggctagtatctttaaataggcaaagatttattaatactccttgacacacaaacaggaagtgagaaaatgggcaagtgacacaaatcgataattaactgtgaggacataggtggtggagtctctcctaatcctctattcttggagatctggatgcctgccattcgcgtatgggaagaacagagacggtcatggaaaacagcatttaatctagaaaggaccataatgaggtcaaagggcggtctcagggcagtcttaagagctccccatccccaaagaactggcaaggactctccaggtgctcgtatgcgactgctgcccaactcccatcacgaactcagaagacctgtcattttctgaaattttcatgacttctaagacactagttactgggggaaaacttcaaattatttaaattatgagaggcgaataacattgctaaactcatgaatactctgtatttaaaacctctactggcgatcagggcacatagaatctctactactgatccctgacgctggccatcccccaacccgtcggcccacggaccccagccctgaccccacctcctcccagcatcttacacaaggattctcaccacactccccagagactcgcctgcccagggcccctctctaaccccatatagctcaggtctctgaccccgagacagcatcaccgacctctcccactacctatttccagattagagtccctgatcccagaggcattgtctaaaataactagctcttacaactacgtccacttcaggaaccgccctgtgatgtcagaactttgaggccgcccggccagggctgcacatgctcagtgaggccggcgcccgccagtaacaaacatggctccctgaagccgctcaggctcaagagcaacatgggggtctgcacttaatcgctcctctccgggggcggccatactgaggaggcatctcttccgtgcaggcaggctgtcctggggacctcagagattctctccagcggcagcggaaaatgggcaatgggtggattcgggtccagattctggcaggagggagtttgggatcgagatctggaaaaaagcactagactggaagaggacgcgatggagtcggagccgctggcggggacaaaaccagaggcggtggaaggcgccggtgggaggcaaggcacggatggactttacctgcgcacgcgtcgcagccatctccgcgcacagtggtggccaccgcgactggtgctgaagtgtcggcgcgtgccgggcgctccgctgggaccggggttgctggccctgagtctgagctttctcatctgtacgattgggacaagtacagtaaccctcgcccgtcaagacgggccagggctgtcgcgagggtccacgccttagagcaggcacctatcttctgcagggccctgagatggggtctgactcagttcctgcggggaacttcaccagtacccagtcagtgcccttcagttaaagaccaccaggagcacacttgtaattacattgcagcaaggaatggggtactatgggtcatctcagtgggaggagttagagagaaactattatacgatttgggctttaattggttgatttcggacaggatctcagaaagtgaagactttagattggatgctgtcagaaagcaggagcaatatgattattaagtattttgtgggtggcatcaagaccttgttttttatctgcacttagacaacattataaagtgcccttgtttttgtttgcacttatcacggtctcagattaaccttctgaagttgatattctgtgagattgtttatgtccaacaggaaaacaaaatgtcctggccatgagcatcagactagcgtgtaataacattaaggcctgtgacccaaatattgacagaattgaagttagaaatagttctacagtaatagagtcttcaatactccatttaaaataatgcatagaagctggacatggtggctcatgcctttaatctcagctacctgggaggctgcggcaggtggattgcttgaggtcaggcgttcgagaccagcctgggccttttggcctgtctcggcttttaacataccttcctcactcagcttaatcatttctcactttagatttataataagagatgtgtgactcttactttcacttgaacacagaggcctttatagagttattaattggcctaatttcaatattgctgtgtctcagaaaacagacctgaggagagggggagatggaggaagggcagatcgatggaaccattcgaatacacataggtatcaattaagctcattgtcttttggaccatggcttgtgatgccccaaaacaatgacaatagtaatatcaatgatcactgataacagatcaccataacagatataataataacaaaacatttgaaatactacaagaattacaaagatgtaacacagaggtgcaaaataagcacatgctaccagaaaagtggcactggtagacttgcttggtgcacggttgctacaaaccttcaacctgtaaaaactgcaatatctgagaagcataataaagtgaagtgcaataaaacaaggtaagcttgtatatgtatgcatgcacacaccaatacacatccatctatccacacacaaatctttgtactaacaaagcctgtattttcaattccagcaatacatcatttgtaccttaaaaatatctgtcatccttgtagtgttcttttctgtctttgttatcagggtaatgctggcctcataaaaaatgtttggaagtgttccctcctcttcaacttttggaagtgtttgtgaagaaatggtattaattcttcttcaaacatttggtagaattctccactaagctatcttgtcttggattttcctttttcaggagctttttgactactgactcaatatttttactcattatttatctgtttttattttatatttcttcatgtttcagtcttagtggatgtatgtttctagaaatttctctattctaagttaaacaatttgttgacacatagttgtttagactattattatcctttgtatttctatggtaccaattttaatatctccttttttgttctaattttatttacttgagatttcttttttcttagcctagtgataggttggtcaatttttattatcttttcaaaaaatcagctcttcatttcattgatcttttctattgtttttctagtctatttcatttatttctgctatgatctttgttatttccttcttctaattttgggcttgatttttttttctattttttgaggtttatttgagatcttttttctttatttagcacttatctgtataaacttccctctcttagaatggcttttgcttcatctcataagttttagtatgtcgtgctttcattttagtttgtctcaagttattttatttcttttttgatgttttctttgatctactggttattgaggagtgtgttggttgatttccacatatttgtcacttttctaagttttctcctg

SEQ ID NO: 1883662 - DNA, 4001 bp, Homo sapiens
cacagcagtgattgcaggcatttcgtaatggtcactgggtcatctctctaagcctgccaccgtttggaagtgagtaatattatacagttccagttacaaagccaccgcacttgactaaatcctcatgtggcagagagaagccctctgccagggggagaagcccagtcccgtgatcaaatccctactgggctgatcagctattggcaagttcctgggcatgctggctggggtgctgggggtgtcctccaggacaagttctcaacttcagcggcacatcggagtcacggagagcttccaaaaaccctcctgttggggtccttcctttatggagtcccctctgatgggcatgggtggagcctggctcagggattttgaaatgtgacgcctatgttgagcccaaatcgggaaccctggcagcaggggtcattggtatttgaggacacaaagtaagaaggcagcctgtcttttcttttcccagaggtggaaggtggtgggaaggagcaggaggggcatgtgcggtgcccctggaggccacctgcctgggcttgcttggggccagcagccttggaggctgtgtggaggccgctgccgcacatctggccctcagcactgcacagactgtggaaaccctgtaagataagctcccaggaatgaaaagaaggcggtctaaactttctgggtcccagagccaaagcaggaggtcccaaaaccgcagggtgggggcgggatcatttgcggacaccaaaagccaaaggccaagaggactctgttttagcagattaatttataagaaaaatatcagaagcaaaggcacacatgggaatattgttattggaaagaacattttgcaaaggaatttttataaatggaaactgcttcaagttcaagccatatttaaaaacacaaccacatgggtggcaggaaggagggcaccggctgtgttcaaatattttcctaaagggacacccagcccccctcagctgtccccaaagggggcatgggggtctgtgggtcctgcttactttgggagccctggacttggccctcggaggccttggtggcccggtgaggatagtaaaacatgggaggtgttctgggagcgccttctccagagataaaggctgttcttcaccaagatgattccaggaaagttcattttggaaatggagaagagaaatggagacaaagtatgtacgagtcgcacctgagtgcagagttaggtctatggcatttgcccaaagaatcactcaggaaatcttccttcccttcctttgacccacagcagaataaaggagattaattttgggtggacggttggtggcagaagttgagggaattttggaaaattgaagaaaataactatttgaatagaccagaagtgaaggtttcctgtggtgtgcagcccaaaatctagttcaggccatctcctgtgacatttttttaaattgctgtgtttgacacaaccttaggcctgagaaaactttactttcctagaaaagcacatttacatgtgaaacccggcatatgccccagcactcaattgcagggagtcggcccccattcctcatggcatctgcagagcagtggctggcatggggcagtccccccaagtgcatccgtgcataaaagaggtccgggaacacctcccctgtgaaagcccggggagcagttctgaggtagacaaaagacccttaatatacattttcccccaaattaatcatttcggttccaggaaacaagaaaagacttttctggacttctatatattgcatcatagcatatcaatgtaatcagtagaatcaactctgttcctcttattactaacaattaacacattgtgagcacacgctatggactcaagcattctttgagaagacttcattcgcatattattttaagtctgttttctattgcttgtagtagaatacctgaaactgggtaatttataaagaaaaggaatttacttcttacatttctggaggctgggaagtccaagtctagggggtgcatctggtgagggccctcttgctggcagggactctgcagggccccagggtggtgcaaggcatcccatgatgagggggctgagagcaccagctcaggtctctcttcctcttcttataaagccacccattccactccctaataacccatcagtccattaacccagtaatccattcatcattcatccacgaatgaattaacccattcatgagggcagagcgcttgtgacccaatcacctctcaatgctaccacactggggattcaattaaaaaggagttttggaggggacacatatcaaaactgtaacacatatatgaactatgaatgcattgttatcctccaaactgtataagaactcttatgcccatttcagagatgaggaaatggaggcacagaggatttagtaatgacactcagctaacgagtggtgaaatggagaccccagcacaggcagcctgcccctgggctttgtccctctagccactcccgcctgtccactctgaggttgttgagtggatgcccatggatttgcctgctcacaccttccctcgagatgccctgccacgctccaccaacatggctccatggcagctttgatagtatcgcctggccctgcccctgcccatagttcactgctctacagacaagccctgaactcattgttagtgaattctttccccaatatatttgaatttgaaactacacaggagacagggtctatttctcgccaatagttgtaaaatctggagctgttgggagctgtatttgtcaccacagggaggaatgcactccacagccagagagaaggaagccagggctccagagaaacaggaagcagaggcaaggagagtcctggggcatggagcctctgcttcctatagtgcccaaggctgctgccttcctgccactgggatccacgatcacagtaatgtttctccttttggctgaagctagtttgaatggggtttctgtcacttgcaacctagatagttgtaactagttagaggcagaaactccattctgagccccaaaccaaagatgtcagagtccttttttcctttttttttttcttcctacaaagaaggcctttgtccagagaggaatgtaggcctctcctgcaaggtcttccccataaagccaggagtggtcaggaggacttcacacctgtgttgctactccaaccacttccaaagatggctgcatcaatttagcccatgatctcgtgtgatgtgactgtgccacgacttccatcaggaggtggaatctgttttccttcctcttaaattagggcatgacatgtggcttgctttgaccaacagactgcatcagaggtggggttatgtgatctccaaggcttgaccgccaagtggacctttcagcccagctgaccctccagctgaatgcagccatgtgagcgagcccaggtgaaccagtggagaaaccaacattcagaatcaagagcgataatcgattgtcgtcattttaagtctctaggcgttgaggtggtttctctcatagcagtagagaagtgatacatccagcagtcactctggcctgggagaatgggcatgtcagttgcacaatgtgactctaactggctaaagccctgggtgtcatgagtgctggtgcagcaaagctcccttgctggaaggagggctctgggttttcgcacagtgagcccagagccacacggctctgcattcactcttccaggcccactagtgctcttgcttcgggtgaaacagatccaggtttaattactagtagtagccaaaaacacaggctatgtcatatttccaaatctggagttattgtatacagccagggtgtttagaattgtcacaggctttataccttttttcccagttacaccagttagtccaaggaaggcctttctaatactttgctgttcctccccctaggtattgctggggagtcacgggagttcagagctgcaaggcagtaagatacaatagagtaaaactcattttacaag

SEQ ID NO: 1883663 - DNA, 4001 bp, Homo sapiens
tttggacaactgaatcctatgccccttcccacccagggaacctggtgccagaaattcccaggacttacccaccatccaccacgccacatagcaagtgtcctcagtgtctgcagaccagaaacaactcccttgtgtctcagcactgggccacctgctgaaaccccaaactgcctgccccattgtttgagacccagtcaggccttggctccaaaagtcctcttggactgccactggcccccagggtctctcctgactgcacctcggtcccggagctcccacaccgctgggccccgagccccatgccccgatccagctgtggctcctttacgggggccttgctggcctttcctaagggaggtgttttcccgagggcaggtggactgctcctcagactaggggccctcggagggccaggcctgggcttctacctcctctcgcaggctggtgtttctctgcaaatatggctcgtgtgtcctccttcctctcagactgggggcccctgaggactgggcctgagtttccctctcccccttcagaatgggggttccctgaggactgacccagggcctccccccgtcccctccatctggctgttaatctccaacacttccacctccagtcctattctgcacagcgctccccagcgctgggagctcagaggcctcttcagccttccccagggctggggctcagggagggcttcctcaggcgctggccccagagtcaggctgcacattggcttggaggacaggcctttcctctgggactgtgaggcccagagtgcccacccagaactccacctctgacctcacaaaggcctgcttcagaactcagtctccactgcactgctggccagacgagggatgttattttgggcagtgcatctggacttggttcaagtggcaccagccaaatccctgccttactgacctctcccctggaggagcaggagcagcgctcaaggccgccttgggagggctgagaggcaggctctggactggggacacagggatagctgagccccagctgggggtggaagctgagccagagacagtcacagaggaacaagatcaagatgcgctttaactgagaagcccccaaggcagaggctgagaatcagaagacatttcagcagagtgagtggggctccaggcagggtggggatggggcagcctcctcagtgcccagatctggaagggtcattccctgggtaccatacagcgaggaggtgactgagggattgtttggggaaggagccccggctgggagtggaagtcccggctttcttgttatggtgcagtcctgtgttgctgtgtgacacaggcacatacaccttctctctgggcctcagtttccttacctgtaagttggttgttgggaggaccagcggtagagcagagatggcagggatgcactgggctgggctgtcagcagaccatgggggtgggacgaggagagagctgaagaccaccggcagtggaccacagggggaggcatgcaggccagacacgggtcagctgccggcttgctggagtcattcctcccacgcagtcccctcctgaggggctggagctggggctggagggtttcagcagtcagggctggagataagagtctgtgctggagctagagggaactgggctagagaatcaggaggacagacagggtgaggggacttcgggctaccttcatgctgtctgttagagataaagataggagtacaaaggggaatttttgggtgaggtacacgggtgaaatgagttttcagggcctcatcctgtgtgttcaccttctgcgtgtgtgtgtgtgtgtgtgtgtgtgcatgcgtgcatatatgtgtgtgtgcaggtcctggacagtcacagcttaagttagcagcaagagaacttgaggttaaaggtatagcacgcaaatatgaggctggagccactgagtagaggctgagggcatctccacagtccaaagctgggctgcagacagggaaggtcagcaggagcactggagggtctggcctggggttggggtcctggggccagcatgggtggggtggggctccagggcgtcgcctcattggctgagcaccgctcctccctccctgttccttggctgggttaagggagtggcactagcaggagctgccccagggcttctcccctggggacaaaggtctgatggaagtgtggggccaagttctgtgtcctccagccctagtgacctctctttggctcttcagcatctacaaatctgaaggacaaaacatggttcaagcatctgggcacaggcggtaagtaccccaccctcttctcaccctccagccccctgtcctccacccagcccacttcagtgccctccctgctccatcctcagcctctcccttggggcagctgtcccccctcgacctcctcctccccacccacccactcgcctctgaggtcccagaagaaaagcatcttccacctgttgcctgggctgggtcctggggtgaggggaggctcagaaatacttggatgagggtcaaggcatgcaggtggccttcaactcaactgcactcagcacctctcaccctctcaggctcagctgtctttggggtgaaaaagagccagtccttgcaatggccaaggccctgcctatgtagtccttgttagctttctggcctccccactccagccccctgctctccctcctccagccacactgagtttcttttctggttttctttttcttttttttttttttttttttttgagatggaatccagttctgttgcccaggctggagtgcaatggcaagatcttggttcactgcaacctccttctcccgggttcaagcgattctcttgcctcagcctcctgagtagctgggattacaggattacaggcacacactaccatgcccagctaattagttgttttttttttgtttttttttttttttttttttttttgtatttttagtagaaatggggtttcgccatgttcgccaggctgttcttgaactcctgacctcaggtgatccacccgcctcggcctcccaaaaggttgggattacaggtgtgagccactgcacctggcctcacactgactttctttgctttcttcaaacatgctgagagtcctctggtgactattccctccatctgagaggctttctgcagttaacatacagcccactctcatctccttcatggctttgctccaaggccaccttctcaacaaggattactctgactgccctatttgaaatcacaccccatctccagcccctgcactcccaattcccctctccttgctctgttttttcccataggagctggtaccttcgcttatacaaatgtacttacttattacatttcattgctgtcagctccacgcaagcagggatatttgcctgttgtacacttgcacggagagaatgaatagtgcccctctgttgacatcattgcctctagcctacgtctctttccagggctttagatcctgtttctagagacccactggtgtctcacaggcaactcagctcctagatggaaacagcctcctccgccccccacaagtccactcctcctgtgctcttggctcagtcaggggtccccttctcttcagttgctcaagccagaagtcaaggtcatgtccttgatacttccctcttccccatgcctcacatccagtcaccaatctcctaaaatatctagaatgtgcacagcttccaccattctttctaccaccaccctactcccccatggccatgtcaggccaccacccgcccattcttcaaaactcccttcaggcctcacctcccatgcctcccctgagttcccccagtcccaggctgcttctctctggtggtgttgccattacccatctcttctattaaacagagtgacccaagagtggagagtgggttttgactttgtatccctggtgcttgactcataagtaggtgctcaacaaaaattttttctttttttgagatggagtcttgttctgttgcccatgctggag

SEQ ID NO: 1883664 - DNA, 4001 bp, Homo sapiens
tggacaactgaatcctatgccccttcccacccagggaacctggtgccagaaattcccaggacttacccaccatccaccacgccacatagcaagtgtcctcagtgtctgcagaccagaaacaactcccttgtgtctcagcactgggccacctgctgaaaccccaaactgcctgccccattgtttgagacccagtcaggccttggctccaaaagtcctcttggactgccactggcccccagggtctctcctgactgcacctcggtcccggagctcccacaccgctgggccccgagccccatgccccgatccagctgtggctcctttacgggggccttgctggcctttcctaagggaggtgttttcccgagggcaggtggactgctcctcagactaggggccctcggagggccaggcctgggcttctacctcctctcgcaggctggtgtttctctgcaaatatggctcgtgtgtcctccttcctctcagactgggggcccctgaggactgggcctgagtttccctctcccccttcagaatgggggttccctgaggactgacccagggcctccccccgtcccctccatctggctgttaatctccaacacttccacctccagtcctattctgcacagcgctccccagcgctgggagctcagaggcctcttcagccttccccagggctggggctcagggagggcttcctcaggcgctggccccagagtcaggctgcacattggcttggaggacaggcctttcctctgggactgtgaggcccagagtgcccacccagaactccacctctgacctcacaaaggcctgcttcagaactcagtctccactgcactgctggccagacgagggaagttattttgggcagtgcatctggacttggttcaagtggcaccagccaaatccctgccttactgacctctcccctggaggagcaggagcagcgctcaaggccgccttgggagggctgagaggcaggctctggactggggacacagggatagctgagccccagctgggggtggaagctgagccagagacagtcacagaggaacaagatcaagatgcgctttaactgagaagcccccaaggcagaggctgagaatcagaagacatttcagcagagtgagtggggctccaggcagggtggggatggggcagcctcctcagtgcccagatctggaagggtcattccctgggtaccatacagcgaggaggtgactgagggattgtttggggaaggagccccggctgggagtggaagtcccggctttcttgttatggtgcagtcctgtgttgctgtgtgacacaggcacatacaccttctctctgggcctcagtttccttacctgtaagttggttgttgggaggaccagcggtagagcagagatggcagggatgcactgggctgggctgtcagcagaccatgggggtgggacgaggagagagctgaagaccaccggcagtggaccacagggggaggcatgcaggccagagacgggtcagctgccggcttgctggagtcattcctcccacgcagtcccctcctgaggggctggagctggggctggagggtttcagcagtcagggctggagataagagtctgtgctggagctagagggaactgggctagagaatcaggaggacagacagggtgaggggacttcgggctaccttcatgctgtctgttagagataaagataggagtacaaaggggaatttttgggtgaggtacacgggtgaaatgagttttcagggcctcatcctgtgtgttcaccttctgtgtgtgtgtgtgtgtgtgtgtgtgtgtgcatgcgtgcatgtatgtgtgtgtgccggtcctggacagtcacagcttaagttagcagcaagagaacttgaggttaaaggtatagcacgcaaatatgaggctggagccactgagtagaggctgagggcatctccacagtccaaagctgggctgcagacagggaaggtcagcaggagcactggagggtctggcctggggttggggtcctggggccagcatgggtggggtggggctccagggcgtcgcctcattggctgagcaccgctcctccctccctgttccttggctgggttaagggagtggcactagcaggagctgccccagggcttctcccctggggacaaagatctgatggaagtgtggggccaagttctgtgtcctccagccctagtgacctctctttggctcctcagcatctacaaatctgaaggacaaaacatggttcaagcatctgggcacaggcggtaagtaccccaccctcttctcaccctccagccccctgtcctccacccagcccacttcagtgccctccctgctccatcctcagcctctcccttggggcagctgtcccccctcgacctcctcctccccacccacccactcgcctctgaggtcccagaagaaaagcatcttccacctgttgcctgggctgggtcctggggtgaggggaggctcagaaatacttggatgagggtcaaggcatgcaggtggccttcaactcaactgcactcagcacctctcaccctctcaggctcagctgtctttggggtgaaaaagagccagtccttgcaatggccaaggccctgcctatgtagtccttgttagctttctggcctccccactccagccccctgctctccctcctccagccacactgagtttcttttctggtttttttttttcttttctttttttttttttttgagatggaatccagttctgttgcccaggctggagtgcaatggcaagatcttggttcactgcaacctccttctcccgggttcaagcgattctcttgcctcagcctcctgagtagctgggattacaggattacaggcacacactaccatgcccagctaattagttgtttgttttttttttttttttttttgtatttttagtagaaatggggtttcgccatgttcgccaggctgttcttgaactcctgacctcaggtgatccacccacctcggcctcccaaaagattgggattacaggtgtgagccactgcacctggcctcacactgactttctttgctttcttcaaacatgctgagagtcctctggtgactattccctccatctgagaggctttctgcagttaacatacagcccactctcatctccttcatggctttgctccaaggccaccttctcaacaaggattactctgactgccctatttgaaatcacaccccatctccagcccctgcactcccaattcccctctccttgctctgttttttcccataggagctggtaccttcgcttatacaaatgtacttacttattacatttcattgctgtcagctccacgcaagcagggatatttgcctgttgtacacttggacggagagaatgaatagtgcccctctgttgacatcattgcctctagcctacgtctctttccagggctttagatcctgtttctagagacccactggtgtctcacaggcaactcagctcctagatggaaacagcctcctccgccccccacaagtccactcctcctgtgctcttggctcagtcaggggtccccttctcttcagttgctcaagccagaagtcaaggtcatgtccttgatacttccctcttccccatgcctcacatccagtcaccaatctcctaaaatatctagaatgtgcacagcttccaccattctttctaccaccaccctactcccccatggccatgtcaggccaccacccgcccattcttcaaaactcccttcaggcctcacctcccatgcctcccctgagttcccccagtcccaggctgcttctctctggtggtgttgccattacccatctcttctattaaacagagtgacccaagagtggagagtgggttttgactttgtatccctggtgcttgactcataagtaggtgctcaacaaaaattttttctttttttgagatggagtcttgttctgttgcccatgctggagtgcagtggcatga

SEQ ID NO: 1883665 - DNA, 4001 bp, Homo sapiens
gagactgctgtggcaacgcaactgccacagcctctctggaaagtaatttggctgaagcgatttaagatttctcatatgcatacccttccaccagcaaccctatgcctggagtctgtcttctgtagggaagaagtatgtggtatgagccaaattatgtctcccaaaattcatatgttgaagtgctaacccccaggacctcataatgtgactgtatttggagacatagtctttaaagaggtcattaaggttgagttcattgaggtggactctaatccagtctgactgatgtcctcataagaagaggagattagggcacaaagaggcacagagtagggaggtagaggttgcagtgagctgagaccaagccactgcactccagcctgggcgacagaacaagactctgtctcaagaaaaacaaacaaacaacaaggacaacaaaaatgaggcacagagtaaagacaatgtcaacacagagataaaaggcggccatctgcaagccacagagagaggcctcagaagaaaccgccccagcccacaccttggtctcagaattctagccccagaattgtgagaaaaccaattctgttgtttaagccacacaatctgggtactgttatggcagccctagcaggccagtgctctctaataggacacacataaggtgttccccgcagccctgctgaaatggcagcagaatggaatcacatccaggtccaccagcattggaaggtggaattgctgtggcaaaaaaaaaaaagccctccttttggaatattgtgaagacaggtgaggccaaggctctggccctagtgggctaagatgatgtgttctgggacatgacaagttgcagagacacataaagaagagctgaaccaacccccaccgcctccatttttgtgtataaaccaccctattaagcctgatgatttctaaggcttggagcaggtctggaagggcaggggagctgattcttacatgggatatctggggcaggtggctaaaaaaacaaaaatagtagcaacatgcaaaaatgctcatggcctggtgtgatatgaaaacaatgaaaaagtcttttctctgatattcctacaagtgtgtgaagtgtctttccaccttaccaatttgcaggtggaggaggagtggcagcccagatttctgcggggtagaactgtgggccactctagtgggaaggccctgcttgagagaccccaggagtccttgtatacaaaactgggttctggacccgggctgttcatctcgtgatactggcagtggagacaccagcaccaccaccctcccccatgcccgctctcactccagaccagtgctggtcattattggtggcatggtgcacctaccccttgtctaggaagatggaggagttgaacccatcaaccagctcctcactgatctctcacatggagctctgcacaaatgatgctcggcagccagatcatcagacatcagggccctgcctggccatcaccgcagcgggaaactcacattagaaattctgctccccagataaggcacaggtaggcaactgcatagaggaaatgagctgaagtctcaggagcacaggataacatctggggaaatgtccttcacccagcactcaccttcccatcttgccaggcccaccagggttccaacacccaacaacctgctccagcccaggaagggcccaacgctcatcccttgccttccctccactgcctccctccacacacacggcgatggagaggggtgtggggctgcccaggtgggatcacagttgtggcctggcccggacttctctgtgttacctttgggtacttcctgccaaatggccagaggtgccaaaagtgagtgctgagccaaaaagcctgcagcaatggaaaaggccctcgtgccgggctttcctggagtcagagcctcagaaagtcgggatacagcaggagaacatcttattccctctagtggctcccatcgagtgagctggacagggggtctctagaatgtgagtgctggttatcaaagttctaagttctgttggggcctatcaccaaggaagttaggtcacttctctaaggttccattacctcggctccttccttcaaagagctccctccccaaaggtctctctgagccattgactgctcaccctcctcctctatgtcatctccttaactgttcacaattttgccaacatcccccctctgggaaaacccaaatgcagcgagggccctaggtttgaggagatacagctgggttccaacccttctttttcttaccagttctgtgccctggaaaactcactgtacctctcagagcctctccagtcccctaacctgcacaatgcaaatcatcccagcatctgcttcccagagacatcatcaggcatacatgagataattctcataacactcataggttggtgtcacaagtaacaaatgcacaaactcaagagaaggaagaattataaggatagatgggatgcagcacggacttaaactgaagacatgcccgggttccaacagtgtaatattggaaaagttacttccactctgggcctcatttctcattctgcaccatgagagagttaacataaaatgaaactggtatatggtcatcctgtggcataaagccttccagtggtttcctgttatatttagaatcagacctaggtgtctcatcccagcctatgtggtagtctgcatgcatgcacagcagcttgcaatgaacctcactgctgggattcatgcccttgtttaaccataaagtggttactgactccccttctgactaagagtatacagcaaagtgacgggttgtctctcctgtctgagtcagttagggctgctataagaaagtgccacagacagggtggctcaccaataacagaaatgtattccttgcagttctggaggctggaagtctgaaatcagggtatcagcatggtccagttttgccgaggtccctcttcagggttgcagactgccagcttcttgttgtgtcctcagatggttgaaaaagggtgacggagctccctggggtccctttgaaaagggcactaatcccattcatgagggctccacctttatgagctaattatctcacaaagtccccacctcctaatattatcacattgggaatttggctaacaacacatgacttttgggggacgtaaacattcaatccattgcaacttccaatatttagttacaaaaaaagcaccaattccctcgtacttgctgtctcctgtgtttctccctccctttccttgtccttctctgtccctcctcctctcgctgcctctgtcacagtcctctaactgaggaagcaagctttcatgtcaggagctacccgacatagaggcccacatggcaaagaactggggaacatccaggccaacagacagaaaggaactcaggcttagtccaaactggttctgccaatacctacatgagtgagcttgggagcagctcttcccacagcccagcctcggttgagaccacagtcccagcttcatgggagaccttcaggcagaggcacccaggtaagccatgcccaggttactgatccacagactgtgagatattaaatatttgtactttcacattgctaatgttgtgagaagaatgggtaactcacctagtctaccaggccccaggatctggccctgccatcatttccctcctctcccatcctccctccagggctcccccaagccacactccccaagccacactggctctttctcttctttcttcttcttcttatttatttatttatttattttgagacagagtctcactctgttgcccaggctggagtgcagaggcacgatctcagctcactgcaacctccacctcccaagtttaagcaattctcctgcctcagcctcccaagtagctgggattacaggtgtacactaccacacctggctaatttttgtacttttagtagaaatggggtttcaccatgttggccaggctggcctcaaactcctgaactcaggt

SEQ ID NO: 1883666 - DNA, 4001 bp, Homo sapiens
ggattacaatcttaaatagggttgtcagggaaggcttcatgagggcaaagacctgaggaggcatggaaatgatccacgcagatgcatgtctggggaagagcattccaggcagaggcagtgggaatggaccctcaggtaagagcatgtttagcaagttcagagaaaagcctcttaggtcaggtctggagcgagagtggaaaatgtaacaggacagatcatgtaaagacttgtagaccacagttagaggcttggacaataactctgaggatgacatgaaggtattgggagggggtgttgagcagaggagtgatatgatctggtttatattttagattattctgactgctatgttgaaaatagggttgagagcagaggggaagggcagcacaccagttaagaccacttcccaaaaatccagatgatgatgggcttgaaccaggagagttgctatagggatgtgaagcaatcaaattctagatatttgggacctgctgacaggtacataatggtgtatgagagaaaaggcagtgtgagaatgactctgaagtctgtggcctgagcaaaacagaaacctggagttgccaatagctgagataaagtttctggttaaagatcaagagctcagttttggacaagaggggtgtgagatttctaatagacattcaggtggaggtgtggggaacacacctggatgtgatgagcctggaattcaaattcacatgtgtgaatttgaaaaaagattcagaaaagaggtgtggactggaggagctatccacacacagatagcatttgaagccacaagactgggggtgatgacgcagggagtaagtataaatagaaaagagaagtggtccaaggactcagtccttacatcagaggtcaaagagacaagatggagactaggagatatgaaggcttgtgcagtgagtgtttcggagaaacgaagaaacttcccagaagaaaggagaggtcaactgctaacaagtcaagtgaaatgagaactgggaaatgagttgacaagagcaatttggctggcgtgatcagagaatgtttaagagataatgtgagggaagaaaatggaggcaggaagtatgaactactcttttgagtcatattgtaaaggaaaaaaatggggtgattttactcttttttttttttaaagataggaaaaaaaagtatatttatatgctgaggagaagaatccagttgaaggggaatactgtggcttcaggagacaggaaaactgcctaagccacatccttcagcaagtgagtgttcaagtggagggtttgtctttgcttggggcacgggcggttcatccacagtgaaaggagagaaggcagggcatgtggggttggctgtagaaagcgggcagacggggtgggaacttatgaagactcttctgattgttattttctctgttaagtaaaaggaaaggtcattggctaagaatgaagatggacgcgcaggtgctgggagtcatcgaagagaatgaaagaatgaataaaatagagaaaaatacaatgctattatataaacctatacatttaaattactttcctcttcaaattagaccccctggaaggcaaatctctgtcatgttaagttttaggaaaagtcataatctacttggagctaagtatgaagaataaggtatatgatttaaaccacataattctatttttgcttaaaccggggaagcctttaaggtaacgtagagtgtacccattaaaaaagataaaaatgtcagcttccccttccctttaaatatagtaaggctcaaaggtaattgatgttcataaccctaaggtactataacagtctgaagcaaaatattaaatgtcttctgtagtattttagttaacttttaattttattggtaatttatgtgtagttaaccacatacttgtgcctcaactatttcacataaatgtgagatgtcttaggcctctttgaactctgcatggaaaagaatgctgaggaggtatgtctgtttaagctgccactgcctgcctctcataaataatatctcacattgcataatagcccagataaactgcagatcgcttagagcctgataaatgagaggaaactgtacagtttgttttccaaattgcccttggacagctaattcacaatttactattttatagctgtaagattttaaaaatataaaataacatagctgtaaatacagattatcagaagatagtctgtaaaaatgtaaatataatatagctgtaaatatacactatcggaagtaccaaatctagttttagtaggtagaggcatcaagtaaaatggaaatgaaagatgtttcaaggaaaactccaggacatctgtggcagtactaaagaaaccttccttctcaggttcccagcatgctattttattgatgtaacaacattttcaataaagttggtaaattatcactatattactgtcttatagcaacatagcaagagctttagagatcatataagtataaaatgtgaatttaaaaaaacaatgaatatgcaggatttttattagggcaagcgtttccataaccataaatatttctttaaaacaaataaatgtcccaagatctctgttagtgatccaaactaagtagaaattagtaaaattaattataaatgaacaatttcagcatataaaccaacaagtcttttctagatttttaacactgtgacccaattgcattattttccaagttagaatgactaataatcaatgaatgtaaaagcaataattaatacagatgacattgtacttttccacagtaaagaaataaacaatctaatatttttataaatcccattttatatcacaaaataacctttactaagcaaatttttttaaaatctcaggaactatagacatgatgaaaagatagatattttatataaataattcaaaaatactgtcaggcaaggaaatgtaaaatccttatttgagtaaaagaaaatgctataaagcaatgagttatcaaaatacagaagaggtattctaaaacaaatgaaaaaccaagatgatgaaatagtgacaactacttctaatgtgtaacagatactgaaatgccaaggtgaaagtgaactgaattatttcttaaagcagtggagaatatgtaactttcaaaaatgcaagaagcacagcaaattaactaattaacttaccacctccttcaaataaaagcgagaacctcttgggagaatttaagcaccattagcagacacatcttagagcagttaatgaaatgttttgtatttcagtagaaaactatttcaatggtgaaaatgatgcaggaatcagaagcatattctgctgagaaactaggtagttgacactttcccgaactggaaaaacatttcataagaaggcatacagttattggttgaatcacatttgttctaaaaataattcgtgcttagtgaaacagcttaccagccgccacaactctgggatcctcatgggacttatgtctcccagctgcacgactatctgcactctcattccaccaaagaacatgaactgcagaaataaaccacaagtagtttctgaaatatatggcaatagcaaataagaaatattgaaaaagtgaatcagaaatgttgtcttattctttaaatcaaaatcaaaaggtaaaactaaatatgttagttataagatttcagagggatcagaaatttggaagataaatttataagttaaactggaaacataaggctgaagagagaatgcaaagaaacacagcttaaggcacaattaagactagacccgagtttaatgacttcctactatgttttattttttaaaaaaagcagattataaaaaattgtttactgtagaaaatttaggtgatacaaagaaaaaataaaagttagtataatcttaactgcctagataaacctttatcaacatatggtgtgtttcctttaaaaaaaattagtaaaccaaattagggtcttagtgtatattatacttagtaacagattttttaa

SEQ ID NO: 1883667 - DNA, 4001 bp, Homo sapiens
ccaccatgcctggctaattttttgtattttttagtagagatggggtttcaccatgttggtcaggctggtctcaaacttctgacctcaaatgatctgccctccttggcctcccaaagtgctgggattacaggcatgagccacagctcccagcctcttgcctgggttattgcaatagcctcctcactgctctcctgctggggctccctgcccagaaggcaccttcacacccacaccatgaggcctgcttgtgcaagaggagagagatctggaacatctattcaagacaaagttattcattctctcgttaaagcatgataaggcagactttatttaggaccattatgataggtacaggaaccactgtggtggggtcttgctgtgggggagagatactgggctcaactctgaacacaacaaggaaaagtgggaatttatcaccaaggagtaggacaggggtcagtggatggaaaattactcagaagaaacatcagggctgtggggggattctggcttaactgacctgagaggattattgctgaagacaaaccagggtgaccagacatcatctgggagtggtgggggataaggaacctgatcagataccgagggtggggttcctggctaaactgacttagcaggtttcttgctaaaactggacaatgcagacacgaacatgggggtcgcaaagtcagacatagtcggaaaagagctcaggaaggcctgagtagagttgggttggggagacgttctttgtcacatccctactgggcctcccggaacccccctctgacttgattctcaaaatctcttttttttaatccataaaggataggatagcctgtgcagcagggagtcacaggggctcttctgatttcaagctgcatccaagagcaaagggtcacatatcctaccagagtgagcggctttcccggaaagacttgtgaagggcagccccaacaaaatttgttctgcctcctgggccctaaaggaggactgtgaggagggtgcaacgaggtctctttgaagaagctatgcagatacttcacctgtcacctttccctgtggggataggtgtgttttccccagctcatgccaaatgaggatgattggagagaactccctgaaaagctgcccctggcttggcaaaatttacagtgtcagaagctgcctagagcttcctgggaggacagagtgggagagacagagcgacttgtgtcctgagagcagatgggcatctcaggcatggatcacagaggaccctgggaaccttgccaccagcagggcctgggatagccccaggtcgtgcctgactctgctagggttagacgacacagggccacagggactgccttctgagaacctgcaggagctccaaataggaaaagagagtcagataagctcaccaagacagaaagtagaatggtggtcaccaggcgctagcgggagaaaggggaacagggaggtgtttgatgggtacggagtttctgtttgggaagatgaagaatttctggggatggatggtggtatcagttttacaaaaatgtgaatgcacttaatgccattcaactgtaactttaatgtggctaagatggtcaattttatgttatgtatattttatcacaattttaaaaagaaagagaatccaagtgttggcatctactgtccagcaggcaccaatgtccaactgaaatgtcaccaatgagataaggccctctccactggcccaccatcttggccatctgtggagaccaacacagggaatgggcatgaggaagaataaggtcaggactcaccccgtcctcaggttctgagggtctggtcaggagccgccattgtgtccagagtcagttcctgccggtgggttcatggtctcgctgacttcaagaataaagctgtggaccttcgcagtgagtgttacagctcttaaagatggcacagacccaaagagtgagtggtagcaaggtttactgtgaagactgcaaggacaaagcttccacagcgtggaaggggaccccagcaggttgccagctgctggctgggggttgccagcttttattcccttattgtcccctcccatgttccttttctgtcctatcagagtgcccttttttcaatcctccccaggattggctacttttataatcctgctgattggtgcattttacagagcactgattggtgcgttttacaatcctcttgtaagacaggaaagttccctaagtccccactcgacccaggaagtccagctggcttcacttctcaccatggctgggggagcccttcctcagatgagagtgggagactgaggtttagattaggctggacattcaatatctgatcatcagactggggaatgataaccggagatgaccgtaatggttgatcctgatagtgcctgagatgccttctggaacctgagaagggagaaacatttgacttgtgctgtgtaagggaaaaagtctatttcataattctgccctccaagttccatttagtcaataagttatgcatgcttgactataggattgtttttttaattacaacaaaggataccccaaacaaaacaaaggcaaggatactggggaaaatattacttgagctataacaagagttaatatggacaacatatcaataacttttacaaacttataataaaagtgaaataacacagaaaaaaatgagtgaatcctattcataggcaattcacagacaggtgaatgcaaatggttgataagcatatttttaaaaatatcaagtcgtatatggaagcatcaaaaagtaaatgaaaataaataattacatctatcttggtttatcatattggaaaaaccatcatattaatattatccacgttggtgaggaggtaaaggagagagcattttatatgttgtttattatattttcccatccacacacacacacatatgcacacacacatgcacacacatccatctgttccatttctgctcatctagtctgcagaaatgaagtcatttgcgcatatcataggtacaatgagacatattccagcacaaaattgcaagtccaccaacaggaaaatgcttaaataagttgactacacacctaatatagagtatcgttcagatattaagcatgttgagttagatccacattcatcgaattatagggatgcccatgccatgaagtaaagaaataagttggacagatatataaatataacaatgagctgggcgcggtggctcatgtctgtaatcccagcactttgggaggctgaggcgggcagatcacttgaggtcagcagttcgagaccaacctggccaatatggtgaaatcccatctctactaaaaatacaaaaattagctgggcgtggtagcaggtacctgtaatcccagctacttaggaggctgaggcaggagaattgcttgaacccaggaggcggagcttactgtgagccgagatcatgcctctgcactctagcctgggtgacaagaatgaaactctgtctcagaaaaacataaacatgaaaataaataaataacacgatgaagaaggggagacatttgtgatccacgggtatgtgtgtgtatgtttgtatctgagggcctggccgtgcagaagttgtgtaacatacacgccaggccctcaatactggttccatggttgtgttagaaggatgagggaagaaggaagcaatacataaaatattaataaatgttaagtaaaacagccaattataatatctattcagtatctttcttcacatacataaaaatgaatatgcaccgtatttacaggcaagcacaggaagaggaaaaacattgatttgattaaaggatatcattgtggacttttagggcttcaatattttaaaataaattttattttggaataattttagatttaatagataagttacaaagatattacagagacttctcatataccctttactgaatttcccccatcattaatatcagatgctatcactgtgcttttgtgaaaactaagacattgacat

SEQ ID NO: 1883668 - DNA, 4001 bp, Homo sapiens
gcaaaggacagaaaggcaagtcattgctgaagagacatttgaagagaacatgaggtggcaggagtttgaataatattaatattacattcccttgcatggcactattgctttacaatgtactttcacatctattttctccgggactcctcacagccctcctatatacacgttgctattatcataattaccctcacctcaagcatacaatatcctcaggaaagaagatactcggtctcagatatacagagtcatgtagcgagggttaattgttagaaaaaaaaaaaaaacctcagatatttatagtaaggtccgtctttgagtttgctttctaccattccaatccttgttaaagtctctgaacatcagtttcctcctctttaaaatggggacaatagtttctgccctgcctacctacctcccagagccttgatcttgtaagtgaaagacattaagataaacaccacagtgctgtgaggtgatactgtcacatgtcccaccgaaggataccattgctttctcatctcactttttttctgaagcagaattaatcctctctgaaagtggtgttttctgcctaccttccagaatctgagagaagattctagaataatctggcctagtctactagtcttagagccatgtgacataattgcaaccttgagaagacatgtgagatatctgaagccttgcagccacacacagagggccctgggctccctgctgagtcatcacccatgggtaagcctcgtccactcttggacaatctcagaagacacagggtcacagtccagaaagtatccagaaaagaacaggcttgccacaaagccaaagcagcccatgcccaggctgtcagagaaagactgaggttgcccacatgagctgattctgcccattctcaggcaaaatcggccagtaccacttcttgtccgcccataccttgtctgtgcctgaggctgaaggtgccacctgtgagcccaatagcagtgttctagggcgaccccgggcccagcacacagttgctcctgaccgcttcccactggcagccactgcatgtcttatgctgctcaattccccactttttattctgtttaacggtggtgagaggagccgtggcctgccctgaggagtgtctgcagtgagagcaggcactgaattgattttcaagattaactgtcatctccagctgggaagcagcttgcacaggaactgagcaatcttcctgggttttctcctgcttcagaaatcactttctctgccaggtgtctgataaggctggattggtaggtcctaggaggtcttttcccggtcactgaaggattaagtcttccaatatgtgaacaccaggagacacgaagagaacttctagtaagaagggctcaccttgtggttgtaagtttcatcatctttgctgtgtgaacctaggcaaattgcttaacctctctgaaacttcagctcctcatctgaaaaacatagacaattaacacctaccttattgtgtgcttgtgaaaattaaacataatgtatgtaaagtgcctggcctagaaaagcattccataaaatgagtgatgattattatttaattcccacccttccagtagctgacttcacccagagctgttccttcaaactgggttcatattttccacagaaactaaataaattaataagggaggccaagaggaaataaatgaataaatattttatttggctgagaaaattttatctcatccatagtccaagttcctgatggtttcataccttggtggttcttcttcatcaacttacctgcccatctcacctctaaatggtccccgcgccattctggtgtccagaatagatgcagagatttagcttatcctgtttcttggaccagtgccaaagctcctccttattaatgttcaacctgttctctcctgaaatctcctctgcctcaggagtgcttcctctggcatgagattactggttcccatgttagttgcgagactgtgaggtccatctgttgagatccaatgaatgaccttggttattagccatgcctgcttgaaatgtcacaatgtgccccgcgcggtggctcaagcctgtaatcccagcactttgggaggccgaggcgggtggatcacaaggtcaggagatcgagaccatcctggctaacatggtgaaacctagtctgtactaaaaatacaaaaaaattagccaggcgtgctggcgggcgcctgtagtcccagctacttgggaggctgaggcaggagaacggcgtgaacccgggaggcagaggttgcagtgagccgagatcgtgtcattgcactccagcctgggcgacagagcgagactccgtttcaaaaaaaaaaaaaaaaaaaagtcacaatgtactcacttctgcaagaaccaacttccttgctaccatccacaacccagcacccattgtttctcatctaaaacaggatcacgctggatgcttgttaaagatgcagagtcctgggctgtactcataccactgaatagctaaaggaagtaaggaaaatgatatgattctacccaagccgaatctctaagggtaaggctaggaatctgcctgtgtaggaaacccccaactcattattgtgctgatgaaaagttgagaagcactccaagaaagtaacagaaagactcttaaaattgcatagtcctccctctgcttttatccatggagaggagtgtgtaaacatctgagtgaggcaatccaccatacagaagcatttgctatctgtgaaaggcccacgtgttcaagaaattgtaatgagaaatcttagggcaaaagacaagttccatattcagttcatctgtatatcatttcatgtagcacagggctggccggcagatggtgtgcactgaatgttgagtttatgtctacatgtcaacctccatctgatgggcaaagcagggagaagcatttgatttttacttgaatgttgccaaaatgaatttagttttataatattacagattacttgatatccatggagaaaggttttatgtatacatacatacacatttggccagcataaagaaaggacgtgctctctcagacttatggtgaaaaggaaaaaaagaaaataatattgagggccaactatgtgcctgacagttccgtatatttttatacaattatctcctataatcttctcaactaccttaggtaggtattttagttctaccttcagataaacattgtagcacagggtttaatcattttccctacttcccttagctattcagtggcacggcccatcttcagactgaattctggctgaattaatgaatgtctttatccatggcttccttcttaatgaatgtttgtgtggctcttcatagttaacagagtgtgtctaagtaaatcagggtctactagggagtataaaagaaatggacaaatatctatattaggaggttgaactggatttgaaaagagaaatgatgttatgggagttcacaggaagtggcatttgggattggcctggaagattgctctaggggagaaagaatgagagggcttacccactggcagggactcctctaccaataatcccataaaggaggaaacaccaagtaatccagattgactgtagcagcagctaaggccctggcaggagaaggaagcatggccgtataatatggccactggacataattttacttttctccgtcaatactctgcagccctcgaaattgtggccataataccacaacttgtttaggcagaaaaggccaaatgtcaatgatgtaagggttggcaggaagtgtcctactgtgggcatggctggctttggagcttcagctgagctataaatcaaggagaattgcagaaggaagttgagatgggacatgagaacctgaaggatggatgatgaagaataggagcctgtaataagggatttaacaatttgaattccttctgctgcaaggaacagaaaactctgaatcaaatgagtttaaattataaggaaatcaatgtgttaacacat

SEQ ID NO: 1883669 - DNA, 4001 bp, Homo sapiens
gtgtttgttatattacttaacataaataagctcaaaaacaatcatgaattgaacaatggtaacagtttattgtgccaaggattataatgcatctgatttaaaaaagaatgacgctgaacaaaaaggctgttgaaaaatgaatccaaaagtgagtatcaatagcaaatagtaatagtaaagataatataatagtaaaaacaagtagtaagtcatacttattgagaacttatcttgtgctatttcactgttctaagcaccttctgtgaattaactcatttaatcctcaactatctcatgcactagatactattaacctcatcttacagctgctgaggttaacctccctatgtccctaactaggaagtggaagagaagggatttaaactcaggtttaagtctggctccacagcagattctcaaccacttcctgttgcttctccaactgtaaatatagaacagtaggaacatatgaagtcccgagctatcctatcttctgtttttataactgtctttggtcagactttcaaagactggctccaactgaagatgttagaaaaggcttaatctgccttgctgaaaggcagttttgcttaatggttaggttgcctgggttgactcctgaccctactgatttccagctgatttccaaccttaggcaagttacttaacctctctgtgccttgttttctcatctgcaaaaagggcatacagtacctctatcatagggttgttacaaggaataagttattatatgtaaaaatacacagaacagtcctagcacataatatgcaaatgccggccattatggttatagcctctatagactcgccttcatttctgctattgtatttctagttaagcacctcacgccaccaaagcagttcttcactgaaccttcaaagagaattttttcagctctgccttaactcacatactagttcagcatctccatatccctaacaactagaatttaggacagctgtccccttcagaggctgcatttctcctttaccctggtattcctagaatgcatgacccaatatgaagaatgcctatacaactggccctttactagttaattaagccctccaagaatgtctcacaccctatccgatttataacactgccagactaagttttctaaaactttagttatcacaatggcacttccttcctgtctgattccccttattgctactgtagtggttacagaacttccgaaatcgtagtaaaatatgagataatgcacatacttttcccccctcccctctcatagtgcttttatgatcaggtccctcttactttcccatttctctggctccagccaagccgaacgctccactatgcccaaacatctcctacacttttacgtctcagactcttctctgccttcaaaacccattttcaaagagttgtcttaaaagtcttctttaacaccccctgggacttgttaaatcctccttcagtgtttccatagcactttctacacaccagcattataatcccaaacaaaaaagtcacagtagaatgcatattcgcttgtgcccctcctccccaggccggaggctctacatggagaaggggcaggcgggttgaccccaaatccgcagggccccgcacaatgtctggtatgtaatcggttcccaatctatctgggtgggcgaatgaatgaaacgttggttggcttaatccgtttccccaggaaatgcgccaagaggagctgggcagaaaatgcagaggcgctactttcctggtccaatcccctacagagcgcgaaacagcgacctgggcagggtccccgcagcaaaccgcagaccccggacacacagcaagcttaatagtcactgcatgaatgaaacgcgctgcctcctggtaccctggctgtcatccaaagccacctgcgtagcccccacagcctttctggcagtatctgcggccccgcccccgcgccgggcctgcgcttccagccaccgcccaccattctgcagctgcagcgccagccgaattcccggatccgcggccgcttccgagagcagccaactgcttccgggttcaaaagcctccaatgcgaatcccagcgccgctcgggcgcgccaatttagggaaaaggctccgcccatgccccgccccctgagacctggcgccgggcgctttgaggcccggcttactcccttgctgggtatggggaaggggcgtcttctgtccttgtggtccgcttctaggctttttggagcatcttccagggtcactccagagacccccccagactactgaatctgaatccgttagggtggtccaaccttcctcttcaggtgtctactagaggcaaggttggatgtatgcggctgccctcagtacagccccttccttgttttttcttcatttgtgtttacttaaaacattaatccttttctccctctcctccatccctctccctcccctactatacagttattgacttacactaattcattcccgatgatctcccagaaggaaataagtgtctgtctgtctctgtctctgtaccatcgtcttcttggtacagttcggactattttttctctacaccccagttatgcaaagtgtagtccctgaaccagcagcctcagcatcctgagggaatttgttaaaaacgcgaaatctcaagccctacccagacttactgaatcagtgtctgcattgcaacaagatcccctggtaattcctatgcacatcaaaatttggaaggcacagctctcaactgatgtcctgggtctccttcacatccatcctgggaaggtcttattcctcattcctgaggtgagttccctatttcctgagtctgtgtctttttcttgattatatagcctcatgttgtggaacatatccgccaatagttccttgagggaggttgcttccaggtcttttttcccacagagcgtgcaggtctggaactgtttttattctggctgagttctaggttgaaaataactttcactcggaatattggagggcttgctccacaatattttagcttccaaaattgttgagaaactctacgtcattgcatttccttctccttctcaggtcactaaatttcttgttatgtaacccgctttggtttcggttttgttttgtctcaagaagctttaggatcttctctttatacccagcgttctaagacacaatcgagtgtctttcttatgggtcttttctcattcctattgatcagtttttcaatcctgaaacacatgttcttccgttatggggattctcctggtattatttatttgatcgtttctttccgccctctcttattttatctcttattttttgaaatttgttatttagatcgtggaccttcttggctgatgttttttcttacctgtctgtcctattttctatcccttcatctttttattctactttctctgtgactttttcaacttaattggacaaatgattatcagattactttatttcttttattataccttcatttctaagtgccctttttattctctgttcttttatagcattacattattgtttcatgaatatacctcctttactctctgaagatgtaaattataggagttttaaaatactttctacataactctgcattgattttgattctttgagttttttttggttgtttgtttgtttatatttggtccctgtcgtttctgctagaggcgttcttcatcttgtgtagtgatccctgctgtcaatttatatgtaaaagtgatgctctaaaaaggtgctttggggacataggcaaggcttgttcactgctggacaaggtgtaagatggtggggcaaggtgtaagatggtggggcaaggtgtaagatggtgggacaaggtgtaagatggtggggcaaggaccagctgtttattttcttctagagagtaatcttctaattacttgctttgagaatatatagccttcttggagcccaatgcgggaaagagtttgggagacttagtaatttcattatatgcactgatgccctgtgtt

SEQ ID NO: 1883670 - DNA, 4001 bp, Homo sapiens
gcgccaccacattccagcctggcaacagagcgagagactgtctcaaaaaaacaaaaaacaaaagtgttaatttaagagaattaggatgcatcggttgcttacgtaaactcttctaaaaatgaatagcctaagctacaagcaggagaacttctttttttttctctttgtgtatacatggggtctcaccacgttgcccaggctgatctcaaactcctaagctcaagcaatcctctagcctcggcctcccaaagtgctgggattacaggcatgcaccaccaagcctgacccaagcagaagaattcctaagtggctggtagtcttggcctctatcaaggtttggaggcacattgccattatgaccttaccctctacactatgacctcactagaatcaagacagacagcagcagccatatctcagtccagaagaccacaattagggagcttcaaaacacacacacacacacacacacaattatatatataaaatccttaaatcaagaacaaccaaatatatcactttttatgagatgaatgatagccatcttctattaacactaccaattagcctgaccaaaaaaaggtattaatgtagatgccaattagtgtggcctcactgaaatataacttagattgaaattaactgagcgtaatatgaaatggcaccaagtatcactgatttaacacctggtgaaataaaaaattgtgttatttcatgttctgttcttcaaataaccaaacagtatctttcactttggcttcttaaaaattagcgttcacaggccaggtgtggtggctcacacttgtaatcccagcactttgggaggcagaggcgggcggatcacaaggtcaggagttccagaccaggctggccaacaaggcgaaacaccatctgtactaaaaatacaaaaaaaaaaaaaaaaaattagccaggcgcctgtaatcccagctactcaggaggctgaggcaggagagttgcttgaacctggaaggcagaaggtgctgtgagccgagatcgtgccattacactccagcctgggcaacaagagcaaaactccgcctcagggaaaaaaaaaaatacagttcacaatcagcaagtgtgaagtgcatactaaaactctgctccaaacacacttactgtaagtgatgtaaacccaatgggtatgccccaaactccattttttcctcacagttaagtactgagacccctctccaatctgcagctcccactttctgtaggccaagaaagttaaacaaaaaaatacaagcaggtactcagtgaggacctgagggattctcccacgagtaaaatacatctattttcacacaaggttcttttggtcaacttctgggttttgctcttactccagaattgaagctactatagtgttataaatctgttgagaaaagaaatctagatttgtatgaagatctttaatattttaatttgccaaaaagcttctcaaatatttttatagctacaagtcacatttattaagtgattccagttacaatcccaagcacatttactacacaacaggcaatgctaaatgttgaagaaaagtgtctccagctttttagtgtaagacagacgatctttcattagtccttctaatgaaagcattagcatctactctgaaaaatctggcgaaggtaaagagtgaaaaagaggaggaagagaaaaggcaatcagccaatttgataaactatttttgtcgttactgttcaatatttatgaagcaccttaatgctcgaaatctgacaaaaattcggtaaggctgttccaaacaataacagaaaaaaaaatcacttttcaatagctggcgggggaggacgaggagcactatattcaaaaagtaattcactatacctcattcatgaatgaaagccaaatttcacccataggctgttaaccgatgctccgaaacttattcgcaaagtacatagagaaagaaattgcgctgggcgaaacctaactcggccagagaagcggcttcaaaacctgaaagggagaaaacaacgagtcaggtcgttgctccagaaatttccgagcgcctggctccccgggagggagtgcgggcgccagcggcggtgaggggacggtggcacctgtcactcgagcggcccccacggagtctcgggaggctcagcggtcgccggcctgggagtcgggtgcgagtccctccccgccgccccgagccttgcgccgagcgtagggccgcggccccttccgcggagcggccctcccgtgccctctgcccagcggctccggccagtggggcccgtcgcctcaggccgagtccccgccaccctaggagccgaggggagcgctgtcgagccgctgcttacgcctccggggttccggagcggacacccgcgaggcgggcccgcctccgcgtactcaccgggcctcccgggccgccggctcggccctcctctccctcctccccccgccgccgcctctcccgcggctccccaggcggccgcactgggcgttgggactggtctgggtcaagtgtcggcagagctgggggcaggctcgcgccgggcgggggtcgcggtcggcccacaggctgggcactaacgggtcccggggcgccggggcggactgcggcggtgagcgcggctgcaggccgcggtgaggggcgggaagagcgcagctgcgagcaggcgggcggagggtagcgggaagcccgggcggagggggcggcgtgagagcctcggggcgggggcggggcctggcgcgtccgccgagcgcgggggtttgtttattttcccggttggtagcggcgctggcgctggttagaggttcgccggtgacgtgagcgcccgagttgggggagaggaccagaaccacctgctggagaaagggagctacgggggccgggcagggtccaaacgcctcacgtgggcggcggcgccacggtcttcggggtcacagggaagagaagggctctcctcaagcgggtggaaggagggaggcctcccgagggaatgagactccaggccactcccccgcagcaaggcaggatcacctgcgtcgcggagagcagttagaggtccctggagtggaaaagggcagtgggacctggtagcttgggttccctgcaacttggggttcgacctccaggcaatgaagtagggatggtcctgcaagtcaagattccagtagcaagagtgcatcagatctctgtaaggaaaataactaacattgctcagttccctgtagagttgcagggcgctttgacgttatctcccttggttctccatcaggtcgtagtggactaattttacaggcgaagttaagtgacttacccaaaacctcacagctaataaacggcagagccggcacccagctgtactggcttccagcgcatcccattatctccataaatccccctgattcaactaatattagacgccccacaggtaagatgcttcagagttagaggggagttgaagatacctttgccttcaaagaagtaaggaatgaaacaaagataaaacagacaataaaagacaaaccatgataggtgccacgtgaaaagtggcagagtactgccgggaatcaaagaaccgtgtatatctgtcttggggataaggaaagaaacgcagcatgaaggagtaggcatttgggattgaccttgaaggagacagggagagttttacagcaagaagggatagcatgagaatatatatgaaggcgaatcagtgaaagttgtgttggggaaagagcaaagactccaggtatgttgagaggtagaaaagacaaaggagtatggggcctaagataccaaatggatgaatttatatttaattcagtattttgagtttttatggttcagaagtttgggggaagaaaaggaaggttttttttttctttatgctagtgatttatctgtgaagggaagcagaaatcagaggtggaaaaactgacagatctactgtaggccaggtaaaaggtaatgatgagtctgacctaaagggacagccaggggaatt

SEQ ID NO: 1883671 - DNA, 4001 bp, Homo sapiens
agggcagaaagatcacacacaaggctgtcacttcacacttggacggttgcacagcagccgggcagaggcgcccctcacttctcagatggtggggcagctgggcagaggcactcctgacctcccagacgtggctgctgctgggcagaggtgctcctcacttcccagacagaggggcggtggcagggcagaggcgctcctcacttcccagatggtgtgggggcagggcagaggcgctcctcacttggcagagggtgggattgggcagaggctcttctcacttcgcagaccttgcgggggcagggcagaggcgctcctcacttcccagacggtgggattgggcagaggcgctcctcaattcccagatggcgggattgccgggcagaggtgttcctcacttcccagatgataggcgggcagggcagaggcattcctcgcttcccagatggtggggtggccaggcagaggcgcttctcatttaccagacagttgggttccgggcagaggcgctcctcacttcccagacagtgggcctgcccgacagaggtgctcctgacctcccagatgcggtggctgctgagctggggcctccttacttcccagacgctgcagtggccaggcagaggtgctcttcacttcccagactgtgaggcggccaggtagaggcgctcctcacttcccaggcggtgcctagccaggcagaggcactcctcacttctcaggcggtgggatggggggtgcggggggagtgctgggcagaggtgctcctcacctcccagacggggcggtggccaggcagaggtgctcctctcttcccacacagtggggcggctgggcagaggtgctcctcacttcccagactgtgaggcggctgggcagaggcgctcctcacttcccagatggtgcagggaccaggcagagatgctcctcaggtctcaatctcttgaccttctgatccacctgcctgggcttctcaaagtgctggattacaggcgtgagccaccacacctgccctgccatgtcttctttctcccctcaagcagctgttttcatctcttggacatccccatgttcttatccatgttgccttgctggaggcgtccttccccttgggaagcctgacccagctccaacagtgcctcaggagataggcagggaagcttagcgggtgggggcggctcgtctctatcccacctcagttgcaggggaggggttggttgcagctgcggcagtggccccaacagttttcttttgcgggacctgtgggacctgtagccggtagctctgggtggagaagacctacttgatccaagagctgcaggatccttgggctgcatgtccttccccaccatcagcaaacctggagagctgggcaggtggtctttacccagcaccttcaaggccgccttctctggccacagggagcagcctggaactggggcagggagcactgttggaactgggtcaggcttcccaaagagaagaatgcctccagcagggctgtgtgaactggcgactccatggcccttggagtagaaactcactgcatgtacctgggccttgtcagtctggttgttttctgtcaagctcttgagctggacatttccctccaagggcctgggattgtaccggggggaagtggggtttccctgagtctccaggggcctagaggtggaggctgcttccccattgctacaggggccccttttattgtcttcctgctcctgggtctctacctggtctttgacctccgttgcttctttgggctcttctgccctcacctccatcttcggaagcctggctgggatcacctgctcatctaatgaaggaagtctgaggttaaacttgcctctgagatgagggatcctcacggggctgaggtgtccaaacatcctggagttgcgagcagacagcacgggtttcttccttgagggggggctccagaacacagaaggcaggaccctcagtggggtgcccgtgttctgagggagaaaacacagcctcctaggggcgccataccgcctggctggaaaagaaggcccaagatgttgccgagggttgaagaggaatcggtaacagcccaaggttcccagggcaggcacaggtgcaggagccatggggtgagcccagccagctgggaaggcctcacggacaagacgagcaggttgctgatggtatggcggggacctgtggtggaaccaggaacaaaatacgcttagaagagcacgttgccaatcgcgtggccggaacctgcggcggaaccaggaacaaaatacgcttagaagagtaagtcgccgatggcatagccggcacctgcggcggaaccggggacgaaatacgcttagaagagaatgtcgccgatggtgtggccgggacctgctgcggaagcagggacaacatatgcttagacgagaacattgccggtggtgttgctgggtcatgcggtggaagcagtaacaacatacgcttagaagagcaggttgccgatggcgtggttgagacctgcggcggaaccaggaacaaaatatgcttagtgagttgcccatttcgagcgagttgtgcacagacgaaaccaagggtcagaagtggagaggatactcctaagtcacccacttctccgtggccaggtgtccactgggcacctgggaatttataacatcaccttggggctggtgacagagccagggtgtggaggagtgagcgggagcccagcgagggtgcctacaagaggagtcaaagggcaaaaggcaaggcccctccaccggtccagctggactctctagcctcagggacgtcccactcctgggggcaggtgtgtggccctggatggcccccctgtgatgctgtggagggtgtggggctgatctgccagagcccttcccgcctggcatctggcccaggtgctggctgacacccagtggccctgtcttggccagccctctcccctgggttacagggccagaacctggaagcagagcgcaggaccagccagatcccgccaggctccccgggggcctctccagtgcctctatgccacctggagccaggcccactttctccatggctgccgtggccttaagggccacgaggctcgctgtgcaggcttccaaggagaggacgcggtaccctgacctgactggatgctgccccttaccacatcccttcctggcaggcagggtctccacttcttcttacaaatttgcctgagaccgttccttaggtcatccaggtggtcatggtccagccaggctttgaacccaggttgtgcgattccacagctggtgctctggcctgtgtgcctcctgatcatggatacagcgtgtattcttattttttcctgtagcccgggggtacttagcatggtggcatatctgtaataagcacatgcacacctagaaggaggtcttcacttcaacatataagttgaccatggcccactctgggctccagtcctctgcaaagatgtagggcagggactaccagttgccagcacagcatcattccacattgctcttctaatggagcctttcagcccagatgttctttctcgtctggtgggttctctctcgactcgtccaaatatgtaacgattatgttctagatcagctctggtctatcctaaaagaaattcgccagtggattataccatatagataaaagtctgtttctctggtcttcctagaatggtctagaaagcaagtacattatttacaagttaatagtggatcaatgtactggattaaaatatgaccaacgtaatttggttgttgtgagcatgccagctcggtccactcttcaccacactttatgataccctaaatataactctagatttgcttatgcccaagaggaggacatactcttgggtgtctggactagggaaacaggtatgaaaaaccattcggccactctacatctttttattggagaattgaaaccatctatattcaaatatattattaaaaggcaagaagttacttctgtcattttgttaattgttttct

SEQ ID NO: 1883672 - DNA, 4001 bp, Homo sapiens
agtctccgttaagaacctagttttcaaattaggccaggtgtgacccagggtgagacagggaaccctccaggctctagttttgctttggggaacaggagctataacacctcctccatcagagtattgctcccgggctgcggcgagacacagctctgttttgcacaaggtttggctcagaccttgcaccaaacagcatctctatgacccccacttctgttggttcctgtcacggactccctgcacagacacatgaccagagcaatgcatccatgttgaagggcttgtgagttttccgttttgctctgctacacaacgcagcattaaatacccttgctgcttagtctttgctcacttggctgatttagctccaagataatttctcaaaaaaaggaactgctgggtcactgggtcactctttgtatgattgcgaatatgtttaagaatcggacccaagaacatctatgtggctcttagaaagaataactcaatgtctgtggtttgcaaacaggccacgcagcccagggtgggaggggctggcggaagatgggcgatcggaagcccacaccttctgctggacccatggccctttgcaagctgcagggccagcagctacaggtaccactactgtcaccgtctctgacaattcctgaaaactggggcccacatttcctatgttccaggtgacaagttaagggccacggagagagggcactcagacgaggggctgagaaggcctaccaccagctgtgtccgggtggggttgagtttctgaaggccaaggcctcgcccactctgctggccctcggcccacctgtccctccactctcttggacaggagcgtggctaactccaggctgagtgtgaagagggagtggcaagtttctgaaaacacagagaccacctcaaggtcctcgctgcccctgagagattctgctgcttttttgcaccaactaatgaattaagatgtaaggaaaactctgggctgcagccttgagtaatagcatccactttggatttgctggggctcccccctccaagaagctattcctcataatagatccattaacccattagggcctagctcgtatacctcctgcatggcaggagctgccaacgtaggccccattgcttcacaacctgagctgagccctgaagcccatcagtgctgtggcctgggcaacccaactgtctctgccccgactttcagcctgagctctctgagtgcaggtcctgccaatgcagtgtgacagtgacgtctcaggtgtgaggacgtgggcttgctcgtctctgtcccctgcaggcttggtatagggtctaatggaattagggggtgacagactgtattagtcagggttctccggagagacagaactaataggatagatgtacatataaaagggagtttattaaggagaattgactcacacagtcacaaggtgaagtcccacaataggccatctgcaagctgaggagccaggaagccagtggtggatcagtccaagtcccaaaacctcaaaagcagggaagccggcagtgcagccttcagtctgcggccaaaggcccgagagcccttgaaaaaccactggtgtaaatgcaagagctgaaaagctgaaggacttggagtccgatgttcgagggcaggacgcatccagcacgggagaaagttgaaggccggaagactcagcaagtccagtccttccaccttcctctgcctgatttattctagccacgctggcagctgattagatggtgcccgcccagattgagggtgggtctgcctctcccagtccaccgactcaaatgtgaatctcctttgacaacaccctcacagacagacctaggaatagtactttgcatccttcaatccactccagttgacactcagtattaaccatcacaccaactgttgccatcaatgttcagcctccaaccaaccctgctgcaacagtgccagtgttttgagagcactcgtttctggcttgcttggtggttgaatcgtacggatgcctgtgcctgctctgcccaacacagtggaggagcgtcacgtgtgtgcacctgtggatggtgttcgtgcgccagtgaggtctgggatgcagccaggaaccccaagtgtgactcttgcattccttctacacagcccccagaacccactcagacctgaatttggtcgggctgtgggaggacaggcagggctgggctgctgagcggccatgcacagagctcttggacaccggggagggtggggcatggcagggttaacccaacgctggggcacgcagcctgcagcaggatgaactcagccagccctcggcttcccacagggttgggccctcatttgcccccaccttctggtgcaccagcacccccaccatgttcaaagtaccacagtctccaggcctctctgttctcttagcccccaagtccctcatctgtcactccattgcttccttgaggacgtcatcaaaccccactgagacccaccctgtccctccagcccacggggacccttcctgcccagtggctcggcctttgggtcaactggactctgatgattcagctgcatcctggaatggccctcatatcagcggcattgtggcaccaggcacctgctaattttcttggcatttgcttttataactagataatagtgatagctgttatttatcacacacttatgggccaagcacttgctgagtcccattctttattctggagaagaagctgcaggtggctgtcattagccctgctccagggttgacattcagagagccaaccagctgtccagccccacagtgggaagggcagagtgggtgtgccagccggggggtggccttctgctccctgagggaagggctgaaacagctgaccttgaagatggtccacacccttctcagcctgtgtgctgctgaccgggtatgccaaggcgtggaaagctatggggatcctgggggtggaggtcgacacaaggtctgtggggtcacaggatggtcactcttaggccttggagacaaaggagtggaaatgggccaccccctcccaacctcctgcctgggggggtctgctcattgccgttgtgttgggacaggcttagccctaagcagggctcttggaacttggctgcttcctcaccagcaggagggcttctctttggaagagaagcccacttccttctgggggactttcaaatggacttgacccaggcaacacaaccacagcctcattctggaatcttccctcccagcggaatgtaaggatagccaagccttccacccatatgtgagactcagggtcctgccttcagctttctgggctccagtcagctccagaataattagcaccgtgtaatcccagggacatcggcctccagaggcctcaggctgtgacaaaggccagaatgcagttcagcgtgtccagtggcggcttctcacctcactcctcctgttgtcactgagagccagatggcccaaggccgggcttgccaaggacatggacacttccctccgaggaataggaacaccagtaggaaggacaggtgagaacgtttgactatggccccgagacctctaacttcagcactgccagcagcatcctctgctgtggcttcttgagagctgaggcccagtgctgggatggggcaggtggctggacatccggagggactgcccgctggggaaagctatccttgccctctgagaaaactatgaatgtacgagccctggccctgctcaggccatgccaccagtgagggacttgcccagcgctgggtgccaccttctcctttaattccacaaccatgtggtgacatgtcttttttgtagatgagaaaacagaggcttggaggggtgagaacttgtccagagacacagggggcagtgcaggggccaggatccatatggaggagctgggtctcaacacccaagtccgaggcagctgtgcctggcaggtttgtgggctgggattacagagagtcccaaagggctggacagaactgtccctccacc

SEQ ID NO: 1883673 - DNA, 4001 bp, Homo sapiens
gaattaatacgatttcttcacaaactcttccaaaagttgaagaggagggaacacttccaaacattttttatgaggccagcattaccctgataacaaagacagaaaaggacactacaaggatgacagagatttttaaggtacaaatgatgtattgttggaattgaaaatacaggctttgttagtacaaagatttgtgtgtggataggtggatgtgtactggtgtgtgcatgcatacatatacaagcttaacttgttttattgcacttcactttattatgcttctcggatattgcagtttgtacaggttgaaggtttgtggcaaccctgcaccaagcaagtctaccagtgccacttttctggtagcatgtgcttattttgcacctctgtgttacatctttgtaattcttgcaatatttcaaatgttttgttattattatatctgttatggtgatctgttatcagtgatcattgatattactattgtcattgttttggggcatcacaagccatgctccaaaagacaatgagcttaattgatacatatgtgtattcaaatggttccatcgatctgcccttcctccatctcaccctctcctcaggtctgttttctgagacacagcaatattgaaattaggccaattaataactctataaaggcctctatgtgttcaagtgaaagtaagagtcacacatctcttattataaatctaaagtgagaaatgattaagctgagtgaggaaggtatgttaaaagctgagacaggccaaaaggcccaggctggtctcgaactcctgacctcaagcaatccacctgccgcagcctcccaggtagctgagattaaaggcatgagccaccatgtccagcttctatgcattattttaaatggagtattgaagactctgttactgtagaactatttctaacttcaattctgtcaatatttgggtcacaggccttaatgtgattacacgctggtctgatgctcatggccaggacattttgttttcctgttggacataaacaatctcacagaatatcaacttcagaaggttaatctgagaccgtgataagtgcaaacaaaaacaagggcactttataatgttgtctaagtgcagataaaaaacaaggtcttgatgccacccacaaaatacttaataatcatattgctcctgctttctgacagcatccaatctaaagtcttcactttctgagatcctgtccgaaatcaaccaattaaagtccaaatcgtataatagtttctctctaactcctcccactgagatgacccatagtaccccattccttgctgcaatgtaattatatttacttacaagtgtgctcctggtggtctttaactgaagggcactgactgggtcactggtgaagttccccgcaggaactgagtcagaccccatctcagggccctgcacaagataggtacctgctctaaggcgtggaccctcgccacagccctggcccgtcttgacgggcgagggttactgtacttgtcccaaccgtacagatgagaaagctgagactcagggccagcaacccgggtcccagcggagcgcccggcacgcgccaacacttcagcaccagtcgcggtggccaccactgtgcgcggagatggctgcgacgcgtgcgcaggtaaagtccatccgtgccttgcctcccaccggcgccttccccggcctctggtttttgtccccgccagcggctccgactccatcgcgtcctcttccagtctagtgcttttttccagatctcgatcccaaactccctcctaccagaatctggacccgaatccacccattgtccgttttccgctgccgctggagagaatctctgaggtccccaggagagcctgcctgcacggaagagacgcctcctcggtatggccgcccccggagaggagcgattaagtgcagacctccatgttgctcttgagcctgagcggcttcagggagccatgtttgttactggcgggcgccgacctcactgagcatgtgcagccctggccgggcggcctcaaagttctgacatcacagggcggttcctgaagtggacatagttgtaagagctagttattttagacaatgcctctgtgatcagggactctaatctggaaataggtagtcggagaggtcggtgatgcagtctctggatcagagacctgagctatatggggttagagaggggccctgggcaggcgagtctctggggagtgtggtgagaatccttgtgtaagatgctgggaggaggtggggtcagggctggggtccgtgggccgacgggttgggggatggccagcgtcagggatcagtagtagagattctatgtgccctgatcgccagtggaggttttaaatacagagtattcatgagtttagcaatgttattcgcctctcattatttaaataatttgaagttttccccaataactagtgtcttagaagtcatgaaaatttcagaaaatgacaggtcttctgagttcatgatgggagttgggcagcagtcgcatacgagcacctggagagtccttgccagttctttggggatggggagctcttaagactgccctgagaccgccctttgacctcattgtggtcctttctagattaaatgctgttttccatgaccgtctctgttcttcccatacgcgaatggcaggcattcagatctccaagaatagaggattaggagagactccaccacctatgtcctcacagttaattatcgatttgtgtcagttgcccattttctcacttcctgtttgtgtgtcaaggggtattaataaatctttgcctatttaaagatattagccttggattttcaaatattgcatattttgacatgtaaaaatttgttagttttattttttcaaccgatctgacctgtatagttgggcttgaggaagcttcctcattctacatgttactatggattttctaatattaacacagggttgtattttttccatataactttctattgaatttctttttccatatgataggtggtgaaggtttagcccagtaaagcagagaggttaagaggttagattgggggctctggagccagacctgtgtagatctgagtcctggctctggcacttgaaagccgtgtgaccttggttaagatacttagtccctctctgccaaatggagaaataagggcacctaccccatagggtagttgtgtgattacacaagttaatacacttcaatcagtagcaagaaagtgaatgtcaagctgtatttgttcaggcagccatatggtagccccacgtccttagtaaactgaggtattgaagtatcttctttttctttcagaaaatatttgtcaagcaccttctgtgttcaaagaactgttctagagctttacatgctatggaggtctagaaattcacattatggtggcaggtgacagacaatacaaagagataaagcaattttatatagtgataagctagggaggagtgctaaaaggagccaaggtgtagtggtgactggaaggtgaccagggaaaccactgtagggtttctaagtgatgagatctgtgacaaatccctgtggtcagcagcaggcattggatatgtaactttattctgtcccattgatcttgtagtcaaccctggtctgttctgtattgttttaattacataatctttgtaataatctttaatacctggtggagtgctctgtttacttatttctgcgtaattaaccacccctaagcttaacttactcatggttctgcagggtgactgctctccatggttctaggtggttctgcatggggcctctcacatgtgctacagtcaaacattagccggggccacagtcatctgaaactcacttacatggctgacaattgatgttggctgttgcctggagaagacatatgtggcgtggtggaatggaatggtgactagattcaagaaagagcttcccaggaggaaggctaccaagagaccgaagtagaggcttcagtttcttaaaa

SEQ ID NO: 1883674 - DNA, 4001 bp, Homo sapiens
acaactctcagggtttccacaccagaaggatgaggaagctggggaacttaaacattaacactgtgatggttaatgttacatgtcaacttgactagactatggtgcccacatgtttggttaaacaccagtctagatattgctgtgcaggtatatttttagatatgactaatgtttaaatcactagattttgaatacagcagattaccctccataatgtcactgggctttacccagtgagttgctaaggacttaagagaaattgactgcctgcagactgcttccaggctcaagctgaaatgtcagctctatcctggatctccagcctgccccacagatttcggatttgtgaaatcctgtgaaccaacttactaaaatatctcttctctctgtctgtctctgtcttcacatacacacacacacacacacacacacagccttttggtttggcttctctggatagccctgactaatacaaatacccttggttgagggctccctcaggctaaggggtgcaggtgctgacaatagaaagtgtggaggcttgcagtgaaatgagaggagggaatagtggcaggccaccaatagtggctgttatactttgcctaccactgctgaagaccaaaagggatgagccaaaacaatcagcggctagggacagtggcttccagggagtcagtggtggagtctatttatgcaggagtcttatgtcaatagcagtgtcttggtctgaccaggcctcttacaaagtgattgggtccttggactcccagagcagcctcattctcacctattccttaatttctatttgctagtttcctatcagttctatgagctatcagttgccttccaatgaattccagtctttaaaactaatgaccagaaactatggttgttcattgcagtagggaactttggtatttatgcttttctaaaacattttgatcattcattactgctcctagctcatatttaacgcattcactttcgatttttagagtctgaatgttttagcctagattatcttatttaggcataaatcgttatgtttagtaatttttttgagatataggacagaaacagatactaatgtacattttatcaggaagtggcaacactttaaaccatggcagtaaacatggcagtgtgttcgtttgttcactcaattacaatttgttaaagcattactacagtaatgagtatttggaatatgacagcgaattacaccaagtccttgtccttacaaagtttagtttagagtggaaaaagatttaaaaaatgatgaaaacaataacaacaacaaaaaccacagcattctaccatcagggaagagagcataattttaaagggttgaatgaaacattaattaaacaaatgaggtatttcagcagagatgaatagcattttttacagtctcaattgagacactagaaattaaaaaacaaatcagagttttttgtaaaaaaagtttttttctagggcccatgcacagactgtacgttgccaagagggcaaacatcagtaaatttgaaaatagtttgagagaaattattcaaactgaaacaaacccaggaaaaaagaactttataaacatgaaagacgaagaaacgaagaggaaaggaagaggaaaaagaaaaaggatacgaagtgcaagtatacttcaggatcaaactgctgaaaatcaaagataaaaaggaaatattaaaggtagccagagaaacgcaacaggaagaaagaaaagaattaccatagagggaacggaggagccaagatggccgaataagctccggtctacagctcccagcgtgagcgacgcagaagacgggtgatttctgcatttccatctgaggtaccgggttcatctcactagggagtgccagacagtgggcgcaggtcagtgggtgcgcgcaccgtgcgcgagctgaagcagggcgaggcattgcctcactcgggaagagcaaggggtcagggagttccctttcctagtcagagaaaggggtgacagacaacacctggaaaatcaggccactcccacccgaatactgcgcttttccgactggcttaaaaaacggcgcaccacgagattatatccggcacctggctcggagggtcctacaaccacggagtctcgctgattgctagcacagcagtctgagatcaaactgcaagacagcagcgaggctgggggaggggcgcccgccattgcccaggcttgcttaggtaaacaaagcagccgggaagctcgaactgggtggagcccaccacagctcaaggaggcctgcctgcctctgtaggctccacctctgggggcagggcacagacaaacaaaaagacagcagtaacctctgcagacttaaatgtccctgtctgacagctttgaagagagcagtggtcctcccagcacgcagctggagatctgagaaggggcagactgcctcctcaagtgggtgcctgacccctgacccccgagcagcctaactgggaggcaccccccaacaggggcacactgacacctcacatggcagggtactcccacagacccgcagctgagggtactgtctgttagaaggaaaactaacaaacagaaaagacatccacaccaaaaacccatctgtacatcaccatcatcaaagaccaaaagtagataaaaccacaaagatggggaaaaaacagaacagaaaaactggaaactctaaaaagcagagcacctctcctcctccaaaggaacgcagttcctcaccagcaatggaacaaagctggacggagaatgactttgacgagctgagagaagaaggcttcagacgatcaaattactctgagctacgggaggacattcaaaccaaaggcaaagaagttgaaaactttgaaaaaaatttagaagaatgtataactagaataaccaatacagagaagtgcttaaaggagctgatggagctgaaaaccaaggctcgagaactacgtgaagaatgcagaagcctcaggagccgatacgatcaactggaagaaagggtatcagcgatgggagatgaaatgaatgaaatgaagcaagaagggaagtttagagaaaaaagaatgaaaagaaatgagcaaagcctccaagaaatatgggactatgtgaaaagaccaaatctacgtctgattggtgtacctgaaagtgatggggagaatggaaccaagttggaaaacactctgcaggatattatccaggagaacttccccaatctagcaaggcaggccaacgttcagattcaggaaatacagagaacgccacaaagatactcctctagaagagcaactccaagacacataattgtcagattcaccaaagttgaaatgaaggaaaaaatgttaagggcagccagagagaaaggtcgggttaccctcaaagggaagcccatcagactaacagcggatctttcgccagaaaccctacaagccagaagagagtgggggccgatattcaacattcttaaagaaaacaattttcaacccagaatttcatatccagccaaactaagcttcataagagaaggagaaataaaatactttacagacaagcaaatgctgagagattttgtcaccaccaggcctgccctaaaagagctcctgaaggaagcgctaaacatggaaaggaacaaccggtaccagctgctgcaaaatcatgccaaaatgtaaagaccatcgagactaggaagaaactgcatcaactaacgagcaaaataaccagctaacatcataatgacagaatcaaattcacacataacaatattaactttaaatgtaaatggactaaatgctccaattaaaagacacagactggcaaattggataaagagtcaaaacccatcagtgtgctgtattcaggaaacccatctcacgtgcagagacacacataggctcaaaataaaagggtggaggaaaatctaccaagcaaatggaaaacaaaaaaaggcaggggttgcaatcctagtctctgataaaacagactttaaaccaacaaagat

SEQ ID NO: 1883675 - DNA, 4001 bp, Homo sapiens
ttctttactccactgagatgtttgggtggagagaaacaaatctggcttacgtgcacgtccagtcatagtaccttcccttgaacctaattatgacatagattcttttgctcacatgtcttctgcagactctctccttatcatcaccctgctttcctactacattcctttctgctaaaataatgaaaatcataatcaataaaaactgaaggaactcagaggctggtgccggtgcaggtccttggtgtgctgagcgccggtcccctggacccactgttgtatctttacactttgtctctgtgtcttatttcttttctcagtctctcctcccacccacccaactagaaatactcacaggtgtggaggggcagtccaccacttcatccaccttctgtcatattgaaagtaacatcatcttcttccctccaggatcgtgggaacaatatccctgggaggtttccactttctgccatgtatgtagtcatatcaccccctccgccgtggaatattattaaggaccatctcacacgggggtgtatacttcctccgatattgggagtgacatcaacctctcggtctctgaatatgaggaagaaaatcacagggcgggtgtacacctcgtgctctacgatggggagtcatatctgtctattacggggagtaatatcatcctctccctttcaggatataaataacgatttaacaggctgggtgaacacagcctgcgatgctgaaattattatcatcctctccccctcttcctcccctggctcttaggatgcccatcgcaggggagcgagccaccccccgcaaggcggggactgagccagcccctgttccccccctggctcttaggacccccgtcgcaggaaggggaggcactccccgcgaggcggggactgagagacagcccccctaagccttctggctcttagaacacccatcacagggcggggaggcaccccccgcgaggtggatacagagagccagcccctcttccgctcctggctcttaggacccccatcgcagggggaggaggcacccctcgcgaggcggggactgagagccagctcctcttccccccgtggctcttaggatccccatcgcagggggtgaggcaccccccgcgaggcaaggactcagagtcagcccttcttccctccctggctcttaggacgcccatcgcagtggggggatgcacccctcgcgaggcgcggaattagagccagccgctcttcccccctggctcttgggacccccatcgcagggtggaggcaccccccgcgaggcggggactgagagccagctgcttttcctcccctggctcttgggaccccttccctccctggctcttgggacccccatcgcaggggggggaggcaccccccgcgaggcggggactgagagccagccgctcttccccccggctcttgggacccccatcgcaggggggtggcaccccccgcgtggcggggactgacagccagcccctcttccctccatttttcttaggacccccatagcaggtggggaggcaccccccgtgaggcggggactgagagccagccgctctttcccccctggctcttaggacccccatcgcaggcgggggaggcaccccccgcgaggcggtgtctaagagccagcccttcttccccgcccacctctgaggatccccatcacacgggggaggcacaccccgcgaggcggggactgagagccagtccctcttcctcccgtggcttaggacccccatcgcggattctaagatccttaggaccgacctggaggactgtgggtattaggtgtccaagaagaaaattcagatctgccgacgaccgcaggtaccttacttgggatttactattcgacaggtgtccgaaagcagcccgggatccgaaagaaagcaggtcatttgcaatctaccgaagcctaaaggcacaagggtggtgagagaattcctaggagctgtggggttttgtagactgggaatcccaaactttgcagtattagccaagcctttgtatgaggtcacaatgggggcggggaccgggaacttttggaatggggattccaacaacagcaagtctttcatgacttaaaggaaaaacttctgaaagccccagccgaggggctacccgatctcacaaagccttttccattgtatgcgtcagagagaaaagatggcagctggacttttaacccaaactgtggggccttggctgaggccggtggcctacatctctaaacaactagatagggattcgaaaggatggcccccctgtttgagggccttcgcagcaattcccttgctagaaccagatgcaaataagcttactcttgggcaaaaccagaacagaaaggccccccatgctgtggtgactgagagccagctcctcttcccctactggctcttaggacccccatcgcaagggtgcgaggcacccccggcgaggcggggacagagagccagccccacttcccccccttgctcttaggacccccatcgcagcggggtgaaggaccacccgcgaggcagggactgagagccagcccctcttccccccctggctattaggacacctatcgcaggggggagaggcacccctcgcgaggtggggactgagagccagccccttttcaccccctggcttttaggacccccatcgcagcacggggaggcatcccccgcgaggcggggactgagaaccagcccctcttcccccgctggctgttgggaccccaatcgcaggggggggaggcatcccccacgaggcgtggactgagagccagcccctcttccccccctgtctcttgggacccccatcgcaggcggaggaggtacccccgggaggaggggactgagagccagcccctctcccctccctcggtcttgggacccccatgggaaggggtggaggcacctcccgcgaggcggggactgagagccagcccctcttccctccctggctcttgggacccccatcgcagtggggggaggcacctcccgcgaggcggggactgagagccagcccctcttccccccccccggctcttaggacccccatcgcagttgggggaggcaccccccgcgagacagggactgcgagccagctcctttccccccctggctcttaggacccccatcgcaggaggaggaggcaccccccgcgaggcggggactgagaggcagcccctcttcccccgtggctcttgggacccccatagcagaggggggaggcatccctcgcgagtcggggaataagagccaggccctcttaccccactagctcttaggacccccatcgacgggaccccccttgatgcggggtgtaatagccagcccctcttccccccctggctcttaggacccccatcgcaaggggttgagacaccccccgcgatgcggggagtaagtgccagcccctcttccctccctggtttttaggatccgcggtggactcacagcctgtttacgatattcggagtgatatcatctccccctctggaaattataaactatttcacagatgggggtagaccctcggtgtgcagagggtgtacagccgtctgttttgggagtaatatcatcgtcttcctccctgaatattaagaacagtatcacagctgtgtttctactgcaggtgtgattgggcgtcacatcctcctctcccacgtggaaattagaaccgatatcagtgggggcgtgcacaccttctgtgatatttaaagtgatatcatcctcttccctccaggatcatgagaacaatatccctgggggtgtacactttctgcgattttgggagtaatatctccccctccgccttggaatattattaaggaccatctcacacgggggtgtacacttcctgccatattgggagtaatatcgacctctcggcctctgaatattaggaacaatatcacagggtgggtgtacacctcctgctctgttatggggagtaatatctatctattacggggagtaatatcatcctctccct

SEQ ID NO: 1883676 - DNA, 4001 bp, Homo sapiens
cggagaacggtccgaaggctggtttggtcatccgagatcattaaaggtggctgaccctaacaatatgtacaaaaatataaaatgtaaattaaaaatacaagcaaatttctttttttaaagtacttttaagaaaaaaagcaggccgggcgcgatggctcacgcctgtaatcccagcactttgggaggccgaggtgggtggatcacgaggtcaggagatcgagaccatactggctaacactgtgaaaccccatctctgctaaaaatacaaaaaatcagccgggtgtcgtggcgggcgcctgtagtcccagctactcgggaggctgaggcaggagaatggcatgaacccgggaggaggaacttgcagtgagccgagatcgcaccactgcactccagcctgggtgacagagcaagactctgcctcaaaaaaaagaaaaaagaaaaaaagcagggccttggaagttttggttgttttttcctcccctgttgcaaattcttacggtttaggttgggtggtggagagtgtgtgtcatctgtgggtggcactgcccatggtgggggggtaccgagctatactggaaggtgactacgtttagattctgagacaggaaatggagggtgaataggtcatggcggccttttttttttagtttaacttttccttttttgctgtctagtcatccttgtcggtcttctgcttcttggtatcgacatcatcatcctcatcatcttcagctgcccgcttgcctgtagcagactcagcttcctcttcatctccatcctcttcctcaccatcaccttctttttcctcctcctcttcctccccactttcttccccttcttcatctacctccttgtcagcctcctgctccccattttcctcattagcattcccgttagcaggggcgtctcttccattttccgcctctttcacaacttccttcttctcctttaagtccttggcaatgatttcagagctggtgtctacagctgcatctgacatggtggggcacgccggtgatctgatgcaggggattaaaaagaaaacgagagttcagggactctggcgataaagctgccagagtctgcggtggaggcagccgcggcgagcaaggagctggacaaggaacaatgcaaagatggcttttcagagcagccaatcgggatcttgaaactattaaggcctaaaatcattagcactgttttctccctctaagacatatgtggcttttcactttattttcagctgaatgcttttgctgttttgggtttagcaagcttttggtcttaaaaatatccaacaatgcagttaagaggccagatgactttatgcatgaaacattgttaagatgaggaattttcccatagaaaggtgaccagatttgaggaaattatttagtcagtataaacttttctctggatgtaaacagtacagattttactttcaggctttcctaataaagtttctaacagacctggaaaggagaaggaagagtaacatctgttgcaaaaccccagttacgtgtaggacaaataagaatctgggagagaggtgacttgcccaagtgacacaccgatttgggatatattagggagaaccattaattcttgtccataaggcttgatttagaattgttttttattttaatggaagttctgtagaaagaaaggaatacttggaaaaattgagccacttgtaaatacttggaagatgagaaaagagaatggtttaaaatcttcttaccatatccctattctcctcctcttcctcctcatcatcagaatcacagtcagtcagtcaaggttggcactttattagtgtgaacaaggtcagtatgaaaacacaaagtatagggaagttgtgacacccaatgtgtacaatttctaagtcacacctctctgtttcacatttatttatttatttctcagtttcattttaatatggttataggaccaccaggttcgattgcctgttgcatggtaacaaaccaatgcaccagaacagtggagattgcagcagagaaagagttgaataactgtagggcagccgaatgagaagacaagacgagaggaaacttcaaatctgcctccctgagaggtttggggatggggattttaaggggtctggacaggtgatgggctaaagtatggggattgctgactggttgagaagtggggagtgaagtcatgggaccaggagatgctgagtcgttttcttggtaggggttttcagacggttggcatcagccattctgctggaattcaggatctgaaaaacaccttaagcaattcttgggtaaaatgtccagtgtcagattctatctatgggagcaatgggggagcaggtggtcagtgtgctgcatgaccctcgattagttagcagctgcagggaaatgagtcagagcacaccagtgcatgctggttgatgcctgactacaatacaagcctaaagcctggcttgtaattctcattaaccctgtgagggtgggttttcccttgggcttttgccccattctaagcaacacttctatggatatttttgactacatgttttttgtagtgcacactggaaaatattctgtgtgctcaaattaatttttttccaagactgtttctcattttaatatcccagagcttctcttgcattttaggctgcaatgggtgaagaaagttatatcttcattcctttgtcaaaaatttactgagtgcctgggcactcaagtgctgtaatcccagcactttgggaggctgaagcaggaggatagcttgaacccaggagttcaagaccagcctggacaggaggatcacttgagcccaggaactggaggctgcagcgagccatgattgcaccactgcactccagcatgggcaacgcagcaataccctgtctcaaaaacaaaaaaaaccatttattgagtgcttactcaatggtagttaggcactggcctgggcactggaaaacagagaaatataacatgtccccatctttctcagcataaagcttatcagactgtgtccattgtgtttatttaagaatatatttccaatactagtagttctgtttatagctatccatcttacctcacccccttcccccagataaaaaataagcaatgttcaattttaagacactatcaaggccgggcacggtggctcacacctgtaatcccagcactttgggaggccaaggtgggcagatcacctgaggtcaagagttcgagaccagcctggccaacatggtgaaaccccatctctactaaaaatacaaaaattagccgggtgtggtggcaggctcctgtaatcccagctagtcgggaggctgagacaggagaatcgcttgaacccgggagatggaggttgcagggagctgagattatgccattgcactctagcctgggcgaccaagagtgaaactctgtcttacacacacacacacacaaaaagacactatcaagttacagaaatcaaggcagtgtggtattggagaagacttagacatatagatcaatggaacagaatgggacccacacatagatcctcacaaatatggccaattgattgttttaaattgcggtaaactacatgtaacataaatttaccatcgtaaccatttttaagcatacagttcagtatggtttaatatattcatattgttgtgcaactaatttccagaactttttcgtcttgcaaaacaaactcgatttccgttaaacaacaactgcccctttctcctttccccagctcctggcaacccgcattctactttctctttctataagcttgactatgttaggtacctcatataagtaatcatatagtatttgtgactggcttatttcacttaatgtaatgtcctcaaggttcatccatttgtcagaaattctttcctttttaacactgaataatattctctcgtttgtgtatacaacatcttgtttatccattcattcatgcatggacacttgggttccttctaccttttggctattgtgaataatgctgct

SEQ ID NO: 1883677 - DNA, 4001 bp, Homo sapiens
gagatcgtgccagtggactccagcctgggcaacagagggagactctgtctcaaaaaaaaaaaaaaaaaaaaaaaaatccccaaaaaacaaacaaacaacaacaatgaaaaaaagagaatacagactccagaaacagagccacaaataataaaaagtcaaatgtttccaaaaaatggtgccaatgcaattcaattgagaacaaatattagaactctcagacataaacaaaaataaacaaccttgatattgcgggtgaagggagaactctgcctgtactagcccaggagagggaacagataaggaaagattccccattttgaggctgtttgagatcacctgattttttttttaattgtgttacaaaaaactaactttaagttttaactgttttcaacagggaaaataacacactcctcggggaaaggtgaagggttgagaagacaggccctgggtaaaaatttttacaacacctggagttgataggcctacctaggagagaacacaggcactgccacaccagcacaggggacagctgctgtctggggtcagcagaccagttcacacgccacacaaggttgctatagatccaaatcataaaaatcttccagctcatcatgaaacaagtcccactcatcttcagagtctgccagttcatcatccccacctgcagccaaaagcataagcaacatctcgcccacctcaagaggtgacaacctcttcatcattgtcaaaagggttgctgctatctctttcctcagtgagttctcagaagtggttccttcattggacccagtttctgcttgatgttcccactttctgtctctgtggcttctctgtaaggccatcagggtacgcatgcttgtaaaaacaattccttccaaatgggcagctcccacgtccttcatcaaaatacctgcaagccttgttgctcaatgcctccttgtatttctgaatgagtttctgcttctcttctttctccacccaggactcacttggaatgacaaagttagatgtgatctggcaatctaggcaggactttataatcttgctctgaaattgcttagcactgctccacttgcgaatgcacttgagacagtaggcatggttgcagttggagagaatcccgaagcagcactcactggggtttgctttctcatagaccacctccatgcagatcccatacaccacgtccttgctgcgctgcacagcaagtgagagctccatgtccttctcatgggcctcaatgcacaattttatatgctgtgatctctgggcagcagccatgggatgcaggacctgcagtccacacatgtcacatgaatctccatggagaggcacacagttctccccatctcagcactctctcactgcagcacaggggcacagctgcttcttggtttccacagcagtttttctctttctctgattcttccttggtcactgagtcctgcagaggtgcttcagtgcaggaaggcacagctgaaaattttcaagagggtggtaaaggtccaaactaataagacagatacatgaactacaagggaactgaaaatctaatatagccaaagtagggttgcccaggaacaaactcaatagcatgcacccagtcctctgaacctgctcctacaattgcaaagtttgaatttcttgactcagcttcacctgtattcatttcaacaagtggtccgactaacgacaagagacttgaggaagcagcaagggatgatattgtagttagctctgtagcagctgcttcttcctgtttcaatggcttgctatgttcatatctgcagcggtctccataaatacagtaccctcactgaaaatacttgcacactacaccacacggactgtcagagaggtcatgggagtagcgacagttatcaccttccttacaaaccccagcataaaatacctgcaggtgacctgtttaatccagctgcctcccctgctgtcgctgccgccaccccctccgcccatccctggggatggggtggtgaccaagatcagctgatttagctggaataggatggctggctgactccacaggagaatttagagtgagaaagagaaaatctgagtcatccaaaacatgtgaatttgccgtgaatgagcttccactgtcagttgcgtcacacgtaggcattgaggctaccgatcagaaaatataggaacagcctttctgccttgcaggcagggctgctggccctattcactctctggccttcaggcaacaccagagagcagctccagccagttaccatcaattgccaggagatactagaagccggctgctgaaagactaaagacagaataaacaggtttctcacctgaacagaaggtggccatcagatgcttccacatggacaccgtttagtcccatgggagtgtagctccagcaggagacctagagttgtctttgtgcgtagacacttgtccaccaagggtcccaagttgggaaagggaaaataagaagggagagtgtttcccataaggggagagtcccccatacagtcatgcgtgagtggcaactatctgggctggtggcacaggagtaaaaagaatttaccaagacagttgtaggtaaagaaaagcagatttattagagaaggtatgaaaatgcattgcgagaaagcaatggattgaatcagcaagagagaagctgactgctgggagacaaagacttgctgcagactttatagaatggaatttgggctgatggataacgcaactgtagcaggaagctaacttgcgtttttctgtctgctgaggtgtttgatgagaaattgaagcatttgatgataagcaggaaatctgtcaattctatacattatctacacaggagggctatatgtcctgggccataaggagtacagcagacttacagtttatctgctttctatttttgtttctatgtcctggaccaggaggaaaggcagaccttatagcatatctgctttatttctttgctttcccctggtcacgccagccactccttttccctaattaggactccacacttgatctataccttgtaacaaaaataacaatgaattcaaaatgatcacagagggtcagccatggtggtggctcatgcttatagtaccagcatgttgggaggtcaagatgagagaattgctttaggccaggagatcaagaccagcctgagcaatgatgtgagactctgtctctacaaaaaatttaaaaatcagccaggcatagtggcatgcacctgtagtcctaccctagctacttgggaggctgagggaagaggatcactttagcctaggagtccaaggctgcagtaagctatgatcatgcctggatgacacagaggaagaccctgccctctaccaaaaaaaaaaaaaacatagacataaatgtaagacctgcaactaaaaaacatgggaagaaatctttgtgaccttggtttaggcaaagatttcttatacatgagcaaaaaagcataagaaaaaaaggttaaagtttttgaaaacttgattgattaaacccttcttttttaaagacacttaagatatgaaaagattgtctttcacagcaacacagatggaactggaggccattatcttcagtgaaataactcagaaagtcaaataccacatgctctcacttattcatgggagctaaacagtgggtacacatgcacagacaaagtggaataacaggcccagtgcagtggctcatggctgtaaacccagcactttgggaggcagaggtgggcagatcacctgaggtcaggggttcgagaccagcctggccaacatggtgaaaccccatctctactaaaaatacaaaaattagctgggtgtggtggcaggcacctgtaatcccagctactcaggaggctgaggcgggagaatcacttgaacccaggagtcagaggttgtggtgagccgagatcgcaccactgtgctccagcctacacaacaggagcgaaactccgtctcaaaaaaaaaaaaaaatgtggaatatcagacact

SEQ ID NO: 1883678 - DNA, 4001 bp, Homo sapiens
acatttccactcctatcattaaggaagtaagaaattttataatcaaaaacaatcagttacatgcatgtttctgaaaccatatgtctattttgcaactcttattgtgttagtaaatctaagggctaacttttgagtaagataaggtcttattaatttatttttttaatctaaaatagatttattgcatttcacgcagtttgaaggccatggaaaggggactagcacagtttttaatgcatttaaaaaataaaagggaggagggcagcaaacacataaagtcctagtgtcctgggtccctgggagaaaagagtgtggcaatgaacccacccactctccatggggaataaatctgtctcttaaatgcaaggaatatttccatggcctctggatgcaaatacacagagctttggggtaagagcaagggatggggagaggaccactagtgaaaacgcagctacacatattgacctaattcaatctgagggtagaacaacatggcaaatcttgggggcagcagctgttccaagggtcaagaaatatcgtacacccacggggagatttgcttctaaaaagaagtggcggtgagaaacaaaacaaaacaaaacaaacaaaaggagaaatatttcttcagccacactcttcaagaaaatgccacaaatatgtgatttaatattttaatttcatagcattggacacacagctcaacatattgaaatattgattccttggagaaaaaaggaaacaaaaaatattgcatctttctgttggagaatctcggcccccaggcatgaggcctagtgcgccattgtcctagcctgcaggaggagctgaggtcggccgggtcctctggggaagaaggctgtgttcatgacctggggctgtacggcaaaaattgtgttgagtgtcctcggccttgccagctccggccctcagccgccagtcacccggggggcctgcccatcagagggctggttgactgactggaaaaacatgggctgggcaggtcctggcccgcaggtatggatacttgctggatctggtagagctgctgtccatctgtgaactggctgaactactgctgtctttgctggacctctgtctgtgtaatcggttgagcgctggtggcaagtgtctggatctgtccctgcagaacgtgggtgcctgatacagactgggctaagcggatacactgcagctggccagccttcagctgcaccgggatctgctggatctctcctgtgttagtgaggatctgctacatcacctgcacggtccatccagtaccactctgggcctactgggcttgaccctgtggctgggcctggacaatctgcacctgctgaccttctccaacctgcgtcgtcacgggcgtggtctggccctgctgaagctgtgcgatgatgatctgcccaggctgcatggtggtcatggagctggcggtggtctggccttgctgctgtccctggacttggacgggcggtgggctgctgagccagcgtgaaatagtattggactggctcagcaggagttacagactgcagcacctcctcctgacactttggaggtttcagttcatctcttagaacaatatcgatgagaaaatccaattgatcaaatttcgtaattgccatggcgacataagtccggcagttgttatcctctgtgtgaatccaggctcgaagagtcaactctgtgataaaaaatctgggctgccctggcaaagagcacaggggcctctgcactgatcatcttcacatcttcatccagtttcataatcttcttaatacgagccagtgggagttcctgcattcagaaatctttcactgctaaattccagatttcttccatgacccgaagccagaaggactttaggctttgctgggcatcactgcggctagtaccaccaaatcctccttctgtggacatttcgacaaacgcctcttcagggagtccaggaagagcaggagccgccctggcgctcctgcggagtcgggcactgcataggctcaggcaccgcggaggtgaggggggaagcgggagtctcggagaacgcagcacgcgcgaagctggcgcataaacgagatggcggccacgccgtttgcacggtctccccttttcccctccccctcccctggcgccccgactcctataattaatttcatgtaagaggtattctgagagcgtagttatatcaaaaacttacctgcgttatttgcgtgtgtgtgtgaaaaatgaagataaagagcatatttaaaagtaaaatctactttgtgggaatagaatttacttttcacttttatttttccttcccttttccaatgtttgggatccgcagaggatgagtgctcaacgtacagcagagaggaggataaagctgtaagcagtgtctcagatttgattgtgatctctctcttaaataatgtcctcattgtctgattgagacagaaactccccacctccctattaaaaattttttttataaaccctgacccagaggtttctgaagcctccattgataacacacaatggcctgttcttctaggatgtttcatggcctttaaggaaggctctgttcgcccgcatgatgaaagggtgagagatgagcaaggagaagccgaggttcacccgcctcgccctggctaggcagaggactgtgggcaagtgcaggaatccataaaggacgagctgggccgagggaagccacgtttgtatctcaaggacaagaaataggcaaaccttcacaggaaatatttcccggcacctttcagcttagaggacagaggaaagaggaggcaagaaggaaaagggaaataaagtcacagaagggggaggaaagggagggaacctaagcaagcaccaccatgagccagagccagtgttcaaggtggctttgccccttttctcgtcgtgggctttccgatgccagtcctctccgccctggcctttggctgaggccatttttcaatggtctagaggtgaagtatcccaagcggatgtgtcgtgctgagctgtatttgcactctctgtcagcttggcctagtgcccacccattgtgaaggccctcactctaatccctgagcctgtgaatgtgtcaccttacatggcacagcggactttaccgatgtgagtaaacttacagtctttcagattagactgggctcatctggattatccagatgagatacaacgtcactggctttgaaactggagggagggaccacaagccaatgggggaatgtgggctgcctctaggggctggaaaaggtcatggattcttcccgcattggacttcagaaaggaaagtagccccgctgaaacctcgattttagcccagtgagacctatgtcagacttctgaccgacagaactataaaataataaatttgtattattttaagccactaaatttatggtcatttgtggcagctatggaaagctgatatattcattaacagatcttcagaagagctagaggccagaggccaaaaaacacttcatagtctgcttggcagctaatagcaggaaacaagcattaaattgtgtgtcctgtgcttctctgcactagtcccactctgcttagttataaagggctgtaatgagaggagggagctgaaaaagaactgaaagtatttaccgacgtggagaggaaggagatgacaaaggtcagcataaatggggctgtctcccatcttttagggcaagtaaaaggctggtgagccatagagttgtgaaaattatattttaaaatcaaagttgggaaagatttcaaagttggattacttttttcaagctctgggattgtaaatatattaaggtgataaaataaaatggtgcatgtgagatctctttgaaaactgtaaaatataagatgtagtgggctagatagttgtctccaaaagagtaagtccgggtcctaattcctagaacatctaaatggacctcatttggaaaaaggggctttgccaaggtgatcacattaaagatcatgagaaaaggtattct

SEQ ID NO: 1883679 - DNA, 4001 bp, Homo sapiens
tggaacatctgcaattagttgacagttatattgaggcttggaaaccagtctaaaaaagttatgctttaaatcaacggcagttgtcaatgagcctgtgaaggaatccttgctagggtcctcaggcttctactgcaactcatactgataacaacaaaaagagaagcctcccaagcagaaggtcagtctaattcaatcacttaaggcagaattatggtatcaagtttccacatcactgaatgaccatgggtgtagaggagtgtaccataaaataactgtgggtgttagacatttaacaagttgttttattcctaattgctggcatttgcctaactgttttcttaattctaatttatgtttttatgttccagtgtgtttacacagcccatagttcccaattgcctttatttgcttaagtgtttctttatttactttttttttttttttttgaaaagaagtctcactctgtcgcccaggctggaggggagtggcacaatctcagttcaccgcaacctccacctcctgggtacaagtgattctcctgcctcagcctcctgagtagctgggattacaggcgcctgccaccaagcccagctaattttttgtatttttagtagagatggggtttcaccatgttggccaggctggtctcaactcctgaccttgtgatccacctgcctcggcctcccaaagttctgagattacaggcatgagccaccggcctatttacatttttatatatgttgctttgcttacataactcattgttcggagtgggctagaaataaccataaatccccattgctaattagcctcatcctcatgactgattagtcaagattatgagtctagaaggagggcagagaggagtcctaatagtgagtcacaggattattgaattttacagctggaaggaatcttagaatttaaggcatctttcagttagaattctgtggttttgcatcctcagcgttggagaattatgaaaggttgaccgcttgctcctgcgccttttggcaaaaatgcttaagaatttggtgacagctttaaaaaacaaattaagaataaagaaaaaacccaatcaatgacgattataagtaacccataatgggggcttcaaagaagaattggaaacttgacatatcaatggggtatagaagagcagagaatattaatgaacatgaagggggttcttctttggaggtaagtaagcagagtggattttttggaactccctcctcagcagctgtgcagtttgtaaggattttagcttgcctaactgtaagcttagctattagctttgcagtggggagtatttaaaagtacacacaacatatgaaggaaagaacctggaaccgagtagcctgcttcattccaagaatccatctggcatttaaagaactgcttgtcctacattaaaccctgcagagtaagagccatttttcatatcctcatacccctatttttggtttcaggtaagacagcttactgagtttggagaaggaacaaagagacttttccgaaccaccgaaccaaaggactcatctagggtgagctcaatgaatctaaaatcgggaacacacattgcagcccctgtttgggaaatcagcttaagagcaatctcaagtctccacaagaggcggaggtccatattccaaaataatgtgagccttcagttatttgtaggtagaattcaatggaagaaggggtgttatagatacgaaaaatcgtggctggcgttaccaacattaaatgactcgtggtgatggggtaagttgacaagtgaaatccagtctcttcctaaacaaacgtatctttgtaatgaagagctcgtttttgcagcttcagtacatctggaggcatcgaatagcaaacgctgccaaaggagtagtccctggattatcaggagttgcagagtgtgtaaagtgttgtaaaccttgaaattagtcctggactgaaggcactttccctcctcccagactcgcttctctctgacacatttcccctttcaatggaaagtctatggcagtcaggtccactcagctcagacttcaagtatgtgagaccacaggttcccaccttaactggtcacccattgagggacagcacaagaccccggtgctggcgccaacgctgagctgcgccctctcggttaccatggcgaccgcaggcggggcgaggcccccactcgccgcttccccgcctctgcccagaacctttcgaacgctccaattgggacgaccctttcttgcctctgtcccgccccattcggctctaagcgctttgcgattggcccgggacgagcggcctggtacccagagggcaccacctcctgacaggaagagcgggaaagtgcaccaggagctgtccgaggcgtgaagctcacgggcgcggcgggggagcacacggttggctttgcagcgagttgcccactgtcccatacacaaccccccgctcccatgactgccaaaagcatggagcaggagtcggggtgcgggcacaccgtttgtgggccggcccggtctatcccggggggctaggacgcgacgaggttggagcgaggatccggcggcacactccggagcgcggagtatcagaggccagagggaacgggccgggccccgggggcggtgccggcggcggcggcgggaggcgcagagcccaatgagcgcgcgcaccgccccgggggcggggtctgaggagcgctcccccgcccttgccagcccccgtccctccccccggcgcggggccgcagtgagtgagtggcactggcagcctgtcaatccctcggcccagcggccttccagcccggtccgcggcggctgctggctgggtgcgcggctccggcggcggcggcggcgacttctcccgccctatccatcggctgtccgcccggcgcgcggcccgccggggccctcctccgggctcagcgcccccgccgcctctgcccgcccgctcccaaactttcctcctccgccccccctcgctccccgcggcccgcccgcaggcctcctcctccgccgccgcccgccgccgccgccgctgcctcccccggggccgccggggctcggatcccgcctggccgaggcggcggcggcggccgaggagggcagtgcgcaggctggcgcggggggcggcgggcgtcccggcaactcggcgggcgctgaggagcaagttgcgcggggccgcccggcggggcgcgcggcggcgaggaggcggcgcggcggccgcgtgagggcagcgggcgccgccgcctccgcctccgccaccgccgcggagcccggcgcttccgcccgccgcttctcctcagcctcggcggcggcggaagccggagccgggcgcccgtcctcatcgcctcagccgcgggccctgccggccgggccgccccctccccgcgcgggcggggagcgcgcggccgcctccccctccccctccccctctttcttctcctccctcgtcgccgccgccgccgccgccgcctcagccttcgcctcagccgccgcccgctcccgcccgcgcgcggcgggatggacgatcaatccaggatgctgcagactctggccggggtgaacctggctggccactcggtgcaggggggcatggccctgccgcctcccccgcacggccacgaaggggcggacggcgacggcaggaagcaggacatcggcgacatcctccaccagatcatgaccatcaccgaccagagcttggacgaggcgcaagcaaagttggtgtcgtctcattaagcatcttttgtgtgtgtgcgggagccgggcccgcggccgagtcgaggcccggggtggcgcccggggctagggccgcagcccccggcggggaactttctccgaaagccggccgcccgccccggcctcggggggacttgcccgcgccccccgaagcgggcgggagtcggcaaagttgctctggggggctcgggacggactcggtgcggcgcggattccgtggcgtcctttcccccgtcctgcccctcgcagcccggcccc

SEQ ID NO: 1883680 - DNA, 4001 bp, Homo sapiens
taccatatggctgcctgaacaaatacagcttgacattcactttcttgctactgattgaagtgtattaacttgtgtaatcacacaactaccctatggggtaggtgcccttatttctccatttggcagagagggactaagtatcttaaccaaggtcacacggctttcaagtgccagagccaggactcagatctacataggtctggctccagagcccccaatctaacctcttaacctctctgctttactgggctaaaccttcaccacctatcatatggaaaaagaaattcaatagaaagttatatggaaaaaatacaaccctgtgttaatattagaaaatccatagtaacatgtagaatgaggaagcttcctcaagcccaactatacaggtcagatcggttgaaaaaataaaactaacaaatttttacatgtcaaaatatgcaatatttgaaaatccaaggctaatatctttaaataggcaaagatttattaatactccttgacacacaaacaggaagtgagaaaatgggcaactgacacaaatcgataattaactgtgaggacataggtggtggagtctctcctaatcctctattcttggagatctggatgcctgccattcgcgtatgggaagaacagagacagtcatggaaaacagcatttgatctagaaaggaccataatgaggtcaaagggcggtctcagggcagtcttaagagctccccatccccaaagaactggcaaggactctccaggtgctcgtatgcgactgctgcccaactcccatcacgaactcaggagacctgtcattttctgaaattttcatgacttctaagacactagttattggggaaaatttcaaattatttaaataatgagaggcgaataacattgctaaactcatgaatactctgtatttaaaacctccactggcgatcagggcacatagaatctctactactgatccctgacgctggccatcccccaacccgtcggcccacggaccccagccctgaccccacctcctcccagcatcttacacaaggattctcaccacactccccagagactcgcctgcccagggcccctctctaaccccatatagctcaggtctctgatccagagactgcatcaccgacctctcctactacctatttccagattagagtccctgatcccagaggcattgtctaaaataactagctcttacaactacgtccacttcaggaaccgccctgtgatgtcagaactttgaggccgcccggccagggctgcacatgctcagtgaggtcggcgcccgccagtaacaaacatggctccctgaagccgctcaggctcaagagcaacatggaggtctgcacttaatcgctcctctccgggggcggccatactgaggaggcatctcttccgtgcaggcaggctctcctggggacctcagagattctctccagcggcagcagaaaacgggcaatgggtggattcgggtccagattctggcaggagggagtttgggatcgagatctggaaaaaagcactagactggaagaggacgcgatggagtcggagccgctggcgggtacaaaaaccagaggccggggaaggcgccggtgggaggcaaggcacggatggactttacctgcgcacgcgtcgcagccatctccgcgcacagtggtggccaccgcgactggtgctgaagtgtcggcgtgtgccgggcgctccgctgggacccgggttgctcgccctgagtctcagctttctcatctgtacggttgggacaagtacagtaaccctcgcccgtcaagacgggccagggctgtggcgagggtccacgccttagagcaggcacctatcttgtgcagggccctgagatggggtctgactcagttcctgcggggaacttcaccagtgacccagtcagtgcccttcagttaaagaccaccaggagcacacttgtaagtaaatataattacattgcagcaaggaatggggtactatgggtcatctcagtgggaggagttagagagaaactattatacgatttggactttaattggttgatttcggacaggatctcagaaagtgaagactttagattggatgctgtcagaaagcaggagcaatatgattattaagtattttgtgggtggcatcaagaccttgttttttatctgcacttagacaacattataaagtgcccttgtttttgtttgcacttatcacggtctcagattaaccttctgaagttgatattctgtgagattgtttatgtccaacaggaaaacaaaatgtcctggccatgaacatcagaccagcgtgtaatcacattaaggcctgtgaccaaaatattgacagaattgaagttagaaatagttctacagtaacagagtcttcaatactccatttaaaataatgcatagaagctggacatggtggctcatgcctttaatctcagctacctggaaggctgcggcaggtggattgcttgaggtcaggcgttcgagaccagcctgggccttttggcctgtctcggcttttaacataccttcctcactcagcttaatcatttctcactttagatttataataagagatgtgtgactcttactttcacttgaacacatagaggcctttatagagttattaattggcctaatttcaatattgctgtgtctcagaaaacagacctgaggagagggtgagatggaggaagggcagatcgatggaaccattcgaatacacatatgtatcaattaagctcattgtcttttggagcatggcttgtgatgccccaaaacaatgacaatagtaatatcaatgatcactgataacagatcaccataacagatataataataacaaaacatttgaaatattgcaagaattacaaagatgtaacacagaggtgcaaaataagcacatgctaccagaaaagtggcactggtagacttgcttggtgcagggttgccacaaaccttcaacctgtacaaactgcaatatccgagaagcataataaagtgaagtgcaataaaacaagttaagcttgtatatgtatgcatgcacacaccagtacacatccacctatccacacacaaatctttgtactaacaaagcctgtattttcaattccaacaatacatcatttgtaccttaaaaatctctgtcatccttgtagtgtccttttctgtctttgttatcagggtaatgctggcctcataaaaaatgtttggaagtgttccctcctcttcaacttttggaagagtttgtgaagaaatcgtattaattcttcttcaaacatttggtagaattctccactaagctatctggtcttggattttcctttttcaggagctttttgactactgactcaatatttttaatcattatttatctgtttttattttctatttcttcatgtttcagtctagtggatgtatgtttctagaaatttctctattctaagttaaacaatttgttgacacatagttgtttagagtagactattattatcctttgtatttctatggtaccaattttaatatctccttttttgttctaattttatttacttgagatttcttttttcttggcctagtgagaggttggtcaatttttattatcttttcaaaaaatcaactcttcgtttcattcatcttttctattgtttttctagtctatttcatttatttctgctatgatctttgttatttccttctaattttgggcttgattatttttttctattttttgaggtttatttgggatcttttttctttatttagcacttatctgtataaacttccctctcttagaacggcttttgcttcatctcatcagttttagtatgtcgtgctttcattttagtttgtctcaagatattttatttcttttttgatgttttctttgatctactggttattcaggagtgtgttggttgatttccacatatttgtcacttttctaagttttctcctgtttttaatttcagtttcatgccactgtagtcaa

SEQ ID NO: 1883681 - DNA, 4001 bp, Homo sapiens
accatatggctgcctgaacaaatacagcttgacattcactttcttgctactgattgaagtgtattaacttgtgtaatcacacaactaccctatggggtaggtgcccttatttctccatttggcagagagggactaagtatcttaaccaaggtcacacggctttcaagtgccagagccaggactcagatctacataggtctggctccagagcccccaatctaacctcttaacctctctgctttactgggctaaaccttcaccacctatcatatggaaaaagaaattcaatagaaagttatatggaaaaaatacaaccctgtgttaatattagaaaatccatagtaacatgtagaatgaggaagcttcctcaagcccaactatacaggtcagatcggttgaaaaaataaaactaacaaatttttacatgtcaaaatatgcaatatttgaaaatccaaggctaatatctttaaataggcaaagatttattaatactccttgacacacaaacaggaagtgagaaaatgggcaactgacacaaatcgataattaactgtgaggacataggtggtggagtctctcctaatcctctattcttggagatctggatgcctgccattcgcgtatgggaagaacagagacagtcatggaaaacagcatttgatctagaaaggaccataatgaggtcaaagggcggtctcagggcagtcttaagagctccccatccccaaagaactggcaaggactctccaggtgctcgtatgcgactgctgcccaactcccatcacgaactcaggagacctgtcattttctgaaattttcatgacttctaagacactagttattggggaaaatttcaaattatttaaataatgagaggcgaataacattgctaaactcatgaatactctgtatttaaaacctccactggcgatcagggcacatagaatctctactactgatccctgacgctggccatcccccaacccgtcggcccacggaccccagccctgaccccacctcctcccagcatcttacacaaggattctcaccacactccccagagactcgcctgcccagggcccctctctaaccccatatagctcaggtctctgatccagagactgcatcaccgacctctcctactacctatttccagattagagtccctgatcccagaggcattgtctaaaataactagctcttacaactacgtccacttcaggaaccgccctgtgatgtcagaactttgaggccgcccggccagggctgcacatgctcagtgaggtcggcgcccgccagtaacaaacatggctccctgaagccgctcaggctcaagagcaacatggaggtctgcacttaatcgctcctctccgggggcggccatactgaggaggcatctcttccgtgcaggcaggctctcctggggacctcagagattctctccagcggcagcagaaaacgggcaatgggtggattcgggtccagattctggcaggagggagtttgggatcgagatctggaaaaaagcactagactggaagaggacgcgatggagtcggagccgctggcgggtacaaaaaccagaggccggggaaggcgccggtgggaggcaaggcacggatggactttacctgcgcacgcgtcgcagccatctccgcgcacagtggtggccaccgcgactggtgctgaagtgtcggcgtgtgccgggcgctccgctgggacccgggttgctcgccctgagtctcagctttctcatctgtacggttgggacaagtacagtaaccctcgcccgtcaagacgggccagggctgtggcgagggtccacgccttagagcaggcacctatcttgtgcagggccctgagatggggtctgactcagttcctgcggggaacttcaccagtgacccagtcagtgcccttcagttaaagaccaccaggagcacacttgtaagtaaatataattacattgcagcaaggaatggggtactatgggtcatctcagtgggaggagttagagagaaactattatacgatttggactttaattggttgatttcggacaggatctcagaaagtgaagactttagattggatgctgtcagaaagcaggagcaatatgattattaagtattttgtgggtggcatcaagaccttgttttttatctgcacttagacaacattataaagtgcccttgtttttgtttgcacttatcacggtctcagattaaccttctgaagttgatattctgtgagattgtttatgtccaacaggaaaacaaaatgtcctggccatgaacatcagaccagcgtgtaatcacattaaggcctgtgaccaaaatattgacagaattgaagttagaaatagttctacagtaacagagtcttcaatactccatttaaaataatgcatagaagctggacatggtggctcatgcctttaatctcagctacctggaaggctgcggcaggtggattgcttgaggtcaggcgttcgagaccagcctgggccttttggcctgtctcggcttttaacataccttcctcactcagcttaatcatttctcactttagatttataataagagatgtgtgactcttactttcacttgaacacatagaggcctttatagagttattaattggcctaatttcaatattgctgtgtctcagaaaacagacctgaggagagggtgagatggaggaagggcagatcgatggaaccattcgaatacacatatgtatcaattaagctcattgtcttttggagcatggcttgtgatgccccaaaacaatgacaatagtaatatcaatgatcactgataacagatcaccataacagatataataataacaaaacatttgaaatattgcaagaattacaaagatgtaacacagaggtgcaaaataagcacatgctaccagaaaagtggcactggtagacttgcttggtgcagggttgccacaaaccttcaacctgtacaaactgcaatatccgagaagcataataaagtgaagtgcaataaaacaagttaagcttgtatatgtatgcatgcacacaccagtacacatccacctatccacacacaaatctttgtactaacaaagcctgtattttcaattccaacaatacatcatttgtaccttaaaaatctctgtcatccttgtagtgtccttttctgtctttgttatcagggtaatgctggcctcataaaaaatgtttggaagtgttccctcctcttcaacttttggaagagtttgtgaagaaatcgtattaattcttcttcaaacatttggtagaattctccactaagctatctggtcttggattttcctttttcaggagctttttgactactgactcaatatttttaatcattatttatctgtttttattttctatttcttcatgtttcagtctagtggatgtatgtttctagaaatttctctattctaagttaaacaatttgttgacacatagttgtttagagtagactattattatcctttgtatttctatggtaccaattttaatatctccttttttgttctaattttatttacttgagatttcttttttcttggcctagtgagaggttggtcaatttttattatcttttcaaaaaatcaactcttcgtttcattcatcttttctattgtttttctagtctatttcatttatttctgctatgatctttgttatttccttctaattttgggcttgattatttttttctattttttgaggtttatttgggatcttttttctttatttagcacttatctgtataaacttccctctcttagaacggcttttgcttcatctcatcagttttagtatgtcgtgctttcattttagtttgtctcaagatattttatttcttttttgatgttttctttgatctactggttattcaggagtgtgttggttgatttccacatatttgtcacttttctaagttttctcctgtttttaatttcagtttcatgccactgtagtcaaa

SEQ ID NO: 1883682 - DNA, 4001 bp, Homo sapiens
tgccaagttttaaaagaaaaaaaagtatggaaacagctaaacggaaaacaggctggttaagtgtgtttgggtcagtttatttctagtatcatttacaggctaccctgatattgtatttaaaattttcattcatttcagagttcacaaaataatgatttttcctgtgaagatacttcgtttaagagacaactgacttctacaactaaaatgtacacatgttcaaagaaaatagcttgtaaaatatatttggttgaataacatttacattaagcctttaaaattatgtatcagaatctccggctattaagcagtctaatggagcctactaagtcagagagttgtaattcttctttcctgtgctctgttctgataatgaagtaaaggcatcagtagcatctactgtgctaaagaataaatggaatttacaactgtaggtaatatttaagcactttaagacaaatatgaatacatcataaatttctaactaggaaaatattttcaatgagatctcaagaaatgttaacttttttcagaataaagcactgaaaactgactcaccaacatatcaagctggtttcttcatcttcttctctttttctcttcttatctttgctctttttcttcttactacaggacataatttatatagatgagtttaagtatactgatttgtgtgataaataagtatcataagattgaaacttggaagtcttttaagttgtttcatttataaattattgatttaggaagacttacattgctatgccctcttaaatacagtactgagaatttgcttcaggctttgtatatattatgttaaagttcaaagcagagtgtagagccacacctccagattttaaatcctgattctgtcacttcttagctctgcaatttttggaaaagatactgaatgtctctgtgagtcagtttccccatttaaaaaattaggataacaacttaactcttaaggctattgtgaggattaagaggtaatatgtatcttcacacattgctggtggaaatgtaaaatggtgcagcatctacaggaaacagtttggggttcctcaaaaagttaaagagttaccatatgacccaggaattttactcctaaatatgtatacccaagggaaatgaaaacatacacccacaaaaatcttacataagaatattcacactagcattactcacaatagtaaaaaaggggaaacaatctaaatgttcatcaactgatgaatggatgaacaaaatattacatccatacaatggactactacgcagccataaaaaggaacaagtgctacaacaatgatggacctcaagaatgttgtaagtgaaagaagccagatacaaaaggccacatgttgcatgatttcttaggaaatattcagaataggcaatttcacatagatagcagactagtggttgccatggactaggagagggggaagatgggatgtgacagctttaatgggtaggaagagatttccttctgaggtggcgaaaatgctgagcaactagacagtggtgaacctcttgaatatatactaaaaaccactgactgtacaaaagggtgaattttataattatgaattacatcgcaataaaaaaataaaaacccaagagggatttgaaaaaagttaatgtgcaaagtgcctacaacaatttcttggcgcattgaaagtgctatataagcattaattatgattattacgataatcttaagacactcttgtctgcattttcatcataaagttttcagaagataactcaccactcctcataggaaattcacagagtaaaaatctcacattcattcaggatatacctgccatttattctggcatcttcatgaggccagactcctcgagagggttctcaagggcagtggcttcagctcactccttgatactttctttccatctcgcctaacaatatcaaaacttctgtttatcacggaggccaggaggaaatgctcaatatttgtatgtacagtcaacctcaggcaaatctgccagttaaaaaagaagcagggatatgaatgcacagttatttttctcctaaagagctaataaattaccactacaacatcctcctcacatttggctcaatttatttactgcatgtatgttctctcatttaatcctcacagtcttctaaaggtataaaaaatggtctgaaagtataaatgtgtaaacggaggttcagatacttgatctcttaatgagtaaatggaagttcagacatattaaccaatttgccacaaattacaaaattagtaaatgacagagtgcaggttccagcccatatccctatcaaagtccatatacacctcaaccactgtgtgattcatcctggtttcactctacatattagcttagaaaaaaattaatcaataatttttccaggaagagacaatggagaaaagaataatccctaataaaggaagttattataatgaactacaagatcagactaacgcacacccaccaggcagaggcctggagagatgcctcaggggacccaaactcgtgggtacggggccacgggtcacccgcctgtctatcctgtttccagggtcgtccgcgcaggaggcttcccctctctgcacaggcgccaggaagggtggtccggcctccgtccagcccagacagggtcagagcgaagcctgggaggccacgaagccggctctccgcaccacggctcccaccggattcgcgggggtggagtgcgtccgaaaagaactgaggaggctcccgccggagctgcaggacccagctcttcacctcggttcccttgagcacaagcttggtagacttcacataagagtactaggccatggctccgggagacttctgtgcagaggctgaagccagctcaggacgagtatgtgacctggagcagcaccagggcggggaggaacagaagtgtaggcgaagtaaacactccctgacagcgtaggtctgtccagaacccacctccgtcttcacccaaatgctgaatggctgagatttccacttccgggtttctcccggggcggggggggggcggagctacggcggctgcagagggccgaaaggtgtccgcacgcatctgctccctggcaccctctcgaggagcccctgaggattcgtgcctcccagaggtggggaaagcccgcccgaggcttcggtgctgacggtggcggggctgccgggcacgctgtggaaccgcctcccgctagagctgtgggctggtgacggtcccgcgggggcgggaagcggctcaggctgccctcctggcctgcggcagtgcgtctgggagcgcgggccactcgtgcgcgggtcactcggggctgtgcctcgcgcgactgtgtgtgcaggaaacaagcaggaaataccctaaaatggaatgaagcgccatgttgagggccgcggacgtcgcgagtgctgtgggaatgtgggccaaggtggagagttatggtggcgcgtgttacagggtcaggagtcaggaagaagcctaatcatggagccggcatctgaggagggtcttgaacgctgggcaggcttttgcccaatagagatggaggaagctagtcctgtctgatggaggaaacagggcagaggcgtggagggagacgcgcagtgctggtgtgaggagccgcgagcaggccaggcctgtaaatcagcgtgatgggaaccaggatagagaaggcaagtcggggtcctgtggtcgctgaagaatttgaatgaaatcagtaaacaggtgagagggatccatcgcaagatcatgggatgaaacaagcagtagtccacggtgattcctctgcagcggtgggtattattaatcgcgtatgtgacaccaaaacggtgggtattattgatagcgtatgtgacaccaaaaccacccaatttaagctgtgactctttccctaaagtagaaaacagagatcagttgggttccaagcatccacgaagatcttattaaattcgtgatccctggtggcaccatggagtcaggattgg

SEQ ID NO: 1883683 - DNA, 4001 bp, Homo sapiens
catataaaccaataaaaactcacattgaaagataaaaaataatctaggtgacgatgcaagcacttttaagacataataggccaggtgcagtggctcacacctgtaaacccagcagtttgggaggctgaggagggcggatcacctgagttcaggagttcgagaccagcctgggccaacatggtgaaacctcatatctactaaaatacaagaaatcagccaggtgtggtggcaggggcctgtaatcccacctactcgggaggctgaggcaggagaatcacttgaacccaggagacggaggttgcagtgagctgagatcgcgccgctgcactccagcctgggtgacgagagtgaaactccatctcaggaaaaaaaaaaaaagacataataaacataaaatatgattctattaactctattaatccaaataacgttttctaattcagaagaaatatataacatgtctatttggtagcttaaaaacattcttttaaaatacaaatacagtagacccaagtaggcttggggacttaatattagttactctagctacatgataaaattactggatattggaatctgaagcagcacaattatgctacaagtaccatgctcatctgtcactgacacacacacacaagtgtgaatgcctgctttgctcaattaactctgtaaataagttcaggatttgctgtggaatgttccctgctttccattttcactatggtgaaagttatggaaactcgatccccataatttaagcaaagttgtacttaaagtaactcatatgtaaaaatttaagatactacctttagtgtcaaaaacattttaatccaagtaacgtaatctgcctgcttctaaaaactggcatataaagcaacagatctgttaggcagtcacaaggtaaacaggctcatcctactggagcagaagttttactcacaaatatgaaagaaataatctaaaatatcagagtgccacttaggattaagaccacaaactgcccccagtacacatcctctgtccttaaagatctgagctactaacatggaaaagattgaaaaacactgtcttcaagtataaataaaaatatattacatttcggtaagaatacattgtttagggggaagggaagcagatgctcatctattttgtcctatctgttgataactaaattcagaagctgtactaaaagtcaaacaaaagttataaatacatctcaatttttaaagagcaatgattacagtcagaaaaactcatttggtggctagtattcttgaattaaaagtgccataccaaagtgaaatctttttggttttcaacatctagctttttcatgtcacaattattttgggattcttttccacttactgcatattgtgaaaactcacctgaactcaaaactctaggtaaatctataaacctgtatctcagaatccacctttaattcatttgtaaaatacactttctctgcacacatttcctctctcttcttttaaccgtaatatttggatttagggagcatcaagttccttgactgtaaagtcaacgaaaaaagagatatgaagtcaaaagaatgggagataatgaacaagaggccagtagttaaaaagtaaaatttcaataaagaataacagttaagatggtcgttcatgttattacccaaacactaggggtttcgtccaggtcctcctgctcatcggagaaaaagccagtcactgaggtgacaagtactgccaaggaagaaagctttaacctggtgctgcggcccaggagctggaagctcagtctcaaatccatgggcttgactaataggggcaggaaaaaaatttaacaatgtataagagaacagaaattagggaggggcaggaggcatgtggtgctgtgatctggtatgtttcagttatctgatacttcctgaaggtctttttttgaggagagaactcagatacaacagatccaagtttcaagctttaacagcagggtcaattttgacgttcatccaaaaaaaacccatccattgggacaacagggccggtgtcaatgtaagcaatgattctgtagttcctctttgttctttcaaaatctgaaataaacaattgaatttatattatatgctaaatctaaagaaaatacatcttgttgtacttgaggccagaagagatagaagtaaggcagtcaagtttgggaacattataaaaaattcaaaaaaagtaataaatgcataaaacttacagagtaacaagtgctatttcagaattcttctaaatactaagtattgacatgaccttatcaatatttgcattactaaccatacaataagaacctgacttctgactgttctgagataagggataaatgtgtactttaccttaaatgggaaagtgcatcatgtacccacttcgagattcacaacagggaaaactgatttgaaaaattgttgcttgtgaagttcatttatatgttaaaaaaaggccaatacattttcccttttccacatagaaaaggaacactatacttataaatactaaaacacagtctgtggaatacaaggaaccaatagaaacagtatgtaggaaaatggaagtgaaaagattatacattgcaaagacttcagtagaaggagtttttcatcaacatcatcagtttcagaagggcctgctttgggatacaaagacaatacttcaacagtaactcccccaagccagacgcagtgacttatgcctgtaatcccagtaatttgggaggccaaggcaggcagtgaggtctggagttcaagacaaacctggcccaacagggtgatacaccgtctctaccaaaaaatacaaaaattaaccaggtgtagtggcatgcacctatacagtcccagctatatgggaggctgaggcaaatgtactcattttttcattcctgcacccaagaaactgcaaccaatctactctgttaagagcagagataaagggtttagactccatattacatgtgaaatagaagaaatgaatcagtttagtatgaacttgtatgcacttttggagaggaaagtaggtcaagaagccattaagatacatgaaggaaggtcaaatcttaaagaaaactagaaattcagatttatttacatagctctagaaggaagaaccaggaatagtggagaatgaatgtagaaaacatttttagtgaatgaaagcatgagatgataacacaagcagccaccaatggaacaaactgatgtgcaacagcggatttgccgtcactgaagctatccagtttccaactgttgcaggtattacagagctatcaagagttttagtaggcggctggggttcctttcagatctgacatggcatgatgccaaaatgctgtacatgttctcatctttttatggctcattttttttctctcttcaggtttcttaaccttttatctacttccctctattaataatcacctaaaccatacactcagtcttctgaagtaaatttctttatctttcacttcacaaataaacatctttgatggatgaaaacaccgcaggaaagccacctaagcagatatgacttctcaacttttttttttaagtgatttccattcatcactaattccaaacaaaacaattacaaactatcataaaattattagaaagtgaaaatgggaagcattggttaaatatgtgtttagtatgcttcaccatgtcctcaaacatatttaaaaagttaatccacacttctttaagtgcattgggggacttgctttagattaagaaatatgttaactatttcaggacactaaggaccttacaaatctgaattagctcagattggctgctatctcctcaattattttctgataaataagaaacaaacagtaaatagcaacttgcagaaaatctaccagtagtacacaagggcagccaaacttcaaaattcttgccactcaaactctagacggttactatttactaaaatgtaaataataaaaagacttttctcaatcttgtcctccagaaa

SEQ ID NO: 1883684 - DNA, 4001 bp, Homo sapiens
agctggaaatcagaccgggttagggcagtgagggaggggcctgggatctcacaggaggctgagtgtatgtttcttcagggaagaccatggggaattagaccctggaacccacccatctgtgtccaaagccacatggccccgatggtaatagcaaggcatggaggacagggctttgtcattcacaaagggcttccacaaacaggccccccacccccatagtcctcacaactgccctgtgtggagaaaggactggggtggtctcaaagaggaatcagccttagcagagttgaacagctgttcccagggagcgggaggccccctcaaccccctccgcatccaggcaggcattggtctccccagaacacacacactgccccctgctgggtaacgctcagtccctggcccaccatggcttcattccggcatggaatctgagaaggacccggggttctgatttccttcctaggagcccccacctcaggcttcttcaactgacttcttcagagtcagttccctcagggacagacgagatcaaattaactctagtgtgccctggcagagccttacctctgaagactgtggtttttcatcctgcctctgggcatccccctctgccctactggacactgggagacaagatgacgcgaggagacaagatgacactgggagacaagaaatggcgaggagctaggaccggctctccctctccacccccagcccagccgcagcactctgcactcatgaaccgcatggctctctctgtcttgctcagggagctctgtgtgcttcctcccattcatgtttaaatggatgataaactgcttttcttcttagaaaaacaggaagagggggccaggcacggtggctcatgcctataatccgagcactttgtgaggccgaggtgggtggatcacctgaggtcaggagtttgagaccagcctggccatggtggaaccctgtctctactaaaaatacaaaaactagccaggtgtggtggcgggcacctgtaatccccagctactcaggacgctaagacaggagaatagcttgaactctggaagcaaaggttgcagtgagcagatatcgctccatttcactgcagcctgcgcaacagagtgagactccatctcaaaaaataaaataaaataaaataaataaaaataacacacacacacacacagacacacacagagggattttcaatatgaggtccaccatggacgccatcagtccctgttcctctgctcctggaacacccaggctcaggcccacaggcaccactgagctgtcaggtaggattctgcttcccaggagacaagaggagatgccaggccccggtgggaggcccttgggggcccagcacaggccccatatcaccccacacagaggaggttgggccccaagccacctgccccaggaaggggctgatgagccagggcttagggcctggcctcggacagagacctcccctgtctcatgaccagagacctcccccgtctcatgaccattcctggccgctgagcccacgggtttgattttgccttcacgcctcctgcgctccccaacagatggactgagggcttgggatggaaatccctgtacacaatctacccctaccaacccctggctgccctgcctctccctggaagcatgatgttccggtctctcctgagacttcccatcgcagaagtccctccactggatttggaaaagtggaactaataataaaaaggaaggagagaatcaagctctgtgggtctggactgagggctccttacctttctcttcccaggcgatggtgagggtggatcgtcacaatggaggtaagataagtaggggagtaataggaagaagaaccccagggcaaacaccaaggtgaggaagatatccaacacccatggtgtggagctgggggtgtttagcgatgagggactaagtaattttagaggaaagggaagattctccatgtgaataggtgcattgctttcaagcaactgagctctgggcatccccgtggaggctagggactggggcccaggcctgcatcacagagctgggccttcacatcacaaagggctcctttgttggggaggggcagtaggagggggagaccgaagcacagcccctccccaccccccaagccggggatccctccaccttcccaccttccagatctctccttcccgctaagttttgtcagtgatagaactcagccaattttctattctttctccctggaacacatattacctggttccttttatctgttggagttggtggcttgaggttacctattttatggcccttgaaaatctgaagttgactctgaaattttggctatgtaccagggatttttattctcagaatctcatttgtcctcaactccagctttcccacacaatgtttttgtcttatatcaatccagggacaaaatgtaaagttcttttactcttatttagttttgcaaattttgaatagtaagttttaaaaaaattatttctatctcactttcctttttttttttttttttttttttttttgaggagtctctctctgtcgcccaggctggagtgcagtggcctgatctcggctcactgcaagctccacatcccgggttcaagccattctcctgtctcagccttctgagtagctgggactacaggcgtccgccgccaccacgcctgactaatttctttttgtatttttagtagagacggggtttccccgtgttagccaggatggtcttgatctcctgacctcgtgatccgcccgcctctgcctcccaaagtgctgggattacaggcgtgagccactgcgcccagccttctatctcactttcaatcaaagggacctacccacatacaattaagatttttttaaattctatttatgtacttatgtgtttattttaagttcaggggtacatgtgcaggacatgcagttttccttttttttttttgagacagagtctcactctgtcgcccaggctggagtgcagtggcgcgctcttggctcactgcaagctctgcctcctgggttcacgccattctcctgcctcagcctccggagtagctgggactacaggcatctgccaccgtgcctggctaattttttgtatttttagtagaaacggggtttcaccgtgttagccaggatggtctggatctcctgacctcgtgatccgcccgccttggcctcctaaagtgctgagattacaggcatgagccaccgcatggggcctgctgtcttattttaacgtctctctgggcttgataatttaaaaggactgacattcctctgataaaagttattttattttctcattttccatcaatatatcctgttcagtgaaatatctgttcatgcctttagcccattttctaattggattgtttttccttgttgttgttgttgacttttgaaaactttaaacaatattctagatatgacctctttgtcagatatggtttatcaggtgtggtttgcagttttctcccagtttttaccttgtctttttattaacaggctcttatgcagggcaaaagttttaaattttgataacatccaattaataaattcttataattaattgtgcttttctggtgtcatgtctaataattattcatcaagtcctaggacctgaagaatttatcattaaatttcatatttttacattgagatctatgatctttttttttctttttttgagagggagtctctctctgtcacccaggctggagtgcagtggcaccatctcagctcactgcaagctccacctcctgggctcacgccattctcctctctcagcctccccagtagctgggactacaggcacctgccaccacgcccagttaatttttttgtatttttagtagagacggggtttcaccttgttagccaggatggtctcgatctcctgacctcgtgatccacccgccttggcctcccaaagtgctgggattacaggcgtgagccaccacgcctggctgatcctttttttt

SEQ ID NO: 1883685 - DNA, 4001 bp, Homo sapiens
gacgtggggctaccatatggctgcctgaacaaatacagcttgacattcactttcttgctactgattgaagtgtattaacttgtgtaatcacacaactaccctatggggtaggtgcccttatttctccatttggcagagagggactaagtatcttaaccaaggtcacacggctttcaagtgccagagccaggactcagatctacacaggtctggctccagagcccccaatctaacctcttaacctctctgctttactgggctaaaccttcaccacctatcatatggaaaaagaaattcaatagaaagttatatggaaaaaatacaaccctgtgttaatattagaaaatccatagtaacatgtagaatgaggaagcttcctcaagcccaactatacaggtcagatcggttgaaaaaataaaactaacaaatttttacatgtcaaaatatgcaatatttgaaaatccaaggctaatatctttaaataggcaaagatttattaataccccttgacacacaaacaggaagtgagaaaatgggcaactgacacaaatcgataattaactgtgaggacataggtggtggagtctctcctaatcctctattcttggagatctgaatgcctgccattcgcgtatgggaagaacagagacggtcatggaaaacagcatttaatctagaaaggaccacaatgaggtcaaagggcggtctcagggcagtcttaagagctccccatccccaaagaactggcaaggactctccaggtgctcgtatgcgactgctgcccaactcccatcatgaactcagaagacctgtcattttctgaaattttcatgacttctaagacactagttattggggaaaacttcaaattatttaaataatgagaggcgaataacattgctaaactcatgaatactctgtatttaaaacctccactggcgatcagggcacatagaatctctactactgatccctgacgctggccatcccccaacccgtcggcccacggaccccagccctgaccccacctcctcccagcatcttacacaaggattctcaccacactccccagagactcgcctgcccagggcccctctctaaccccatatagctcaggtctctgatccagagactgcatcaccgacctctccgactacctatttccagattagagtccctgatcacagaggcattgtctaaaataactagctcttacaactatgtccacttcaggaaccgccctgtgatgtcagaactttgaggccgcccggccagggctgcacatgctcagtgaggtcggcgcccgccagtaacaaacatggctccctgaagccgctcaggctcaagagcaacatggaggtctgcacttaatcgctcctctccgggggcggccataccgaggaggcgtctcttccgtgcaggcaggctctcctggggacctcagagattctctccagcggcagcggaaaacggacaatgggtggattcgggtccagattctggtaggagggagtttgggatcgagatctggaaaaaagcactagactggaagaggacgcgatggagtcggagccgctggcggggacaaaaaccagaggccggggaaggcgccggtgggaggcaaggcacggatggactttacctgcgcacgcgtcgcagccatctccgcgcacagtggtggccaccgcgactggtgctgaagtgttggcgcgtgccgggcgctccgctgggacccgggttgctggccctgagtctcagctttctcatctgtacggttgggacaagtacagtaaccctcgcccgtcaagacgggccagggctgtggcgagggtccacgccttagagcaggtacctatcttgtgcagggccctgagatggggtctgactcagttcctgcggggaacttcaccagtgacccagtcagtgcccttcagttaaagaccaccaggagcacacttgtaagtaaatataattacattgcagcaaggaatggggtactatgggtcatctcagtgggaggagttagagagaaactattatacgatttggactttaattggttgatttcggacaggatctcagaaagtgaagactttagattggatgctgtcagaaagcaggagcaatatgattattaagtattttgtgggtggcatcaagaccttgttttttatctgcacttagacaacattataaagtgcccttgtttttgtttgcacttatcacggtctcagattaaccttctgaagttgatattctgtgagattgtttatgtccaacaggaaaacaaaatgtcctggccatgagcatcagaccagcgtgtaatcacattaaggcctgtgacccaaatattgacagaattgaagttagaaatagttctacagtaacagagtcttcaatactccatttaaaataatgcatagaagctggacatggtggctcatgcctttaatctcagctacctgggaggctgcggcaggtggattgcttgaggtcaggagttcgagaccagcctgggccttttggcctgtctcagcttttaacataccttcctcactcagcttaatcatttctcactttagatttataataagagatgtgtgactcttactttcacttgaacacatagaggcctttatagagttattaattggcctaatttcaatattgctgtgtctcagaaaacagacctgaggagagggtgagatggaggaagggcagatcgatggaaccatttgaatacacatatgtatcaattaagctcattgtcttttggagcatggcttgtgatgccccaaaacaatgacaatagtaatatcaatgatcactgataacagatcaccataacagatataataataacaaaacatttgaaatattgcaagaattacaaagatgtaacacagaggtgcaaaataagcacatgctaccagaaaagtggcactggtagacttgcttggtgcagggttgccacaaaccttcaacctgtacaaactgcaatatccgagaagcataataaagtgaagtgcaataaaacaagttaagcttgtatatgtatgcatgcacacaccagtacacatccacctatccacacacaaatctttgtactaacaaagcctgtattttcaattccaacaatacatcatttgtaccttaaaaatctctgtcatccttgtagtgtccttttctgtctttgttatcagggtaatgctggcctcataaaaaatgtttggaagtgttccctcctcttcaacttttggaagagtttgtgaagaaatcgtattaattcttcttcaaacatttggtagaattctccactaagctatctggtcttggattttcctttttcaggagctttttgactactgactcaatatttttaatcattatttatctgtttttattttctatttcttcatgtttcagtctagtggatgtatgtttctagaaatttctctattctaagttaaacaatttgttgacacatagttgtttagagtagactattattatcctttgtatttctatggtaccaattttaatatctccttttttgttctaattttatttacttgagatttcttttttcttggcctagtgagaggttggtcaatatttattatcttttcaaaaaatcaactcttcgtttcattgatcttttctattgtttttctagtctatttcatttatttctgctatgatctttgttatttccttcttctaattttgggcttgattatttttttctattttttgaggtttatttgggatcttttttctttatttagcacttatctgtataaacttccctctcttagaacggcttttgcttcatctcatcagttttagtatgtcgtgctttcattttagtttgtctcaagatattttatttcttttttgatgttttctttgatctactggttattcaggagtgtgttggttgatttccacatatttgtcacttttctaagttttctcctgtttttaattttcagtttcat

SEQ ID NO: 1883686 - DNA, 4001 bp, Homo sapiens
cgggcccatcttcacttttctttctgtgaaaatggaggcagcttctctcctcctaccaaaggttaatgtacttgggatgcatttctcctaaccttcctaggctacctggattatttcttttctcctgcataactaacctcttctgaatcaactaggacactttccaccgcaagtaaaaagacaaaggccatcagcagactgaacactcccaaatttatatctcctgcccaggatgtcttccaggctccatcgattaatgggctgaagagcctcctgtgtccagcctgggcaacatggcaaaacctcgtctctacgaaaaatacaaaaattagccaggtgtggtggggtgtgcctgtagtcccagctactcgggaggctgaggtgagaggatcgcttgagcccgggtggttgaggctgcagtgagctgagatcatgccaccgcactccagtctgggtgacagagcagagggagactctgtctcaagaattaaaaaaaaaaaaaaagtcacctggacattttccccatggcatcttaaacttaacatgttctaaactgaactgatttctacctggaacagatgcttctagctgcattctctcttggttctttgctagcaagtatccccacgttgtttagaatagtaacatgtctagctaaaaaattgctagccaagctcctttattgttagaagtgatcacatgacaattctgcctggaggtatgagcagaagttactggatagggcctccaggaaagcttttcaaaagtgggcagaacacactctctctttttttttttctgcatggaacatgcacggaagtagagcagcgacttcatgatcgtgaggtccacaagccgagagtgaaaaagcagaaggttagaaggactctgggaagcaacatcatgggatcccaacattagttctgggatgttacaggaaaaaaatgatgccctacttgtttttttgttttgttttgtttttgagatggagtctcactctgtcgcccaggctggagtgcagtggtgcaatctaggttcactgcaacctccgcctcccaggttcaagcgattctcctgcctcagcctcccgagtagctgagtctacaggcacatgccaccacacctggctaattttttgtatttttagtagatacagggtttcaccgtggtagccaggatggtctcgatctcctgacctcgtgatctgcccgcttcggcctcccaaagtgctgggattacaggcgtgagccaccgcacctggccgccattacttgtttaagctactatgtatagcagacattttgttacaagcaactgaaccaagccttagctatacaccactcaaacctacttctccctagccttccccattagtaattgggacctccagcgccaaatccagaggtgggcaagttatccgggattcttctctcttaacacccacctacaatccaatctataagcaagtactgcagcatctcctccaaaatattcctattcatgcacttgtctttacgagctttgccactacctggttcaagccaccatcatctcctaaaataacctgatactggtccctttgcctatccccttgcctcctttcagtcttttcagcatctagcagctagaaggagcttttaaaatgcaaactgggcatcagtactggcagatactaaaacttccaggaaggacatgaactgctttgcctaagagagagagagaaaaaaaatttggaactccccaatttagaatgaaaaattaagaaaatggaactccccattttagaaggaaaaattaagaaaagagtagagagaatggctctgggttacataatggattccttaatcactggctaagaaataaaaaaggaacctctgaatattggaatgaattaattttcttgtggaaattggtgaaggggctaaatatcctaatgatcttggaacaaaatagagctcacatttaaaaatagctagcaggacgcaggaggaggcaagcccagggagctcacaggcattgtgggagaactttggactatcatggaacatagaacttggatttgttccaatttaatcagacctcggaagggcagaggagccacccacagatggctttgggttatgtttgggttttacttgccagcttgggggcattgtttagatatcagctgttggtcatgctgaactgtgaaacaggcgtcattccttatttgaggtcttattaccttggtttgtgaattatgtgggaagggtaagggtgagtaggacctgctgatttggattacttacctggatttataaccagatgcatccatctggtggcgcttaggaggaactttttagcaactctcagtggtgtcctaattttttcattcaaaagaatctgaaaacaagcctgggcaatataatgagaccccatctctactaaacttaaaaaaaaaatgagtggggcatggtggtgcatgcctgtagtcatagatactcaggaggctgaagcagaaggattgcttgaacccaggagttggaggctgcagaaagctatgatcacaccactgtacctcagcccaggtgacagagtaagactctgtctccaaaataataataattttatatatatgtatatatatatatatatatttttttttttgagacagggcctcactctgtcgcctaggctggtgtacagtggcatgatctcagctcactgcaacctctgcctcccaggttcaaataattctccagcctcagcctcctgagtagctgggaccacaggtgcgcaccaccaagctcagctaatttttgtatttttagtagagatgtggtcttgccatgttgcccaggctggtcttgaactcctgagctcaaagtgatccacctgcctctgccttccaaagggctgggattacaggtgtgagccactacacccagcctaacaataataattgtgtttttttgttttttgttttttgagatggagtcttactctgctgcccaggctggagtacagtggcgcgatcttggctcaccacaagctccacctaccggattcatgccattctcctgcctcagcctctcgagtagctgggactacaggtgcccaccaccttgcccggctaatttttttgtatttttggtagagacggggtttcaccgtattagccaggatggtctcgatctcccgacctcatgatccacctgcctcggcctcccaaagtgctgggattacaggcatgagacaccgcacccggccaataatttttaaatatttatatgagaggcagagaaattttgtaggaaaggaatgctttgtatggaagagagttaagatgcacaaagacagtaagtggttcaagatcaaggggaaaagtgagtgctcagctcagtgttggttacttgtatcttacttcagcccagactcttgggctcatgcccaagttccagctcagggggacaccaacaaagaaaaaagtaagaacttaaacaagtggcttcattaaactctctgtgacatactgagtagctttgttacatagatgggagatggcaccagtgacttcgaccctatcggagacattgggattcgtcaatctaattactcatgtggagggtgcccaaggataccttatgtttggagagtcactggaagggctcacgggacccagactatagttgtattcatggctaaggtttattacggcaatgtaatgaggagggagaaagactcaggtggagcctggggaaatccatgggcaggcatcctactgccccctccctccacgaggaattgcacagtgcactcttccttcagcaatgaaaatatatttccccagcagtaagcattcaatgtttctgcttattagagggaaacccattagagtctcaacatccaaagttttactagggtctagtcacataaggcaccctctgcctagcgtgtaccaaaattccagaccccccaaaggaaggcaggtgttcagcataaaccacactgtttgtatagtc

SEQ ID NO: 1883687 - DNA, 4001 bp, Homo sapiens
gcagcgcccatccattttattctgttgcagagattgcttcctcacttatttttactcactctctgttgcctttgtaagaaatacagagatcacttttcttttcaagtcagttctcccctacaaaaaattttacaaagtaagtttactaaagcactactgggctgcacatagcgtgtaggaaatagaattgggagaatgaagaagaaatatggggcataagatccacggcaaacagatttaattatagtatcaagaaattactaaaagagaagataaagcatttgagtagaaaagatgtcaggaatcatgtaaaaatagagattacagtcctatctcctcaacaatcttcaaatgcattgctgaacaactctgcattataaagcctactgtttataacagtggcctcttattttagaaatatagccatcaaaaattattataatacaaaagcataaatgttcaactgagtttagatacctggcttattccctttttcagtatatttcatgtctcaacaatgctgagtcatttatattcagtttttgaaatctttccagaaaagacactaaaaactttggtataaatattttacatctatctcaaattttattcaatggaaaagataagattaccttcagattttaattacgtctagaaaaataaaagccctaaggggtaaaatgcaagtctctaatctgcttattacaaaatgcaatcaattaagtaaagccttcattccgtacctcctcaatggtacactgaagctaatatctactgagatgtgtgagctttttgttaaattttcaggagttttgtgaactagttgccaatcacagacattattaaaatttaaagtatttatataaacctactagttaagtatttatataaacctataatttaaaacaaaggtaataaatactcaaaattcatggcatcctaattattttactacattttactttcatgattttttgaggtttttaaaacatctattttattcacagggtgaaaataccgtatatgctctagtaccgagtatctcttatcaatcccatgtttatgtttaaggacattctatagacagattcaaattggccatgtaggagtatttatgctacagaaatttaaaaacactataaagcagaacttgatttttattttattggttgtctagacttaagtgatagagaaaattttaatactgcagattgaaattgaaatttgtggcatgtccctagttattacatttccaatagtgccaaaaaaaggaaatattctccatgtatttgaaaactgttattcaattcagtgaagaaattgctgacatcattgatgaaccagtaaaattccaacataacccatgctgaggctgaaacaaatttcagtttaattaatatagttttcactaagtgaaaaataatttaacagtggatcacatatcaggtgtaacaataacaattattgaggaatgaattatcaattgagattaactgtatttgtgacattttgtttgaactgcgtccatagtttgctatacatacaacagttcagcaagaataaataaaacattctctgaaatcagttggttatatggaattgacaataaaaagtgctgtatattttattattatctgtcaagtgtgtgttatacatcttctatatcagcacaatttgtattatattttgtagtatatatgcatgcatgtgtgtgtgtgcatgtttatttttcccaggaagctgcttgttaaacatttactggcacactaccctgtgtccttcccttacaatgtaactgtggccactacagatcacggaggagcacattaacatgccctggtctaccatgtgaaaagaatatcttaagttctaaattgaaaagacacacatgcacaatacttactataaattagtggaaacacttctctggtctgtgttcaatgtgaaaaacttctctgctgtgaatatggggagtccatgttttcattagatcattctaaatgaatctcggctcaggtgatttatagccgattgcatcagcctaaattactctttgcacattcatgttgaaaatattcagggaaacagttttcactgtattagattatggaaaaggaattgacatcacaggcatctaagtatcaattggacctagaatctgatgaaatcatactgaaaagctgcatgtattactttggcaatcagatgactcaccagcagaaactgtacagatctcacgagcaggcctggtggccggaatttatgcttatgattcacaggagtcacatgtgctcctttcaaatacaccagatacagctttctactttatcaaaacaacatcaatcagtccactgtgctgatgacagtatttttatgtatgtaatttagtccttggggaaattacttttctataacgttctgggaaaagagtgaactgtttcagttattgttcagttccacatataaacaacaaaaatggaggaagacaaagctgactgatgtgaaagggaatcctctgttgcccagttagaaacaaattttgttgtaaattttgaactgactgagaaagtgaaagaaagctttggtggaaggaacagcactgacttttgcataattgtaggcttttcacctgaagcattccaaaccaaaaacagtgagtggaaatgttgtacagtgtcttctcaggctgcaaaaagatgataatatttttatggatcttctgagaaaacagaggagtgatttataagtatagatattgaaaacactgctggaaattttaaggatgggtaggcagaaaatcttctgtgatcatcaaattgaggatgtcctgaatttggagagagggcaaatttgaacacaaggagcttatgcaaaaggaacaagcaaacaaactggaataaattgctggaaaaacaatactccaagtgcttttaaacagctcttcagtttatatagacttttaaaaatatattctaaaataaatgtggatagaaaagaggccctgacagaactaaactctcttccaccaactacaaatcagagagaacgatgattagtttctcctaatgagaaactagggttagagcatcacattaaaaagcaagtctaatctttcttccttcaatgtatgtgactatggacttgcaaagaagtccttcttccttctaattcatattacagcttgcaggatggttgggatttacatcttgaatattgtggattttaccatacaaatgtataactaggaggtggcctgcttttatctgactagttgacattcataaataaaagggtaacaataatggaggagggctttatgagaaacctgagtatatgatgctatccaaggctccagaaaggcaaaaaatgtccctatttggaagatatattcagcagctcatgtgcacatttcagttaatatatagacatattaaagatgatatgcacgtttgtcttggagtggaatacaaaaatgatttttattcaaacccaaatggtgagagcaaaaattattatgacaaaatttctgataaagtacctcaaattaacatcaaacccaaacttctagccttagccatgagtttttaccagctacatcttttgctggagttactgagcagcagaattgattcttctgtctcctctatagcctgaataattttctcataacgtaaacaatttcgtaatcaaatggccacaggaatggcaaaatatcagagaatatgtcgaaatggaaggaaatcctgggattatctgatctgtagactcttcctattaaattaaacattaaatgcctgaaatgttataagacgttattaaatatctgaaacgaaatctcagtatgaaaagcagatatgttaggtggatgcctcagttgaattcagtcttcttattgggtaagattagtctttgttcacagaactactttaccaccttcactgagtcccatggttcactgcagctcggaatgaaatctcctgatttttcttcatgtataagga

SEQ ID NO: 1883688 - DNA, 4001 bp, Homo sapiens; identical to SEQ ID NO: 588565

SEQ ID NO: 1883689 - DNA, 4001 bp, Homo sapiens
ttaaaatctctaagtctcagttctgtcatctagaaaatgagaataatcataaccacttacctattttcctaacttcacagggtggttgaatttaaaaactgaaaggctttgggattagactgcctaggttcaaatcttagttctacctttaacctctctaagcctattttctttatctttgtattaagaataattaatacctacctcacagactgtggtgaggtttaaatgaaacaagatataaaacatacttagaataagacctggcatatgacaattaattattgctctattattcatttactccttcattcagcaaatagctattgagtgtctactatgtgccaggtactgttttaggtactcatgaaacacagatgaacaaaacagacaagcatttaccctcacggaacttctagtagaggagacagacaagaaatattaagcttaattataattatgcagtattttaaaaggcgataattgctacagaaataaaaatggagcaggtgagggagttagggaatcgagaggagaatgtgggtggagttaactaatgtaaatagaagagtcacaacgaagcccattggaaggtagccttgaaaagagttgaggtagctcaccaagagcatatctggaaagcaatgttccaggtagaggggacagccattgcaaagccccataagtgaaagcatgctcagtgtgtcctaggaacagcaaggcggctggtttagctatagcctagtgagctagggagacagtgctaggaaatgacccagagaaataatggtaggccagctcatggaggaccttgtaattaattagaagggctttggatttttttttttttttccgagatagagtcttgctgtgtcgcccaggctggagtgctgtggtgtgatctcagctcactgcaacttccacctcccgggttcaagcaattctccctgcctcaggctcccgactagctgggattacaggtgcccgccaccatgctcactcatttttgtattttttagtagagacagggttttgccgtgttggtcagactggtcttgaactcctgacctcaggtgatccatccaccttggcctcccaaagtgctgggattataggcatgagccactgtgcccagccaggactttggattttactttatttcaaatggaaagtcactagagagtgttgaacttaggagagaagcgatctgatctaattttataaggattgctctggctactgtgttgaggaaagactaggcgtgcaaatgaagcaagggtgaaatcaaagagccctgttagaggctactgcacataacccaggtgaacaatgatggtaaatttgactatgatagtggatttgactatgatggcacatttgaccagcaaccatggattgaactgtgtattagcaatgagggtggtgataagtggtcaaatcctggatatattttgaaagccaagccacagaatttcatgatggattagatgagtataagagaaagagcaacgttctgagtagcctgataaaaccttgcttgtgttcaagaaacccttattctactgaaaaatggcaaagtgtaagggtagtgatgctagcatattgttataattgtcttattttattattccttgttaatctcttacttggcctaatttataaattaaacttcatcataagtatgtatgtataggaaaaaatatatagtatacatagggttcagtagtatcagcagtttcaggcatccaccagggatcttagaacatatccctcaaggataagggggaactactgtagtttgccagggcttccataacaaaatatcccagactgggtggcttaaacattagaaatttgttttctcacaggtctggcagcttaaagtccaagatcaagatgtcggtagggttggttccttctgaaatttctctccttggcttgcagatggctgccttcttgcttcacatggcctttcctctgtgccagtgcacccccgatatgtatcttcttgtaagttcaccagtcataatgaattacagcccaccctaacaatcccattgtgacttaattacctcctaaaaggttctatctccaaatacagtcacattctagtacgtgggttagggcttcaacatacctctttggagaagacacaattgaacccactcccaggatttagggcaatgggttgaacattgaaggaacagggtaaactcttaagttaaatggctgacaaccaagccctgtcctgctcctcatgtcattatgctaaaataatgttatagtctgagcttgcttgactagtagaccatgtcctaccttctcctcataaatacacagtctatgaaaatctaacaaaagcacatatagtagatattaaattgctcctaattctactcctgtatttacattatttctgggttatgtggacacactttagctaacatagtattgctttgtctaaagaaaataatttggttgtgtttgctttgtcttcttaaaaactttgaaagatgcttcagctgcctcgggttatacttcatagcaaaaatagagtgcatgttattatatgaatatattgtggaaaattttgaatgcacaaacttagtgtgttcaacatttattttgagtgaatatttgacatattaaataaaactctctggtgcacaacacagaaaattctgatttttaaagtaaattttttctagggcctgccttctttattctctgtttcatttgcttcaatatagattttcaaaaatttctcaagacaccttccacttttctaactaactcttttaccacttatatctttttattcccatgtacaacaatgtaaataagaaaaacaagttttgctacactgtgcccagggtacctacaaatatagcattaggttgaaggtgttttgttcttgttcttgaaattactttaataactaattttctagggaaatataatatcagtgattatttacagtagttcccccttatctgcagggcatatgttcctcgatgcctagtggatgcctgaaaccaaaggcagtattaaaccctatatacaatatatttttctcatacatacatacctataataaagcttaatctataaattaggcacaataagacactaacaatgaccaataatagaataattacaatatattgttctcaatttcacagacagaagatttgttcctactgtagatctcagcaacctcagatttttcctttccttgttaagtcacaacctttcaccttttcacttgaagcactttatggcttctctttgccatatctaaactgtcagcatcactactcttgcactttggggccataattaaataaaataaaggttacttggacacaagatctgtgatactgtgacagtcagtctgataacaaagatggctaagtgactcacaggcagagagtgtagacagcatggagacattggacaaagagatgatttgtgttctgcttgggacagagtggaacagtggaagatttcatcatgctactcacaacagaacatagtttaaaacttatgaattgtttatttctggaactttccatgtaatatttttgggccacagctgactgtgggtaaccgaaaccatggaaggcaaaaacagataaagggggcactactatattggacatttaccacgtgtaggcactgcgctaggaacctcaacatcctttccacaacctgtaaggtaagtgaaagttcccacgttttgcaggaggaagctgaagtttagggaagttaagtgcctttccagggccagcacttactggtggagcagtaactggtggagcaaagacttaatctcacatttgtctggttctaatggctatatattctgcctacactgcctcactagggtttccaaacctacatgctactaagagaccacacatggcctggaacagctgtgacaacttatatgtgaaaagcacagtttttcataaaccaaagacccttcacaccaaagcaga

SEQ ID NO: 1883690 - DNA, 4001 bp, Homo sapiens; identical to SEQ ID NO: 588567

SEQ ID NO: 1883691 - DNA, 4001 bp, Homo sapiens
agactcgctctcctgcacctgcatccttgagatgccaaggtttccctgctaaccacgtgaggatgcttggggtactccagggactgacaagagtgagtggtgtcaacctaaagagaaactcaggctctccagaataaatgaatttaatcaagaataacacataattgcaatgcagagtatgcaagcctcagtgggtcacaggcatgtggtgggggggtggggtggggattgaggaaagggggaattttttttttttgagactggatctcactctgttgcccaggctggagtgcagtggtgcaatcatggctcactgcagcctcgacctcctggggcttaggtggtcttcccacctcagcctccagagtagctgggaccacaggtgcacaccaccacactggactcatttttttattttttgtagagacaggggtttcaccatgttgcccaggttggactcctgagctcaggggatctgcccaccttggcctccaaaagtgctgggattactacaggcatgagtcactgtgccccgcccacgggaaatttcttttttttttttttttttttttttgagacagagtcttgctctgttgcccaggctggagtgcagtggtgccatctcggctcactgcaacctccacctcctgggttcaaggaattctcctgcctaagcctcccgtgtagctgggactacaggtgcctgccaccaaccatgccctgctaatttttttgtgttttttgtagagacgggtgtctcaccatgttggccaggctagtcttgaactcctgacctcaagtgatccacctgcctcggcctcccaaagtcctgggattacagaagccaccgcgcctggccccaaggggaatcttttaaaaaagagaagttcccataaactgctttgaaaccataaagaccaaaggttagaagggtttgccgcaggcgctccgttgctaatgtttttgtgagggcttcttcagggcctcttgttagagtgtgacataaacgacttcatttgggtaccagcaagtgtcacagggggcagagaccagcagaaacctaaagatgacccctagaagagcaggaggccaggggaacagagttagacgagccacgtgctaagcaggacgtcgctgccgggggagctctccagacacgcagaaatgccacagtcaggaccgtgggacgcagcggattcgcccaagggcaggagcagcctggccaggagagaatgaaggaggggccgggcgtgaggttcggctggggagaacccaggcagggagggcctcgggcggccacggacgccgctttgccattttgggcgtttctggggaggacaacgcgtgcaggaagcgcagtcatctcaagctgacctccaaggttaccgagttcgagggctgggagccgggtctgaaagccccgacccgcctatggcgcggggactgtgggtccagccggccgattggccgcctcgctcggcgccggtccaggcgcagcgctcgggccccggggaccgtgagatgcggcgcagccagcttagctcggggtagcagccaccccagcccgggtgccgcccggcctggtccgcgacttcgggagggtccggtccttcccccggcccccacgcctgggtgaggccctgggcttcttgccggtgaccacgcggccagggtgggcaccagcccaggacggcgcccaagggcagcccagctccatccccgcgccgcgggttccggaaccgaggcgcgggacgctgggactctctgccaacatggcggccccgcccgggcgcctccccgggtccctagtgtctgcgtctcccgtgagggcgtgggcaaagtcggtgcagccagacgacaggaggcgagagaagcccagctccaggcccatgaggcgaaccacgtgggagccccagacagcgaccacgccccaggcgaaccaaggcccgccccgttgctacagctacgctcgtagcacacctgggcaggcgctgccggacgcatgcgcaatgaacctgagggcagggcggagtcgcagcagttgtctgacgcagtcgccgtaggacgcagccccgtacgctggagcgcagcggagacaggcgcgggcgcactggccgcatagagacgcagcgcacgcgcagtcgcgtatccgtgtgatgggcgggctgttgacggcgctgcgatggctgcctgcgagggcaggagaagcggagctctcggttcctctcagtcggacttcctgacgccgccagtgggcggggccccttgggccgtcgccaccactgtagtcatgtacccaccgccgccgccgccgcctcatcgggacttcatctcggtgacgctgagctttggcgagaactatgacaacagcaagagttggcggcggcgctcgtgctggagggtgagggtcgcgccgggctgactggggcccggggctgccgtgcccgccgccctcccagactgcggctccgagcgggacctgggcgggcggactcgactccccaggcgccgccctctccaccccttccccgcaaaaaggggcaaatgtgcgttcctggttggggcagccgtgggcggctcgcctgcagcggtctcagcggcccaaattctgcggggcggtggtgggaagagggctcagagccccagcaggttttctgggcttcgttcgcttttctgcaaggtcctggcccaggcgcctgcccctcttggagcggaaaccggaggttccccgtggtgtatgctcccctcggtacagtgagaaatgagcccctcttgattggctcctggtctgttcgtggtggtctcaggccgaagggcattgataaccacatgcggactgtgcatcgcctgggcggtgcctgggctacatctgtgggagtcgcaggagtctttctccactgttgatgaaatgtgacagaaatgtttctgcttttttcttatcctcgtctcatctgcaccactgtattaacgacatctgtagtattgtcccagcaatgttcctactccctgctgagagggaacttctccccattcaaaataaatagagctggccgggcacggtggctcatcccgcgttccacccactacactccagcctaggtgtaacagaatgagaccctgtttccaaaaaaaaaaagaaatagagctgaacactggatcttccagaagaattccttattgtcctcacagtttgtgacagttgagacgttccgtgtgatatattcagtaagaaatgtcattctctgtacctcccttagaaatggaagcaactgtcgagattgcagcggaatatgattctcttcctccttgcctttctgcttttctgtggactcctcttctacatcaacttggctgaccattggaaaggtatcagaaacacgtgtacttgaaaacgatatctgtgttgagggttgattgggcagaagcaatcttgcattctaccttaaacagctccaggaggcatatatggcaacgaattggcaagaaatcaagataaagagaaaggtagagctgtatgtaaccacctggctagaacacagatgttaatttgatgctgtctgactactttctaggtctctggtgtaagtactgatatgtccagcctcccttatagagtaagtcagctggtgggcttgaacactcagcctaaataaccacacaaatttcgtagcactcattagcgtgtgtttggaaaagaccaggcagagttctggtgaggatgtggagaatctcttctcacttggtctaagatgcttctctttggagcaaagctaaagggctcctgcccacctgccacatgctgaacgtccctgaatggaaaataggaaggcaaaagatgtggggttctgtgttatggacaaggacacaaactgccaagtgttttgaaaaagatttcattcccttgggacattgttgaattcatttcagtgactatcaggtatcataatgttgatttgtaatggatagtgcctgccaagtgtttttataaagcagtttaaatc

SEQ ID NO: 1883692 - DNA, 4001 bp, Homo sapiens; identical to SEQ ID NO: 588572

SEQ ID NO: 1883693 - DNA, 4001 bp, Homo sapiens
agctactcgggaggctgaggcaggagaatcgcttgaacccgcaatgagattgcaccatactccagcctgggtgacagagcgagactccatctcaaaaaaataaaaaataaatgtaaaattaaaggaggaaaacatcttccctgttttcttaggaaaagagttaaatacctggacacagagaatccacaggactggctctcaacatcactccaagagggaagccgtttccaaacttctttagttacccctcccacccctcacccttccaaggacaagacccccccaccacactcccaccccctgtccctgcaggagggaagctgccagactttccaaatcccaggctgactttttagggcgctcctgacctaagcccccacaaatctgaccatgcagccccccaaggctacagggacaaaggcacagactctaggtccagggaccaggccccctcttccagtgccacaggccctgtgtgcccctccctcctgggcgctggcatctccaccgctcctctgtcgtctccagggagggatcctcatcatggacccagctcagaagcaccccttcatgactcctaatccccaccctgggggcacgctgcatacacccggctggcccccaccacgtgtccagcacagcccgatcctgcccgctttccaccctcccgacagcctcgcagccctcctgcccctctctggcaaagtggccactgacctgagcattcaggggctggagggggattttttgcctcttggcctttcctcctaagcatcagcgtggaggctttgtggagtctggaggcgctggagggggctgaggtgcccagggacgcacagctcccctgctgccacgcctgggcccggatcttgtctctcagctgctccagccgcgcgtcactctttctgggcctctgctggggccccaacacctggggtggcctctccttccaagacacacacacgtcgtggccccccgaagagcacgagaggcggcccgatgacaccgagctgtccccatccctagcctccgggcctgtggaccacatgggcaggctgcacgccttcccccagggtcctggttccttgaggtcgtcagacccgaccacgtggggagctgcccagggtgggtctggctgctgggagggcccgggccacctcagggctgccacgtcatcctcagctgcaggtgcgcagagcctgggagggaacggcagacatgccggtcagacatgcaggcgcagaggtgccgagcagagccgctcagactggccccacctccccgggcattcctgctccacagactggaggtggaaaggagggcctggaatacaccccacctggaggacagccccggcattctctctcaagccctgaccacacccctctgaggtaggtaatgtgatcggcccgatttacagatggagaaactgagtctcagagaggccgggctgcctgcccaaaggcacgtgcagaggcaggcacgtcactctgaccccacgcccttgtacctcccacagagccgctgcctccagcggcaggcatggcacctgccagcagtgcagccccccgcctaagtccacgcagatgctacctgggcttggcaacagccttccagtcggctgctctccctggggccccatgggagaaggggccctgcctctggctgttcttgtggcagggctgaggtgtgtcccccaggcaggtgggcggcgtgcccacgaccagggtcggcatggccgcggggctgaggggagagcaggtgcaaggtcaacctggcccgccctgcctggggtcgctgctgccttcacatggcggcttcgaggcctgcagccccacctatgaccctgcccgggatgggctggccactgcctggctccggatgcccgcctgcgccggtcccctggcccacgatggaaaccctcaggtgggtcattgaaactgggctggcacggtgggcagcccggccctgggctggccacagctgggggccttcctaatgagctgtctcttggtggggtgggggagagttccggctggccccgtgacagcataataaccttgtcactcagcgacagagcctctggccttcagctcctgatggggctctcagcggtgccccacccagtccgcccaggcccagaatgacatgcagggagggaatggggccgggctgggcttgtggggtcagtgttgggcaagtttctggttggtgggggcggggcctaaccccaggtcagggttaggttcaattcagtctgaggcacagaggtcccagcagctgtggggcccagcccagacatcccaacagaaacacatcagccaccatctctcagttccatggggctgggcaggggaaggggcgctggcttctgggctcaccctggtgcaggccagaagacaccctttgcccacagtgacagtggcagagatgccaggtgctgccccaggtcaggagcccccgctggcctcctcggaccctgcacatcccagtgggtccgtgacacggcagtgtggtggggaggacatggctctgcagtccctgaggggaactcagactcagatcccagttccctcccagctccttccccacccccactggcagtgccaccttggagcctggggaccaccccctcccccaatgctcaccattgtgagcccctggtgagtccatccccgcgggaggtggcagtggcacggagctgcgatgatcatgagcacggatttgttccaggaatggcccttaagttgacccttcccaagtggccccagagaagggaggtctgcgcgaaagacctcttaagtctaggaaggcacgaaggatggagggccctcctccaggctcacgctatagaacctgtcctctggaaccgccaggcaaacgcctggagacaccgcccaagcccagccccacataggcacggggcccaggggagattccaagccaaacggggccctggctgccggcaggcacagccacgggcatccagggcacagaggctgagccaccagcagcctcggaggggagggagagaggagccatccaaagacaggcaggccctgcgtataatgtgaggtgcggccacctccagccccacctggcctgtctgcaccctcctagcgccagggcatgagccctttcctgtgatgaggcagggacaaggatgagcctcgggctgttacaccctggggaacatgtctgggatgttacagggagcttcagggaaccagcggtgtgaccacagggtccccccaccctcggagcctgaacggctctcaggcacccagaaggcagctccacttccagcccccttccattcctacagagcctcgccctgcccagggacccctctgcagcctctgcttcccagggccatccgagtggtgcacaggcctggcccccctgctgacgggttgccacctccctgccaggccttcaggctcccaaatcagctgtggtcctgggctctcagccctgctcccatgaagggacaggggcagggtcctcctgagcagaagaggccaagtctggtggctccctttctcccatgagcaggaaaaccacccagccactcagcagctgcctggaggctctggaagaaggtgcatcataaatgcgtggaaatgcgtcgctgtgactgggaacaaaatcatgacagcaaatgcctgggaacggaaaagcaaacccagcgagcagagcatcgcgaggtcctgcgagttgcccccaccaccggcttccttccttctcctccccacctgccctgggggacagcggagcgtctgcctccctggcctggtcaccagctgaggcttccagacgcagctctgaatcaggagacacacgtcagctcccgaaggcgggtccacctgtccaggaccctctgccgatgttgtccgtgccacggggaccgctcacagcctgcaccggctggcgcccctgccctgcccccaggagactcacgcctgctggggtacgaggctcggggctactctgcatggggt

SEQ ID NO: 1883694 - DNA, 4001 bp, Homo sapiens
cacctaaaactcaacaaatttaacagaaatagaatcttcatataccagtgattatccaacagtattttattctactgaaaaaaaatctcttgggcctttctaaaagagtttcacattggccggacttggtggctcaggcctgcaatcccagcactttgggaggccaaggcgggtggaccacgaggtcaggagatcgagaccatcctggctaacatggtgaaaccccgtctctactaaaaatacaaaaaattagccaggcacggtggcgggtgcctgtagtcccagctactcgggaggctgaggtaggagaatggcgttgaacccgggaggcggagcttgcagtgggcggagattgcgcctctgccctctagcctgggcgacagagcgaaactctgtctcaaaaaaaaaaaaagagtttcacacatacagacttactttctcaagtagcacagaaaaccaccaacagcaatcccaatgctctttacatagacatttaaaaagctgttttatacacacgaaaaacaggtccaaactgcttgaagaaatgcttttttttttttaaaccaaggaaggtcttgcttctggttttctttagaaatctgaggtttcacaaaacaggtttctatgactttaactacacataaaaataaatgtgttagtttggtctccaaagctcttgaatccattagaataaactattcccccaccatgatggtcctcaccgtggatttcatcccttttttatcctcaactgtactcacaaatacaatgttaactttgcctgctgcatcctgcctttgcccttcatctctttgtgctgctggagctgtccatagtgattaggggcagaaagagtatgaaacagatccagctttcttgaaaatagactcccttacctgtctttatgctagcttaccaaaaagaacggaggcttccctttcccaccctggcagacccgtctgcacaaagctctgggaggcagcagaatatctctaagccccagcctcaagatacatcatcttacaatttgtgctactcctttaaagctccattcagagcaggacactgttttcacaggagaggaagtcattttatgcaagttttctggaagaaaagacactacaattaatgtttggtgagaagatgtgttgaagaggacacaggaactttcaaaaatgtccagtcatatcttgagcatctctgcaaagcttgaaaacatcatacaggtcctggagccaaattgaaaaatctccaaaagcaaaagaaaaaaagtgtcacgaaaaaaaacatatatgtattccattttcacagaatgttctgccaaaccccatgccccaggaccacacacattcaagacaacaccccatacctcataccgtgtgtgcaagcaggacttccccaggcctgaagcaagggctgggaaacggcagctacgagcccagctacaaagccggtggggccacagtggccacacagctggcagccgcctccagtgagctctctacaggaagcgagtctctgtacctagggtgccattcttccagccctcatctcctctccaagtacttaactaccaagtctattttagcattgtttactactgatgttaccacgccatttaggattactcaattttaggtatcctgtcctacgaaatacttttacacaagctatcaggagataatgtggtccttaccagtttcctgcttatcagtcttccctctctgctaacagaatgtattctcttccattttcctgttctaaaaaaacctcccaccacgaattccaaaaaaaaaaaaaaaaagaaaaaaaaaagcctccataagaatttatttcaagctcctggttttcatgcccccaacgccatggcccaagggtgcatagccccaccgcagtcctcaaccctttctcaatgtgatggcaccaccattcttcagttatcacagtactgtacctttcagatatacagcatcggtaccatgataaccgaaaaaggacagttcagtctcatatctacctgaatattccctgccacccagctcaccaacctcagatgggccatatgatgatctccaagtatgcaagcacgtgaaaacacacacacacaatgtcagtactcaaataggctgttttccgcaacctcatttactatcaataggaaatgcttctttcacagtgtcatttataattcaagtcttctgacactgttctttttgaagagtgcttgcttttacaccacagcagtcaacttctgctaacattcaacaatccaaactcacttctacaattccctactagtccagtagcattaatacaaactctgtcttttgtcatctttcccagtgagctcatatcctatcatcttagacaaaaagcctgttttcccacagcaagttagacagctaaggaaaagaatgattaaaaaaaaactagtaataaaatccaagctacaccaaaccaggagtttacctctaacctggaaacaaaatctaaagcacgaacaaaataactgcccaatagagatcatgcaatttcagttacctgggattaaggaaggaaagaaatgcaaaaatccttgtatgtaaaaataaacaccaggttaagagtgacaactgctggctgatttgaggataaacacaagcaggtgttcatagtgcaggctctgtgcagcacaacaccctttgtcattttgggcaatgagaaaattacactggacagaataacgaggttgaaaaagaataacttacgtgtagggagagagagggcctagcaggactttggaaacatcctgctgtccaagggtcatgagtagtagcgccaggctttggttggtcgagtctacgcatccaccctgtaaacacaaattaataattgtacaaaccagaaaatggaaagccaacaaaagagaggaggaaaaaaaaaaccagaaacatacactcataatatcaaaatccaaagttcaagcaacaataaaacagaatacaggtcttataagagtaatcattgtatcaactaactgtagagggttaaactaacagttaattagagcaactgtaatagttgagactatcagaatgagactatcagattcaaatcttcttaagtgaatctagtaaaaaaaaaaaaaaatgaaactttccctttatcattaaagcagcagcaggaggacatcatctttattgagtatatgcaaaaaaaaaaaaatcttaatcagttctagaagatgtagagttaattccaagggttaagtggatgacgctcatatttattgaatctgtcacagaacaacacagtctatctgacatgaaacggccttttcatggccttacttttacacttattcaaatacattcaggaaactgcttgccatactctattaacttctctcctttatctcttcctgagttccttaaaactgaagacttgttaaggttagatccctttattcttactacttatgtataaaattatgccttccacccccttttccttccctttcttccaaattaacaagcagaacagacttctcttcaaacactttctcctgaggtacaactgcttaggttgcctttcttcttttgtttttcattttctcagccattttaactgttttgcctccactagacgcatacataagcatacaaacacgctttctgatcattctttctggaataactttaaaacatattgtacatagtcaaagaaggatgaccttgaatttctacatattttgcacaggtcaaaattagaaatccagtctgaccaaggcacgttactatccaaggctagactgaacaggataggtggccagcagtgtggttcatatggctacaactgcccctgcctcctttttaaggcatgtagggtaggaaataaatccattttcagatacagacactctgaaattctctggctgtcagatatcatttagtagccctaataatggtgaaggaaataaggattgatcttactgctagcctttatgaaaatctattgcacgt

SEQ ID NO: 1883695 - DNA, 4001 bp, Homo sapiens
gcctgtgccatgggtcccaggctccagcagggagctcgtaccttccctcagctgagggcccacctggccttgggatgccgttggggtagccagggtgggggtagccaggggtggattcacagagaagatcccagcccatcccatgccagggtctggggagcctcccgaggaaggggaggaggaagaggaggaaggccctgcctggccttccgctcagtcaccccgaggtggtttctggacccccagcatgttgggcaggggcatgggggctgcagggcggcgtgaggggctcagtccagcctggggcgctgggcagtcacgagtctttcttgcaggagcctagggttggatgaggcgaaggtcagagatcactgctccccacagcctccccgcccagctagatctgactggccccttggcctttggtcgcccccgacccccaagcctgggtagcccctctaggcccactgggcccagacccgggaggagggctctggagggtgggggcactcacaggaccccagctgctcctccaggaaggaaatctgctcgctcagggagtcgatgcggccgagctgctggaaggagtgcaccaggaggctgccggggtccgggagcccatgctccagtgcctgcgaggccaggctgtgcagtggggccagcaccagctgcagcttctgtgggtgcagaagggcagtgaccctgggccggcccccgccctctctgctccaccggggtctagggaggacccctgggaagggctccacaagcctccagcccccgcctccgcggcagggctccaagtgtccactagagggggctgccgtggcagaaaagcttgccgcagagtgggtgcctggggcatcaggctggcggggtggtcccagccttggggtccctggcaggagaactagggggacagctggaccactggccagtgggaagactggcaagagctctttgtcctggtggggacaaagatgggggggtggggaggtctcgtctgggtccaggctctgtgtattgtctggggggctgtcaagcttggttcctccggccctggggggtcctggtcagtgtccagctgcttctgcccagcatggatccaggccagggccccctcggcagtcagcagcgaggaagccacctccccagggccaggaccttttcagaccacccccagccatccgtgggtcgggaccatgtcccaggagactacggagcctgtacccgggcctgggcctctgctgttgtgaagacctgccccctgccgacgtctcacctcctccagcaggtccaccctggactgcctgcctccccccccgacgcctcatctcctccagcaggtccaccctggactgcctgcccccccgacgcctcacctcctccagcaggtccaccctggactgcctgcccccccgacgcctcacctcctccagcaggtccaccctggactgcctgcctacccccccgatgcctcacctcctccagcaggttcaccctggactgcctgcccctccacacctcacctcctccagcaggtccaccctggactgcctgcccccccccccccccaccaatgcctcacctcctccagcaggtccaccctggactgcagcctctgcacttcttccttcattgcactgtccactcctgcgggcagagccaggcgctgggtcacggccggccggctccccacccacacccccaggctccctcctgtccccagggagaggcagagccagaagactcaggcccaggcctctgccgcccccgctgcctgcctggcgctggccagaggtctcagggctatgccgcctaagtacgtcggggcgggtggctctgcgcagaggctcagggtcccggccacgctgagggaggtcaaggctgaggtctcagcggcgttttcgatgcggtgccgtggacggcgcattattactcacggtacgagtttgaagtgtcacagcgcgtaccaaaagtaataatgtcccgtcgccagcggaggcgtggcgtcttccagaatgctgcgctggatgcagacaggaccccgggacggggcacttctgccttcttggctgatatgaggctccgggcaacctgcccccagttctcgggaacccacctatcctccctccccatcctccctccctggagagggagtccccaccgccttccgcccagattccagtgccccccaccatgcctaacagccacacggcaatgtccactgcctgcccgcctccccaggccaggcacagccagggctgtttacctgtcgggttgggggccaccctggggggccctcccttgggcacacagagtgtaccgtctgcagacaggctgtgcccctcccaacactggcaccagtaactgccggcggtgttgacgcagcgctggggacagccgcccctcctagcactgcattcatccacatctgcaggaaacggggtgtcaggcggccatgcctgcgggaggggtcctgcccacacagctcccttcacaaccacccactcatgggccagcagtaaccccaggacatgcaaggaggtgcccaggacccttccagggccccccagggtagagccagcctcacctgactggcaagtgtcaccccgccatcctgcagggcagcggcagcggccaggctggacacagctccctccgttccggcatggcggctggcatattgctgtgggcgggggaggctggtcaccagctcagttgggtccccagcaccctgtgggggcagctgctagggagtgggtgctctgcggcaaggtggtgctttgctcggggttcaagaaaagcagcaggagcgttgctggaagattggggaacagtcgccctcctaacaccgggcgccgagggacatagccctcacctgctccacaggccccaggaagcccgctggtcctcttccagccggggcagcacgcgtagcgaggcctggcaggggccagcccagggctgcggcggtaggcggtcctatagatggttctgtggggtgggtgggacagctcagaggggcatcctactcccccttagtcacctgctgggcatctagagtcccctctcagagtgcacagggtcaccccagcatgcccccaagggtcttctcctcaagggatggcactgaggggtcactgcacagccgtttccctgcctgggccttccggtgctggccgggactcaagccacagcaggaaggcccagccacactccgcatggagcagaggcagtggccaggcctgtgtgtgcccccacctatctggtctcctactgtgggggcatccaggcccagaggagagggtgtgcccggcctacggcgagtcacggcagagtgtgggccctgggcatcggagcccttcttaaacctccagaagtctgaattcccaggcccctcccccagcagggggtggagctcccacacccaggaaggaggactctgagacttaggggtgtgtgccccttgtgtgggcatacaggacatttcagggtctcatctgtgcccactgggggccgtcatgtggaggggggtgcccagtggagtgggaccaggggagtcaggcaccattctgtgtatatgggaacttgcagccagggatgccagggtagggaggggttagtcccccggaagtggaggggtgcagacaggatgggtgacccctctaaacatggggatgctcttagaggtgcggtcctttgagacgtgtcggggcaagagcaaggattaggacactggaggtgatcgtggaaccccttggctccggccgccctgggtcgcccatctcaggcagccctctcatggctctggcctcagtttcccatcttgggtcccaggattcacccccgcctcgcccctgacatgctgatgtgtggccgacttgggaggctggggctgggtgagctcggtgtggtggggcactcaccggtaggtgctgcaggcccggtgcccgtcgcaggtggtgaggaagggctggtacacacgctgcacgaacgac

SEQ ID NO: 1883696 - DNA, 4001 bp, Homo sapiens
tgcttggccgggcgcggtggctcacgcctgtaatcccagcactttgggaggccgaggcgggcggatcacgaggtcaggagatcgagaccatcccggctaaaacggtgaaaccccgtctctactaaaaatacaaaaaattagccgggcgtagtggcgggcgcctgtagtcccagctacttgggaggctgaggcaggagaatggcgtgaacccgggaggcggagcttgcagtgagccgagatcccgccactgcactccagcctgggcgacagagcgagactccgtctcaaataaaaaaaaaaaaaagaatgaatgaatggactgatgtacagatagaatggcgaatgaatgaatgaatggatggatacacaaataaatgagtaacttgtaaccctaagagcagagataactgatggccactggtcagaacaaggctccccatccacacgcgcctggcctccttccttcccaggccaacccctccctctctgaccccgaagtggcagacctggctggcagggaatgcagacgccgtcgggcccccggatcagctccatggtgtcctcgttgacacgtaccaaccggatggggtacacgaaggacaggatgcggctattgaaaccacaggcccccacctgcgaaggccaagacttgggcctgggctctctcaccatgggcccaaaactggacaatgagggggaagtgggactccagcacccacactctcacgctcgaactctgccctcccctctgcatccagtgccttctgtgggccatccctgcagcagcctcgcccatccccaacctggccgcacctggctgtcgaagttgcccaggctacagttgcactctgtggccccgtagaactcagccacctggggtatgtggaagcggctggaaaagttggtccagatggactgccggaggccattgcctagtgccatgcgaacctggtgctggttttctgcctcccgcggtggctggttcaggaggtagcggcacagttcaccaatgtactgcacaatctgggggtgaacttggtgtgattcgaggctccagaggctgccctcactacactaggattctcctgatccctcaagcccctactctccccaggggctggccatgccatcctttccctctccgggtctcagccttcccatctgaacaatgggaactttgccacaaatgagccctttggaatgactggccacctcagctataagacagatgccccggagtgtagttgggaagagggtaactaggggaaagggacagctcacccttcccgctctcgctcaccgtgcagttgtacttgatacaatcgtcccagaaccgggaggctgagaacttcttccgaatcaccaccgtcatgccatgcagcaggcactggccgattcccacgatgtttcctggaggcagagggatggcccctgagggtcagcgagatgaagaccctccccggccccaaatcagtgatactgccatccagccaggcaggcttgtgctgccctgcaggcttctgcacctcacatctgcctgccttgggtgacctcctccaagaagcctccccggcttccatcaccaggctcttccctggtgctgccctcttgctccctgcctctctcctacactcacatatacacccgactctaagcacctggagggcaggagctatatttattcaagctgtcttcccttaagcccctacaaacaagcagcaatgccatgcatatctgtggaaacaaactgaaatgagacaggcccagatgccccgtgggacactgccacacacactgtgaggctggtgtgctcatccttttttcaatttaaaacaacttttttttttttttttgagacggagtctcgctctgtcgcccagcctggagtacagtgatgccatctcggctcactgcaagctccgccttccgggttcatgccattctcctgcatcatcctcccgagtagctgggactacaggcgcccgccaccacgcccggctaatttttttttttttttgtatttttagtagagatggggtttcatcgtgttagccaggatggtcttgatctcctgacctcgtgatccgcccgcctcggcctcccaaagtgttgggattacaggcgtgagccaccacacctggcctaaaacaaaattttttttagagacaggtctcaccatgttgcccaggctggccttaaactcccaggctcaagtgattctcctgtctcagccttcccagtagctgagaccataggcatgtgcaccacgcctggctaatcctgtttatttttatttttaaattaaattaaattaatttatttatttattttgagacagagtcttgccctgtcacccaggctgatgtgcaatggcacgatctaggctcactgcaacctttgcctcctgggttcaaaccattctcctgcctcagcctcctgggtagctgggattacaggcacccgccaccaagcccagctactttttgtacttttagtagagacagggtttcaccatgttaaccaggctggtctcgaactcctgacctcgtgatccactcacctcccaaagtgttgggattacaggcgtgagccactgcgcccagcctatttttattttttttgagacagtgtctcgctctgttgcccaggctggagtgcagtggcgtgatctcagctcactgcaacctttgcctcccaggttcaagcaattctcatgcctcagcctcacaggtagctgggattacaggcacacgccaccagacccagctaattttttttttttttgagacagtgtctcgctctgttgcccaggctggaatgcagtggcgtgatctcagctcactgcaacctttgcctcccaggttcaagcaattctcgtgcctcagcctcacagatagctgggactacaggcacacgccaccacacccagataatttctttcttttttttttttccgagacagagtcttgtactgttgcccaggctggagtgcagtggcacgatcttggctcactgcaagctccacctcccgggttcacgccattctcctgcctcaccctcccgagtagctgggcctacaggcatgagccaccacacctggctaattttttgtacttttagtagagacggggtttcaccgtgttagccaggatggtctcgaactcctggcctcaagtgatccgcccaccttggcctctcaaagtgctgggattacaggtgtgagccaccacacccagcctaatttttgtatttttagtagagatggggttttgccatgttggccaggctggtctcgaactcctggcctcaagtgatccgcccaccttggcctcccaaagtgctgggattacaggtgtgagtcactgcgcctggcccaaagctgtgtgtttctactgcagcacactgcctgatgggggtggggttcctagagacctggcaggtgctggaggctgtgtgacagccctagagttacctgctgagtggtagagggggaggcagtcatagacgatgtcgttgggccgcatgcggaatccatagtacaccagggcagccatgcggtaatacctgggaaggcacagggccaagggctgagcgggccctagaaaggcagaaggaggctccccagccctgcctgtgcctaccccaccctgggcacctgccccttacctgctgtgcaccacgatggcggccttgggcagccctgtggtgccggatgtgtagatgtagaacagtttatctaaagaaaacagacgcgagtggctgtcgggggcagctcagggctgggcaaagggtcacacaaatggacacctgcaggtgtgcacccttcaacacctgttcccatcacacccttgctaggaagcctgttctgataacctcagataccattcagctctaacaccggcatccattccaacaaatatttcctgggcccttgctctgtgctaggccctggtggagagagacatcagtgagtaagatgggcacgggcctggccctcttgg

SEQ ID NO: 1883697 - DNA, 4001 bp, Homo sapiens
ttcctcacagcagattccataacactcctgctgtggtctcaatgtgtgtccctcacaaaggatttcagaacacggctaagagggtatgaatgtttgtccctcatacagaattccagaacactgctacgagggtctgaatgctggtccctcacataggacaccagaacactgctacggttgtctgaatgtttgtcccttccataggattcctgaacactgcttcgagggtctgaatgtttgtccctcacattgcattccaaaacactcctgttgtgttctgtgagtttgaccctcacataggattccagaacaatcctgctgtggtgtgaatgcttgtccctcacatatggttccagaacactgttgctgggttctgagtgtttgtccctcacaagggattccagaacactgctacgagggtgtgaatgtttgtcccacacaaaggattccagaacactgctactggggtctaaatgtttgtccgtcacatagcattcctgaacaatgttacaagaatctgaatgtttgtacctcacataggattcctgaaccactgctacgagggtctgaatgtttgtccctcacatagaattccaaaatactcctgctgtgttctgagtgtttgtccctcacatagcattccagaacactgcagctagggtctaaatgtccgtcacataggattctggaaaactactatgaggttctgaatgtttgtctctcacacagaattccagaacactgctacgagtttctgaatgacagtccctcacataggattccagaatactgctgctggggtctgaatgcttgtccctcacataggattccagaactctgctgctggggtgtacatgtatgtccgtcacataggattccagaacactgctgctgggttctgagtgtttctcactcgcataggattccagaacactgctacaagtgtctgaatgtttgtctgtcacattggattccaaaacactcctgctgtgttctgagtgtttgttcctcacataagattgcagaacactcctgctgtggccggaaagtttgtccctcacataagattccagaacactgctgctggaatctgaatatttgtccctcaagtaggtttctagaacaatgctactattgtttgaatgtttgtccctcacatgggattccagaacgctcctgctgtggtctgaaagtttgtccctcacataggattcctgaacactgctacgagtgcctgcatgtttgtccctcacatcagattccaatacattcctgctgtgttctgagtatttctccctcacatatgattctagagcaatcctgctgtgatctgaatgtttgtccctcacatagggatccagaacactgttgctgggttcttaatgtttctccctaaagtagaactccagaacactgcctcgagggtgtgaatgcttgtccgtaacacaggattccagaacactctaactgttgtttgaatgtttgtccctcaaataggattccagaacagtgctgctggggtctacatgcatgtccgtcagagaggataccagaacactgatgctcggttctgagtgtttctccctcacatcgaattctagcacactgtgaccagtttctgaatgtttttctgtaacatgggattctagaacactcccgctgttatttgaatgtttgtccctcacataggattccagaacactgctatgagtgtctgaatgtttgtccctcacttaagattccagaacactgctatgagggtctgaatgtttttccctcacataggaatccagaacaccgttacgagggtcggattgttcgttcctctcaggggattcctgaacactcctgctgtggtctgaatgattgtctgtcaaacaggattccaggacactgctacgagggtctgaatgtttgtccctcacacagaattccagaacactgctacgtgggtctgaatgattgtccctcacgtaggattccagaacactgccatgagggtcttaatgtttgctcctcacttaggactccagaacattcctgctgtggtctgaatgtttctcccccacataggattcctgaacactgctatgagggtctggatgtttgtccctcacataggattccaaaacattcctgctgtgttccgagtgtttgtccctcacatacgattccagaacaatcctgctgtggtccgaatgtttgtccctcacatgcggttccagagcacagctgctgggttctgagtgtttctccctcacatagaattccagaacactgcgacgagtttctgaacgtttgtccataacattggattccaaaacactcttgctgttgtttgaatgtttgtccgtcacacaggattccagaatactgctgctggggtctgaatgtttgtcccttacgaaagattctagaacactgctatgattgtctgaatgtttgtctctaatacagggtcccagaacactgtgacgagtgtctgaatgtttgtccataatataggtttccagaacacagctgctgttgtttgtttttccctcacaggattccagaacaatactgcaattgtatgagcgtttgtccctcacattggattccagaacactgcttcgaggttctgaatgtttgtccctcacactgaattacagaacacagctggtggggtggaaatgtttgtccgtcacataggattccaggacagtgccacgagggtctgaaagtttgttcctcacaggggattccagatcactcccgatgtgtctgaatgtttgtccctcacacaggattgcataacactgctatgatggtctgaatgattgtcactcaagcagaattccagaacactgctactaggtctgaatgactttccctcacataggattccagaacattgctgctggtttctgaatgtttgtccttcacataagattccagaacactgctgctggtgtctacatgtatgtctgtcacatagaattccagaacactgctgctgggttctgagcatttctccctcatgcagaattccagaacactacaacgaggttctgaatgtttgcccataacacaggattccagaacactcccgctgttgtttgaatgtttgtcactcacataggattccagaacactaacacgagggtctgaatgtttgttcctcacataggattccagaacactgctacaagggtttgaatgtttgttcttcgttggggattccagaacactcctgctctggtatgaatgtttatccctcacatagaattccagaacactgctatgagggtctgaattttttgtccctcacacagaattccccaacactgctatgagggtctgaataattgccctaccatagggttccagaacactgctgctggggtccaaattattgtccctcagataggattccagaacatgctgatggggtctacatgtattgccgtcacataggattccagaacactgctgctagattctgcattttgctccctcacatagaattccagaagagtgcgacgagggtctgaatgttttttcatatcataggattccagaacactcctgctgttgtttgaatgtttgttcctcacacaggattccacaacacagctaaaaatgtctgaaagtttgtccctcagataggattccagaacactgcggctgtggtctgaatgtttgtccctcacataggattccagaacactgctatgattgtctgaatgtttgtccctcacatagcattccagaccactgctacaagggtctaaaggcttgttcctcacaaaggattccagagcacacctgctgtggtctgattgtttgttcctcacataggattcctgaacactgctgctagggtctgaatgttggccttcacataggattccagaaccctgatacgattgtctgaatgtttgtccctcacacagcactacagaacactgctacgagggtctgaatgtttgttcctcacatgggattccagaacactgcta

SEQ ID NO: 1883698 - DNA, 4001 bp, Homo sapiens
gaggagtctgttcccagaactgtagcacaaaagctagaggctgagtaggaacatcttaaactaagtcctcagtcttatttccagttttcttcctgtagatcggggcttaggacaccctgtcacattttcttcactcctccaccaggaattcctaaagtccatgctcttggatcctggcaaatccaggaggctgggggatgtggcaagcttcagcaagactgcctgggaccaaccctgcagccttaattcccaggcccgctcagcccagctggccagcaaaggcaggcagagcttctgtgtccacacatgagaatgacctgcagctgttctttgtccaggctgaggtccaggattcccattgcagctcctaggaaatctttaaaattaggtcggggatgagcctgtcagtagattaggtagggaacttttatgaagttgagggtgaaccatctggagggtgaactggctggtgtgattctagaactgggggtggtgcctagcagtgcatttgtgagaagacacagccaggcttggtatatgatgtggtgtgtgtgtatattcacaggcatcgtggagcatatacactttttttgtgtgtgttgaaataaaccttacagattacaaagtacttttttttttttttctgagacagggtctctctctgtcgcccagcctggagtgcagtggtacaatcatagctcactgcagcctcgatctcccaagctcaagtgatcctcccgcctcagcctcccatgtagctgggactacaggtgtgtgacaccatgactggctattttattttatttttgtagagatggaatctcacaatattgcccaggctgatctcaaactcttgggctcaagcagtcctctcgcgtcagcctaccaaagtgctaggattacaggcatgagccaccacgcccagccagattacaaaatactttgacatcttttctctacagccctcaaaaggaggcagggcaagcacaattaaatcccattacaaatggggtgactgaagctccattcatggcttgcccagggtcacacaaagaatgaatagcagatccctgagcctgtgtgcttccctctgtgccaggctgctttacccaggcatgggtgcacgttgtgcatgggacatttctcctttgttgtgtcctgagtaccttaagccactcagatattgctcaggtggagtgaggggaaaatgttttcaggttgtattagtcaaaacaaaataccacacactgggcgactttaaaatcatacatttatccctcacagttctggaggcttggaagtccaagttcaaggtggcagctggacaggttcctggtgagggctctcttcctggtttgcagacagccaccttctcttcgcatcctcacttggtgggaaaagacagaggagagaaagagagagagagaaaaatgagatagagagagagagagaaatgagatagagagaaatgagagagagagagagagagagagagagagggagacacagagacaatgctctcttttcttaccagatctataatgagggccccaccccatgacctcatctaaccgtaattacctaccaaaggcccatctccacataccatcacattaggggttagggtttcaacataagcatttggagaggacataaacattctgtctacaacatgagtggagatccatctcttctttacctctggtaaggggaccacacgctgcagccagcgagacagtggcatgttcttgttacaactcgatctaactcccccagaagaggaggcagggaaggcggacaaaactgggagagggagagagtgttaggaagagagtagggtggccagaggcagcaaataaaatataaaatgcttaattctgaatctcagataaacaaccaataatgttttttagcataagtatgtcccaaactaagcttgggacatatttatgctacgaaattattcgttgtttatctaaaattcaaactagctgggcatcctgtcttttaatctggcaaccctaaaaggcaagggccaaaaatgccggaggcaagccaacggattccaggagggacaactgctggactttggactgatgatgctctttttatatatttaactttttaaaaaagcctcttttctttctttttaccagcttttcactagctttttaaaaattgtggtaaaacatacataacctaaaattcaccgtctaaaccatttttcagcatacagttcagtgggattaagtagattcacaccgttgtgccgccatcactaccactcatttccagcacccttccatcaccccagcctgaaactctacccattgaacacgagctgcccaactccgccttgcttccccattcctggcgaccactgcttctgtctctgtgaattttgactattctaggcacttcacaaaactggactcatacgatatctgtagttttgcgtctggcttctctattgaattcttaaaggggggtgggaactaagcagatcacaagggagctgcccacagaggtaaagacaaggtcaggtaggctgagagacgcaggaaagcgggtcaaggcgtagggctggagggcaggggcgggccctgggcgtgggctgggggtcctgccccggggcgcaccccgggcgagggctgcccggaggagccgaggttggcggacagcttggccctgagcttgaggggaaggcagcgatgggacaaaggacggaggtctaggaagagggtctgcagagcagaaagcacgggtaggggcggcctgacgctcggaagacaacggatgggagccgtgtgcacgtcgggagctcggagtgagcgtgagttccgtgcccaggcccgcgactcggcccgacaggacagcgctccgggtcgacggggtcctggagccgcgctcggggaggcgtcttgggctcgccccggagcttcctccctggagccgcgccctgcacccggccttgcccggccctagcagggaagccaaggcttgtggggcgcagggacccgggctctgcggggtcccggttccgcctccccactcctgcgtcttcccgcccctgccgggttctgggaagcctcgcgcggctcttccgcagctgctgcccgcccggagctcctggtccctcgtaggggaccccacttctctgacaccgctttgggttcccggggcctacagcgaggcttgtaactccgggagagaccctggagcggggtgtgggagaacggtctggaggaagggctccgagcacttcgaaagtataaaccgcggtcccaaagaggcgtgctgtgtctgcattttcctgggagtgcacggtttacattctcgaaagcagtgctgtcgactagaaatattgagcgatacacatgtacaagttttgtcacttaaaaagaatttgaaaaaacttcatagatgcaaaaaaaaaaaaaaacccaccattattaaagaatacttaggtatttgtggaatgcattgaagagttaacaaaatggataggcaggaaatatcgcagacctagaatgaattacagttacccactgtggaactgaggagctagggtttctcataaaactccctgatagaagacgacttttgataaaattttttttccgccaacaaaatcccctgtcttctcaactagttactgtctgtccactaaataagaggtggtccgtcacttcttcagatgagcaactacaggcttttcaaaagataattgctaatcaacccctttgtgcctgggttttcttatttgtaaaaatagatactactacctaactccaaagtgtgtggtgaagacaaacaattggggtgatgtatactaaagtaacgaaagtgttgaccacacactacgggctggttagtgttagattcccttgtttttccctcagtatcaaaaacagatctaatttaggtttacataaagacaaagtatgaagataaggtgacttacagttggtactactaacaaaatgtttgggctaatattt

SEQ ID NO: 1883699 - DNA, 4001 bp, Homo sapiens; identical to SEQ ID NO: 1883698

SEQ ID NO: 1883700 - DNA, 4001 bp, Homo sapiens; identical to SEQ ID NO: 1883698

SEQ ID NO: 1883701 - DNA, 4001 bp, Homo sapiens
tgggctggtccttacaccctcaggcccttctctctggcctgcagaacaccatcctgaaggaccaggaggaagacagtgacatcctgacatcttcagaagcccttgaagaggaggccaagctggacgtggtcacccctgagtccttcacccagctgagccgcgtggggaagcccctgattgaggacccagctgtggatgtgatcaggaagctcctgcagtgagtggccccagggtgcacctaaggctctgccacccctgcccctggccctggaccttcagggaccagctttggggccccacacactggggttcccacgtgagtccacccctgagagcctgtgacctcaggcaaagggcttccccacccagagccccagtttctcatctgaaatggggctcgtgacaggactgactgacgtggcgctgaggactaactgggatgctgctcagagcctggcctgagctacccccatggtcaccggagaagagctcacaccctttcctttggtttcagacttcccaacacaaaatggccaacccaccattgtgacaaagatccgtcccagacaggtagaggcgcatgggcctgtgggtctcggggcagcagtgaggcaggggctggtggtgctgtgtgctcacctcctgtcctctgctcctgtcctgggccctcgtcacccaaaggcttcaagcgacatcggtgccagccagaaaactctgggaagaaggctgtacccagtgccagtgctacctctgcaggcaggtaggacacaaagcagccagaatcgccccttcccagtccatccccccacacaaaggcaggagatgacctatggctttcccaggcttttcctcagaaggcaccacaatgctcatggctctgggactccacggggcgcagtgaggggtgagcgccatccttagtttgctggttgtccatggtgctgatggatctcagccgtgccaccttccacacacggtcatggttagaaagacggggcagatggctttcctggagagacatcacagagccacagaaagagttctgggccttggcgccctgcccaccaagcctcagtggggttgttagactcaaagtttaccccacatgcatattttatggaaggtgcatatcagaagccccatggctgagtagactcactagctctttgtgtcagcctggttgacatgggtttgttcctggttttgagaaggcaaggggaatccctgctttgcctttccctccagaaggtctttttgagcatgcgtgctgtgtgcaatggggaaagaaacaaagaccagccacatgagaagagcaaaggctattgactcagagctgaccacagcagggagtcagtcaccatccagggtgtttcagcagagctcccagggcaggcagaggagtgggaagcattgccctcctctccagctgtgcgctggttgggggctgctgtcatgaggaagctggaggttgcccactgaaagcagggcatcccacgtgattggttacgggacatgtttggctttctctggttggtccaaagttggaaatgaggacaaaaattagggaagctgtcatttattaattaagtcctggccatttgggacctactgttataggtgatattgtgtagcttcctggactgtccccaaagatgacaatctcacttcctgcaaatctgacttagagcaggctgacttcctgggtggcttcttggagataaggtgggggtggccttctgggtaggttgctgcacatcatggggcagagctctattttttatatgatccagccatgacctgtttacatgttcagtctctgagaggttacgaaacaaagtccatgtcactagggctgccagataaaagagagggtgcccatctacactggaatttcagatcaacaccacctaattttttagcataagtatgtcccaaatactgcatgtgatacactaatgctgaaaattacggtgtttatatgaaattcaagtttaaatgggcgtgctgtattgttatggctaaatctggcaaccctacctgtggctcaatgtttttttttctttgggtcctcatcacggggaagcaggaatgcaaatttctgggcctgagcacctccaccccttgccctctcacagcagctgtggttgggtttcagcagttaaggtggttaagatttcaccttacggtaaggtagactcacagctgttgagaagggaaacgccccaaagggctaggccctagaaatggaagtccggttgcccacgggcaggcccaatgcctccagaaacccaggcagggatcctgcaggctcagacctgccttgcgtctgtccacagcctccagaccacccacccacctttgtcccacagcttcacaccgcaccccaagcccaacaaaatggagagaaagtaccgggtgcttggggacaagcctccccctgctgccgagtgagtaacaacgcctttccttttgactgcatttaacctgttttgggttgcaggggcagcaaatgtgactcagctgaggggaaaaatcagaaaggggaaaggcaggtccaagcagaggaggggtgagaggagatagcaaggtcaaggtcagtttgtctcagcccatttcacctaaatttgttgagaaacattttcatcaacatttcacattttccaagctaacaagcatttcctggtggtagggcaggagaccccattcgaggtctgaacttttttttgtaatttttttcagtgctttcccccatttctcttttcctttattgtaactccagtgattaaaacaaaagctgttcaacttagtatagcttcattgcaagcaaacaagcaaaattccaaggtcagaaaacaaaaagccttcggagaaagtcaagcaccacaaaggagctcccactcccactatgtcagagatccccccagacagcggccccctctcatcagccctctcaccctggagacctcgtctctgggggtcatgaacttggcagagaaggatggctgtgacatcaggcaacccaggtgtggcctccagctggcaggtagacagttccctcgtcccacacccaaggacgctcctgcaccctgaatacttcggctctctattttttatagctcgatgcaggaggatgtttggtcctacatgaagtcctgttcatttgattactatttaggagtaatcattctttcagctaatcgaggcactgcccggtacaggcactgccatggggctggggattccatggtgaacaagtacagacaggtccatgtcctgtgtcaaaagataaactcaggcacattaaaatgttgatgagtttatttgaacagtcagtcattcatgaattgggcagtgccagaccccaggcggttcagggatccaccgagggaacaccaggggacaccttttataaggtgtttatagaaggaaggcaaagaaaatatttgcttggttaaagtgaaaagttccaagttggctatttctgattggttaagcttacatttcattttcctagactatgaccattcattctgagttacgtttgttttctagctagaaactccaggcactggaaccgtgtcagcctgatggcctcctgtttatgatcttaaacacctggtggcctttacagtctgctgggagagatggaggttaatcagccagtcacacaaatcaatcccaaatccacctgattagcatgtcataaggctgagggggcattaatccaagatcattaaagccaggtggtcagaaattgcagctgagctggggtctgaggaagggcaggaacaaatacaaccaagaagagaagaaagttagctgctgttatggagtggaatcagagtgtgcagaggtcctggggcagcagtgagtaatttcaaggagtgtcacggccaaaacagagcacttggaaagttctgttcatgtggttttgtccatgtttgtgtgtctagaccaggcccctcagggatctgtctcgtgtgtgttgcagggattttaag

SEQ ID NO: 1883702 - DNA, 4001 bp, Homo sapiens; identical to SEQ ID NO: 1883698

SEQ ID NO: 1883703 - DNA, 4001 bp, Homo sapiens
cacatatgcatcacccagggtgtgcctgccgcagtgaaaaacagagacaaggggtagctaggtcttctctttactaaaaatttcatttgttgattatctaaccacctatctaaaagagtcccagatacatctaaaattttactaaagatcagcagaataaaaagctgagaacagaatccaggtcttctaactcccagtccaataggcctccaagtaaaaatggcagtgatgatgaataataatgcataaatagctaacgttcattgagcccttactatgtgtcaagcatcattctaaggactgtgtttatgtattatcatttaattctcacaaagaccttaaaagatagctatcactggtaccatttctcttttgtagatgaggaaactgaggctcagaggtattaagagactcgtctcatatgccacaaataagaagtggcagagatagtatttgaactcagatctctaagatgccagaactaaactatactgttaaataccagcccctgttctcagacagacagacagagaggatggcccaattcagtgctttgggggcatagaggaaggtgatcttacctgaccttgtgtgattaagggggagaagaccaaagaagccttcctggaggaggtgatgtctgggctgactctgaaatgacccaacttcaacactgtttactgagtgttcacaggtgccaagcaatctgccagccctctaacatgccttatgtcattaaaccaggccaccttgggatagaagcatcagcgtccccatgtgatcaatgaggaaagggaagttaaggagagtgaagttcagagcaaaggtcaccaccccaagccttccagcttgtgagtggaaacaggactcgaactcagggcactctgagtctaaagcaggcacggggcctcagcccacaatgggtgtgctcagaagtagggtgggaggatgacaggatgggagtgccctgaggatgtcaggaagggctgagggatgcagaggtcacggatacctggattccagtccctgctctcccaccaatcctttgaaagaccttgggcagtcattcgccttccccatcggcaccatggaatgactggatgaaggccccttcagacctaggattccatgttcatgtccacctccagtggcctggcccagtgcagagctgttttctcaccctgcacctcaccatgcaccttctggctgtccatcctccagagtcaagctcacacaccaaagcccacctccaagacccattacaatccatcccccaactttcctttccccctcactcccccaaacccaagctcttgtcttactgaacatgactgaaagttcaggtggcctgcagggccctgaagggctaaatggaagtcaacactatcacctctgttctattccctgactctccacctctctctccatgaagccagaaaaatgggaggcattcttgcctcctcagcctcaggcctgaccagtgactgtgcattacgtcctgcagattgtctctgaaatgtctgttgacctccctccccatgagtcctcactgccaccaccctagccaggccacatctcttccctcagctcattgcagcaccttcccaaaagggctctctccctcccacattgcccctccagttccctcccaacagccactatactatataaacagattttttttttgcaaaagtagtattttattacagaagactatctaatttacaaatcaatacagtagatatttcgaagaaaacatttaagcatcatgaaagaatgcatgaatataaaaaaaaactcaatgtgcaagattcaacaaggaaatgcacaggaaaacttatttttgaattatgtggttgttactatgccactgagaaggcaaaatagaactcctcttccagaggccaaaaatggaaggagaccttcagaatctagcagaagcatttccacacactggcttccatagtctggtgtgtgtgcagaaatgttgtctttagattcagggagtgtttgctctttggaaggaaaggagtgaagacatttcatttggctgccctttggggttttctgctgctttttggtgggctgctgttatcggttgattctcaggagcttctgaggctcattggaatccacagtctctcaagatgcagggtttgtttttgtttttccaatcaatggttacatcactttttctaacagaatgaacagcaaccacctcataactattaggatggctactattaaaacacacacacacacacacacacagaaaaaaatagtgaatcagaacccttgcccacttttgatgggaatagaaaatggtgcagccactatggaaaacagtacagccattcctcaaaaaattaaacatagaattaaaatatgatccagcaattgcacttctaggtatatgcccaaaagaattgaaagcacagacctggacatgtaaatccacgtacataacagcattattcacaataaccaagaggtagaagcaacccaagtgcccagtgtccatcaatggatgagcagataagcaaaatagggtttataccttcaatgggatattgtttggaaaacgaaggaaattgtgatgcatgttacaatgcaagaggaatcttaagggcattatgttaggtgaaataggcatgttataatatggcaaacactaaatgtttccacttatataaggtacctaaggtagtcaaactcatagaaacagaaagtaagatgctagttgccagtgggtagggagagggaggaatgtggagtgattgtttaacgtgtacagtttcagttcgggaaaatgaaaagcattctggagatggatggtggtaatggttgcacaatgtgaatgtacttaaagacactgaactgcacacttaaaaatgattaagatggtaagttttatgttatgtgtattttgccataattttttttaaactttaaatgtattttttaaaaaaggaatggacagtgaaagatgtggctccagccactacaaagtttacaagaaccactagtgaaataagttccttcttttttgtattttttaaaatattttaacttttattttaggttcaggggcacatgtgccagtttgttatacaggtaaactcatgacttggggatttggcatacagattattttgtcacctgggtattaagcatagtacccaacaggtttgtttttgtttgtttgtttgtttttgtttttgtttttgttttttcagaagctccctctcctatcttcctccctcaagtaggccccagtgtgtgttgttctcccttttggttcatctgttctcatcatttagctcccacttataagggcaaacatgtagtatctggttttctgttcctgtgttagtttgctgagaataatggcctccatctccatctatgttcctgcaaaggacatgatgtcattctttttaatggctgcatagtattccatggtgtatatgtaccacattttctttatccagtctaccattgatgagcatttgcaaactatacatctgacaaagatctaatatccagaatctacaaggaacttaaacaaatgtacaagcaaaaaaacagacaaccccatgaaaaagtgggcaaaggacataagcagatacttttcaaaagaagacatacatgtggccaaaatacatataaaaacacactcagtattaatcatcattacagaaatgcaaatcaaaacctcagtgagataccatcccacaccagtcagaatggctattatggatcaatcaacatataacattttgaaacattctggaaataagagtgtagataaatcaagattagtcaggagttgaccattgttaaagccagacaatgggaccatggggttttattatgccattctctctaatattgtatacgcttgaagattcccatattaaaggggatttttgtaaaaaacaaaaaaaaaagttaaaaaataacatgctggcaagattgtaaagaaaagggaatgcttactc

SEQ ID NO: 1883704 - DNA, 4001 bp, Homo sapiens
attcatattaagtcatactatatagccatttaaaagaatgacgagtacataaaagactgttgtggaagtctatgatatatagctgaataacaaaatagattatagaacaataggtaaaaatgagcttatttttgtctaagccactctccccccaaaacatgcaaaattacagctatttatctgtgtatgtatggataaaggtcttcaaggatataaaataaattctagttatgatatttattatcttaataagtttattataattatacatgttttcctccgaggaaatggattgcagatgatgattgaagggattttcaatttttactttgtatatttttgtatttgaatttctaaataataagcatatgattctgtttagaaattctgaatgtactgatttttaaaatgtgatgtgatatccagatatgtatttaattcttcctataaaatatcatttccttaaatctagactattgaaaaaggagaaaagtactaggaatttagagaacttactccatgttagaaccaaggagaacaagaaaagctttagctagtgttttggaaatagtagcagctcccactcacagcagtagctgctgcactcaggcgactctctgcacatgcttttgcttcctttgggttgtttggtccgcagtttgcattcattgatcagtgagttgattcagactcaaacccaccgacagcaatgaatgttgagtgcagccatcagtgttttcagttggtggggttgcctttgccctccctggctgactcctggctcttcttttccatctcagttctttgaagtctgtgtgtctggcttctcccttagtaaccagccatctgcatgattgagggcccacacaggtgtccataacattgacattggagctgggaggttattgcagatgaggaagctgtggttcagagaaggaaggagtgcttggagaacctcacaggtagcactgcgccacacaggcagtgcttgcatattagtacctgtaaaccacagctgagggacctgcttttcctctttgttttgaactgagaagtatgagtgcttttttgaggtaaattagcagattatgttggagtttaataataacagcttacatatattgagcatttgctgtgggctagtaatggtacaaagcaccttatatattatctcattgagtctcaaaactccatgataggtactcttagcctctgttttatatgtgagaaaactgagacacttgcttagggggtcaaataactagttaagggcttgagccaagattcatcccagatctgactgactccagggctaagtttttgcttgaatttagcaaacatttaaataagcatatgtggggatatgtgggcactagtaaggcaatagctcatgctctaactgggatatcaaaaattaaccatattaactataattcaaagtgaaatgtgataagaactgtcacaattggataattttgtgctatttttgcttattaaatcctccccttgcccctaattaaaaattttgagaggatgtgggagaaatgggagtaattatttaactggattttattccaaaacaaaatacgtatttttaataaatttttacttgctacgtcctgtttctcaccagaatggtgcatatctaggagacatgtaggtacattagatatcatcatggactgctccttaccttgttgaaatgaaacactttttttgtaaaaacaaacaaataataataaaacacacaacagaaagcaaggaacagtgagcagtaggaataaaattcactggaccacatttgggggattgcaggaccatttctggtgaactcatgtgacatgtgaaggtacagcttgctcttttgcttcaggaaatgtagtgtcgtctgtaaggaccccaaggtacagtcaacggtcagtggttttttcaaatcccaaactcaccgacagcgttgaatgttccttggagtcctctgaaggctggcctgatagcccttcttcattctcccatccacatcccaagaaccagtgagcagtgagaccaccgctgatggatgctcttacattcctctctgggtttcaagtcgagagtatttaaattataaaatcaatttgtgtgcagcagagaactaatgaactgtgggatagactgtgcagtaatttgtacaagcagactcaaatgaatgtctgagaaaatgtctttgaatggtattattttgtgattctaaaaatgtaaaatacctgattttgcagtagtattttaattgttaacaagggtaagagattaacatatattggggatctgctatatactaggatttgtatattttatctcattaaattctcaacaacccacattttcctgatgaaaaaacttgaagtgatttgcctaaagttacattgccaggagccaaggttataagccagaatttgaatactggacttcatgtttccagtgctcactcatcatactgcttctgttgtctactacagaacttactgttgatatctaggagtagacccatcactgcagagccaaagtcaaacatgtaaatttcttctacttgtttgcctataataatagcaggtaggtctataggtgaggtcataggggaagatgaaaaacctcgacctccatgattgatgatctcctttgctgagatcctgcattactaagttaccacagaggtgttagtgatagtccacaagctattttccatattgaaaaagcaaaaaataaaccaaaaacccaccacctaatgtaaagcttgcatttcttcttagttgagaacacagagtgtaactaaaatgtcagatgtcatttgttctggctgaaacgataccagtacattataggacatagtggttatttttgattctgttgaatgtctgtgatgaaaaatttgaaaaatgaattaataatatgaatcttcagaatatgtgatttacaatgggacagatctaggaatacttaataggaaaagggcttacagaactgcctgctgaattgaagttaatctctaaatggggatagttattactatttgctttaggtttaaatactaaaggctgactggtctcaaattcatttttaaagcagccaaatggtacacgttaaaagaaaaaatatcaaccactgagatttaggtttgaatgtaaactgtttaccttctatatcagtttaattcaccctctgtcaaaactctgcattagccagctttgttgagttttcagtgttatgacagtaaattgtatacacacacaaaaaatcaggcaactgtaactgtgtaatatgtttaaaactttttaatgggtttattttaaaaagtcttcctcttggtccaataatataaagcgatgtcaagccttatactatttggataaatatttagactttaaaaaaaatactgattttgacttcaccaaacctttagatgcttacaaaatattattccttaaattcatagcattctaaaaagaatgcttttcacagacttgaaaaactacagaaaggtaggtttctggaatgacatggggtgttgcccactgtatttgaaataattgtgtatcatggcataatggccttcatcatcctcattcctttaagttctttagtttttatcatcaagcaagtttgagcacacatttgggttttttaagtgagtttggctaaggggtttatatactcggtgcaaggataaagtctaagggttaaaaaaagttaagggttaaattagctaagagtgaccaggcagggtggcacatgtaatcccagcactttcggaggctgaggagggaggattccttaagcccaagagtttgaggttacagtgagttgtgatccaccactgcactccagcctgggtgacagagtgagaatctgtctctaaaaaaaaaaattataggctgacatttaacaagccaatccaactatttaactcttgatttagattggttttgagtttgttagaactcaccatgccattccttaatttcaca

SEQ ID NO: 1883705 - DNA, 4001 bp, Homo sapiens
tcgaatcgtcatgtgaataacgtctgctcggcatgaaggctcagagccatgctaggaaggattaactcgtaggctgaccactaacatcctttgtggtacgagggagaaacattcccaagtatcattttattcacacttaattttctatcccatacccccaaaataaggctagctatttaattagttggctgcttttctcttaatttttagtgtttctgttgataatgtgtaagtttgggaaaatgctaagtagcttttcacttagaacactgttattttctctttaaagttttctaccttacatttattatagcatagttatctttatagcatagatgcagaaagtaagagagagcttgttttttcaagaaaacaaccctttaaaatactttccaacccatgaagggaaaaatcctccttttttcccccaagtgcattctacttattactttgcatttttctcccaaagtccaaatttatgcaaagaaaatagaaacaagttcaaatgcaatgcattaaccaaataaaacaagtctgcttcaaattaggaaccaacctaagcatttgtaaagtgtagcagaatcagaattcttttaaaaattagatttggaacctgaactatataattcataattctcatttttctgtggaaaattattttatctttctcctgtatacctgaaaaaatgtccataggcttaaagggtcatgcttttacattccttccatatcacaggtactatgaagtaaggagacttttaggtttctttttgtcttaaactcagacagctttgtaagcagtagtgtgtagattacaagagttagacaaaagcaggcgcgactgagaagagttggtgggggagaagcttggggcacttcctgtcactcaacacattccagatcactaaaaaatttccacaccctctgcattcccccttgcccactccagttcccggtattttctgattccatatgttgtggtatttaccatacttctctccctcactaggctctggcaagactgcttcagaggggatgcattcctttagattgcacaaagcggagctgggaaaatggctggcagtttcagaatctagtcacgatcgcacgcatgagcacctcacacatccatgtccctacccgcccccccgctcccgcccctgcagctggctgacctgtctcacccactgctggcctatcgaacggccaggactgtctggttttggctcgtgcctttgtccatgtctggcttagttcctctctgtctatgcttgcctctacccccaccgccccaggcggcacaagtgtttggccacacaaaactagagatagaaaaggtggtaaaaacttcaaacttttctaaattctccaacagtttatttcttgtgaatttcttccttctttaaatactccattttaagaaaacaaaaaaattaattatctaaaggcaaagaatggaaagcaacctttgtgttccttataataactgacttcataactctctccagctgcgttatgggatgtgtataaaaagcttctgttctgagaacaaaggagcacgtgcagaaatgagacgaaaaaatccactgacagtattccattacacaaattacttaaaagattttagtcaagcccctcaacagattcaattttaaaatggcttttagttaaaaaaaaaaaattgaaagtgcttacccagtaaaagaaccgaagtagtcctgaactgttacgtaagactttttacagttggatctttgtcaaaaggggatgggggtgatgggagaaagcagcaacgacaatcaaaaaagttcgagctgctgtggctagaggacaacttctgtgtttccagataggattcttgctgtagaaatggaacttccagccagcacagcatcctgtcccagtagagaaatgagtttgtcagttaaaacaaaaaaaaaattagatactggaacccaggctagacgaggtattgaaccgcgccagatttccttgcagccctgtctgctcagctcgcattgaactatatatgacccagatgatggacagaagcacatttagtcatgtgcacactggaagaaagcggatttgctggtccctggcagtgcaggggtttgtcttctgattgggctgtgccctgatcggtgaaatgtgaagccctcaccattcagaggccgtaattcaggactggcagtttgagtgtctggctgcctctagtcactgagagactttgaaggtgttgcttttgtttggtggcattacccacccagaggttgcttacacctctctacttgtgtcagaagaaatactagtctttctgaaatacaaataggcagccgatttttcctgaatcctaaatcaccctattgttgataaacttggctctaactgaaaccaattatttgatttgaaaatttattgtgatcctaaccaagcttcatatccagaccaacccttggtcttgattttataggtttgataaggtaaaaataaaagtggcatatttgactttgaagcctctatatgatataaattgctcttaatgaaaattggatagatggacaacagagaagtgaagttttagattctggagtgtttggatgtatgaggaagaagctttatgtctttttatcccctttgtgagactgtcactcttgtcccagtcctagtcacattaggggttgctgggggggggaagctatgaaagcatggaccctactgagctgtgacatagcctttaatcatgcaagacagccacggtctgctctcttcagtctgtctgaactagggtccttggggtttattttccatctttctgagccactgggaaaccaggtcattatacaggactgtcatttgtgacatttttgtttagtacatggcagttgctttgtttatttaatgcaagttgacacttctttaaagtttcaaaacagtaaagttgttttgtgagaccttgactctgatatatgaaatctactctacatggaccaatcatttttttccgtggactttcttgtctctttagaaattagcttatagagtcctaaattgatacttaaacataccaatagttctgtttatttcttgcctttctcacagttgttgaaataattccatctgtctcttttgctgtaaattttgggtttggatgtttgtacttggaattttttagatgttgactatattatgcagcaccttccatatgaggactaccccagaattattctcttgtcttaacccgagaaaagctgttttgatgcactattagatataagaatgttcgaaagaagaggagatgagcactctcttgctttttgtaagccacaagacaatcttttttttttctaagttgtggtaaggtatatgtaacataaaattgactgttgtaataatttttaagtgtatagttctgtggtgttaagtgcattcacgttgttttgcagccttcaccaccatccatccaccacagaactcttctcctcttgcaaaactgaaattctctacctacctgttaaacactaacttgccattcttccctcccccaggccctggggacaaccatcattctactttctctttgattttttgttttttgtttttggagacggaattttactcttgttgcccaagctgggatgcaatggcactgtcttggctcactgcaacttccgcctcctgggttcaagcaattctccttcctcagcctcctgagtagctgggactacaggtgcccaccaccacgcctggctagtttttgtatttttagtagacacggggtttcaccatgttggccaggctggtctcgaactcgtgatctcaagtgatccacccaccttggcctcccaaaatcctagaattacaggcatgagcccaccgtgcctagcctctgtctgtttgctttttgactactctagatacctcatataagtggaataatacaagatgtgttcccttttgacaggcttatttcacttagcatggtgtcctcaaggttcatg

SEQ ID NO: 1883706 - DNA, 4001 bp, Homo sapiens
ctaccagtctcacaaaaaactcttctataaagaccccctcgggccgggcgcggtgactcatgcctataatcccagcaatttgggcggccgaggcgggcggatcacttgaggtcaggagtctgagaccagcctggccaacatggctctactaaaaacacatttcttctaaaaacacaaaaattgactgggtgtggtggcgggccagctacttgagaggctgaggcacgagaatcacttgaacccaggaagcagaggttgcagtgagccgagatcgcatcactgtactccagcctgggaaacagagcaagactgtctcaaaaaaacaaacaaacgaaagaaaaacacacacaaaaaaaccttttggtaatttctttgggtaggttttagttttttagatagcgtaaatccaaatccattcatttccataaaacatcagacacaatttgatgtatatttggccaccaaacatggtgcaaaattttatgtagtctggagatacttaaaagcagcacaaatgtgactctacctgtctgcactcagcagaatagtggcgatttcaggtggtgacacaaaaggttgggcaatagttgaaaagtggatgacatgaaatgtggtggtgggatgggggcaggaagccgatgttaagctagtgaactttatttactttgcttccagcttccagtgacccaaaatcacctcgtctagagtagggctcaggaatttgccattttaaaagcaactctagatgattctggtgtacaagaagtttgggaaacactggcttgaacctgatattttctctgaactctcatagttttctttagatttttcttttggctttgatttctctttctggttcttgtctcattaccccatcacttctccttcctaatttgacaggaaagccttgtcaaattaaggcttgcttaattgtcaaggctaatttgacaagactcttctcttactgtcttatttgacttttgctatgagaatctgcttcttcttagacttaagtgtatgataaattattcatgaccaagggccttgtttttctttctttaacatgggatttagtggcttatctcatgttacaggatttagagagttgatactacatttaaattttttgttaagaaaaatgtacatcttctatctcacttaggtgtttttcctgtttgagggacatggtttgcaaaggttagaatgaatgagcctcatagtttttgtcaaaagagaatattgatgtacatctgaataataaccagaacattcatattaagtcatactatatagccatttaaaagaatgacgagtacataaaagactgttgtggaagtctatgatatatagctgaataacaaaatagattatagaacaataggtaaaaatgagcttatttttgtctaagccactctccccccaaaacatgcaaaattacagctatttatctgtgtatgtatggataaaggtcttcaaggatataaaataaattctagttatgatatttattatcttaataagtttattataattatacatgttttcctccgaggaaatggattgcagatgatgattgaagggattttcaatttttactttgtatatttttgtatttgaatttctaaataataagcatatgattctgtttagaaattctgaatgtactgatttttaaaatgtgatgtgatatccagatatgtatttaattcttcctataaaatatcatttccttaaatctagactattgaaaaaggagaaaagtactaggaatttagagaacttactccatgttagaaccaaggagaacaagaaaagctttagctagtgttttggaaatagtagcagctcccactcacagcagtagctgctgcactcaggcgactctctgcacatgcttttgcttcctttgggttgtttggtccgcagtttgcattcattgatcagtgagttgattcagactcaaacccaccgacagcaatgaatgttgagtgcagccatcagtgttttcagttggtggggttgcctttgccctccctggctgactcctggctcttcttttccatctcagttctttgaagtctgtgtgtctggcttctcccttagtaaccagccatctgcatgattgagggcccacacaggtgtccataacattgacattggagctgggaggttattgcagatgaggaagctgtggttcagagaaggaaggagtgcttggagaacctcacaggtagcactgcgccacacaggcagtgcttgcatattagtacctgtaaaccacagctgagggacctgcttttcctctttgttttgaactgagaagtatgagtgcttttttgaggtaaattagcagattatgttggagtttaataataacagcttacatatattgagcatttgctgtgggctagtaatggtacaaagcaccttatatattatctcattgagtctcaaaactccatgataggtactcttagcctctgttttatatgtgagaaaactgagacacttgcttagggggtcaaataactagttaagggcttgagccaagattcatcccagatctgactgactccagggctaagtttttgcttgaatttagcaaacatttaaataagcatatgtggggatatgtgggcactagtaaggcaatagctcatgctctaactgggatatcaaaaattaaccatattaactataattcaaagtgaaatgtgataagaactgtcacaattggataattttgtgctatttttgcttattaaatcctccccttgcccctaattaaaaattttgagaggatgtgggagaaatgggagtaattatttaactggattttattccaaaacaaaatacgtatttttaataaatttttacttgctacgtcctgtttctcaccagaatggtgcatatctaggagacatgtaggtacattagatatcatcatggactgctccttaccttgttgaaatgaaacactttttttgtaaaaacaaacaaataataataaaacacacaacagaaagcaaggaacagtgagcagtaggaataaaattcactggaccacatttgggggattgcaggaccatttctggtgaactcatgtgacatgtgaaggtacagcttgctcttttgcttcaggaaatgtagtgtcgtctgtaaggaccccaaggtacagtcaacggtcagtggttttttcaaatcccaaactcaccgacagcgttgaatgttccttggagtcctctgaaggctggcctgatagcccttcttcattctcccatccacatcccaagaaccagtgagcagtgagaccaccgctgatggatgctcttacattcctctctgggtttcaagtcgagagtatttaaattataaaatcaatttgtgtgcagcagagaactaatgaactgtgggatagactgtgcagtaatttgtacaagcagactcaaatgaatgtctgagaaaatgtctttgaatggtattattttgtgattctaaaaatgtaaaatacctgattttgcagtagtattttaattgttaacaagggtaagagattaacatatattggggatctgctatatactaggatttgtatattttatctcattaaattctcaacaacccacattttcctgatgaaaaaacttgaagtgatttgcctaaagttacattgccaggagccaaggttataagccagaatttgaatactggacttcatgtttccagtgctcactcatcatactgcttctgttgtctactacagaacttactgttgatatctaggagtagacccatcactgcagagccaaagtcaaacatgtaaatttcttctacttgtttgcctataataatagcaggtaggtctataggtgaggtcataggggaagatgaaaaacctcgacctccatgattgatgatctcctttgctgagatcctgcattactaagttaccacagaggtgttagtgatagtccacaagctattttccatattgaaaaagc

SEQ ID NO: 1883707 - DNA, 4001 bp, Homo sapiens
aggcaccctctcacccaggttggaaggagaaggtagcttggcaggactgaggagcctggggctaagcgccctggggagggtgggcaggggacttgggtgcccctccctgaccctgcagcccagcagccttcctgttttcccgctgcagggcgtgccgcctcctctgtggcccccacaggcccatgacacacacaagtctagctgccagacacccggttaacccctgcaccccagtcccctagacccctgcagtccaagggaaatgaccagggtgccctcaggctgaggggcaaggagtgtgggggccctgccgaggtgccacaaaaaacccctccccgcccactagggtgcacagaagcccctgccacctccttcccctgttgctggtctcctttaagaatgagtctatttggctttcacatctggattccagaggtgaccagagagaatggggagggctgggggtgggcttgtggtaatgaactccagctggccaaggagtgggggaagggaccctcttcttcctgagggggctgttggaggctacagcatcctcaacgggggagcggggctctgggtggggcctgtgattttggcctccaagccccctcccaggtccctgtctcctccaagtttgtcctgggcaggggccccaactctccaccttgggaggggccctctgtcgtcactggcgggggcgccaagccatctggacctcattaccccaaccctggcctcccccaccatgggggcccctggaagggatggagtgtgcagtggcatggggtgcgggtggggggtggcttcctgccggtctctctgcaggctccctagatgcccccatgggtttggggtctcccatgttgaggttccttactcagggccagggagaccatgtgacctggggctgagggccggagaccgggtgacactgtgggggaggggcacgtgccactgagggggtcccctgatctcatgcctgagcctgcaggcctttctggagcttttgtgtacatctgagttaagtcgtgtgcgaaaacagctctgagaatcatatgtggggagatgggagtcagctgtgggctgtgggtgctgggaggcggggtgtgtttgtgtgtgtgtgtgtgtgtgtgtgtgtggcttgtgggtctggtgtgtgggtgttttttaggagtgtgattggagtataagcatctaggtgtgtttggaatatgtggtctgcatttgcatctgggggtgaaatctgtgtgcctggggagtgactctgggcacctgcctgtgcttggggtgtaaaagcaggtgtgtgtggggagggggctctaggagggagggtgtgagtatggggtgtttgagaatctgtgtatgtctttgggatgtgaggatggggggagtgttccagttgtgagggtgtgtatgggtgtgtgtgcatgcacttgtgtgtgtccgtgtgggacatgggtgtgagattgaaagtgtgggggtgctcatgtgtgtgagttctggggctgtgagtgtcaaggtgcgtgtgtgttgaatgtgagtggattcttgcactaggaccactggggatgtggaggtggtccaggctggtgggagagtggtctgtacttctctactcaaccaccagccctcaggttttggggtgagggaggctctttgggcagaccggcggctgcccacatccccagtccccattgacccccccatcctctcagtcttcctcggccacccttcccccatcaccgctacccccaaccagtcccacacagggtggcacccccatccatctgtgcctcctcccagcccgccctgtgccccaaccccctggctccaggctccggttctgggatggcaggcaggggtcggtccagctctccagtggcggcggtgccgagggtctaacccagcccagcctaaccaatgtgcagactactgtacaatttgggagtcctgaacagatagtctaaacactgggtagacggagtggaggtgtcctctggtccatccaggcagcagtgtctgtccatccggtgggcgcttcagccccatcccctggagatccgagaaccccccaaccccagcctgtgtccccctagccccagaccagccagcccgtggtcccctctctgctcccaactccccttctgcctcctttgacgtggcaggggtgagcgggagctggggctgagaaggaggggcctgaggagggggccggccggcaggaagggaggggtggggggaggaggccgctcctacctagtgtccaaccccgaagcacagggcgggtggtggcggggcctctctcgaacggttccagatgttccctggccgtgtgtgcaacttcctcctctcctcccccagccgccctctggggctcccggccacccgcctggcataaagagggctttatgtggctgcatgggccaggggggcgttgggggcagagaggggtgggcgggatgacgccaggacgggggagcaaggtccccctaaacccagccccccacctgagatcctaggcaaggctcatgcccaacctctttgagtccccgaggcccacacagacgacccccgtgaacaagtagggcatgggtgacaaaaacccctcccctctcccagagccccatcctggggtacctcctccctagatccctgaacccctcccctgggacacagcagcctacatacacatgtgcccacaccgagcacacacatgggcctagcaccccacacgcctgtgcacagatacacataactcctcccagacagctctagataaatcaaacacacagcccattgtaccacggtgtgcaggtaagatgtgtaccccagtataagtccacaggcatggctctgcaaacatgtaggctcgcacaattgccacacacatccacaaagtgtgcacacatccacactgagatgcagacacgctgacaccgacacatggttcatgctgggcacctccccagatacacatgtgcacacacacacaatagctgataggatatgtacttgggcttgcatgtgttggcacaaacacacaactacacacatgttgcacacacaggcacaccatctccaggcttgtgctggctgccttattgctaacacatggggagctcgggggagtgggctgagccggccctttgaagccgccgggtctggtggccccccttcctggtctctgcagtcaggaaatgaagtcagaggcggccaggccgggggtgagagaggcctgagtgtgcggtccctgcctgaggctggcctggcttgtatccaggacttgcctggggagggattttgggagccactctcagcctccccacccctcaccagccccctggcccccggcatatatgcagagctggtaggactggctctgcgggggtcggcggtgcccaggaggcctacggtccgtggccaggcttttatctagctgcaccttcgcagtgggagggggctgatgcttagaagccctgggccagtcagggggactcttagagagtgaggtgtggcagagaacagtgccaacctcaccccattgctcctacctgcacccacaggagaaagagaagaaatacatgctgtctgtggacaacctcaagctgcgggacgtggagaagggctttatgtcgagcaagcatatctttgccctctttaacacggagcagaggtgcctgcctgcccctggctgtggctgctgcagccccaaaaccaccctcactgagtagaagctgggtacagggatccagggaggagaggaacctcccctaggccccacagcaagccatccactgacagatgcttattgagttcctgctttgagctagacatcatgtcaagatctcccatcccctccccttcccttccctcctccttccctccctcttttccttcctcccttccttccttccatcctccctcctttcctccctccctcccttcctcccttccttccattctccccttccctccctccctccgtcccttcctcccttcca

SEQ ID NO: 1883708 - DNA, 4001 bp, Homo sapiens
aaaaacagatgaaaaatatgaaaggtagttagcaatgaaataaggaagatattgggttccatcaagataacaggttcctatgttatgctaggaacctattgtatctgaccaacaacagtaaacattgctgactttgagaccaaaatgccagtcaaacattggcaacccaaatctttctaatctgaaaagggagctcaaaattcttccctgaatgtaaaagtgtctaagaagtcttagaatggtggacagctctcctgttgggacctacttgtttacaagaactatcccagtccctgaacaactaattccaatgtagaaaagtctctttgctgaaaaaagggaggtctttagcttgaataggaaaatgggtgagataaacatgacaagtcaataccaagaaaccagtttcgctaaaatttgctctgttccctcaaagttatttttttggcttcattattacctttattgacaaagtaacttttcattaacaagcatgacaaatatttcagttacacagccaactgtgtcaagtcgtttcatataatgaaaaagcagggatatagattgtgttgtttattcctcacaaattattctttagagggaagaccctctaaaaggcggagaaagctttaaacatgtttacttgacagcacctgaaaaatgatgtcattacagtctaaagtgaactgatcatcaatttggtatttgtgttttggaaggcctttcccttgactgtttgaggcagtagaaagtttgcatgattgggctgaacagattgtagcacccacagaaggaaataagatgttcttgatatacagtcatgtgttgcataatgacactttggtcaatgacagaccacaaatacaatggtggtcccataaggtagtaatagagctgaaaaagtcctatcacctagtgacatcttgatgattctgaccctgtgcaggcctagtttaatgagtgtgtttgtgtcttcatttttaagaaaaaagtttaaaaaatacaaagataaaaaattttaaagacagaaaaaagctcatagaataagcaaatgaagaaaatatttttgtatagctgcataatgtgcttatgttttaagctaagtattattgcaaaatagtctaaaagttttaaaacgttaaaaagtttacaaagtaaaaaagttacagtcagctaaggttaatttagttttgaagaaataaaatttaaaaaataaatttagtatagcctaattatacagtgtttataaagtttacagtagtatacaaaaatattctagcactcactcagtgactcacccagagcaacttccagtcctgcaagcaccattcatggtaagtgccctattaaggtgtactatttgtatcttttatactatgtttttattgtgtcttttctatgtttagatacacaaatacttaccatcgtgttacagttgcctacagtattcactaccacatagtaacatgctatacaggtttgtagcctacaagcaataggctatactatatagcctaggtgtgtagtaggttataccttctaggtttgtataagtacactctatgatgttcatgacaaaatcacctaatgattcatttctgaggatatagtaaccccatcgttaagcaatgcatgacagtatatgtaacctgtccaggggaatctttgcttccttttcaagtcacatggtttggacccagaactattagtctttgagagtatatttcactccttcctaattccagagctgcttggatgaagttctactatgacctttaacatacagtgtttttcatctctcttatgggacagttatgggcccaatgatggaaaatttcatgtcatggttatcccaatgcatttgatgatggtgcaatgatcaaaaaagatgccagtgatgacaattgaacgtccctttgccttcccagcctccttcatatattctcaggcataggatgacaaagggaagtccacgagtcacatgaagaaagactgtagccatgggtacgcgatcaggaagtcctctgcttgcctccacccccaccctcctttccatcaccctgtcctatgggtacatgatcaggaggtcctctgcttgcctccacccccaccctcctctccatcaccctgtcctatgggtacatgatcaggaggtcctctgcttgcctccaccctcaccctcctctccatcaccctgtcctgtgggtaaatgatcaggaggccctctgcttgcctccaaccccaccctcctctccatcaccctgtcctatggatacacgatcaggaggtcctcttcttgcctccaaccccaccctcctctccatcgccctgttctatgggtacatgatcaggaggtcctctgcttgcctccatccccacgctcctctccagcaccctgttgtatttcttcctaatattgtttctccaccatcttgcaactaaccaccatcttcttcccaaagttttgcttgatgactcattccaactgaatcaatgctcaacctatatttggcacagagttggtgctcaaatagttgctgaatggaataatgaccctcaaactctccaaggtaaccaaactttaggggagcctttttaaaaaaatgagataatgcttccatgtgtaggatgaaaggagaaagtattttggaattatgtcagcctaggtttgcacccagctgtgccactaattggatttaaggcaaaggcttaacctcttggaggtgccatttcatcaactgtataaaaggaagaaaataatccctatcttgaagggtttttgtgagtattaaaagagatagtatatatgaaaatgcctagcatggtgcttggaacctaaataaatgctcattccctcctagtagtatcccaatagtgccgtcaagctgtcctatatggtatctttaggatgataaataatagggagtaactaatttctgatgtggttgaatgtcagaagagatagagataaaacaacagtcatagggagtgatactgttaggaaattataaaggaaatgaagacttctgtggttaatttcttggagtttaagaagaaattcacattttccattaattatacttaccaactgagtctaactggcaactaccccaaaatgaataaaacaagcgggagtcaagagagaaaaacggcaggcatcctgtcaaaaaataaaatctttgaaatttctacaccctgtggttgcatacacattttattaaagcagatggattacccaatttacataaatttatatacgtgatggcaactcaagttgcacagtgaaacctatgtagagcatcatccagcccttctgcaccagctatatcttgtcttatcactccttcaactggacaggtccttaaaaatcatagctctttgctggaggaagtatcattctttattctcttccagcctagatagcttctgtggtgtggaaagggtcaaatgagttaatatctgttaagtgcttgtactgatgcttagaacttagtaaaacctcaagaaatcttagttgttgttatattaattataatgataattatgaatcttccaattctgtgttttccaggagacgataggaattgaattctttccttccctccttttaataacattttcctgatttctagagaaataagtgttctagtttcaagtgtttagctacttttgacttaaaagaactatccatttagaggctaatctacccagtttcttttcttttctttttaaaagaggaattgaaacaaagctaacatgttactcaacatgcataatattattaattggactgattcctctttctctctctggccaaggtatagatataaatatatctacatctatgactatgtctacatatcttccaaaaaagtcatcaaaaccatttcagtataattggcaggtttcctaccaatttggttattgtttcccaaactaggagataaacttaatggtaatatcatatttctggagttgctaagcaagctagcctttggtca

SEQ ID NO: 1883709 - DNA, 4001 bp, Homo sapiens
aaagactaggttgtttactagccttgcttggagcttcatccttggaaacgggtggcacctcatatccccccagccgtggtctgtgatacaacctctccatcctcagcctagggcctcagagctacccttcacccaaaagaggggtgggggtgaacactcagacaatctgagagggggtagtctaatagagccatctggagaagggagtggcagagccagtctgtgctgaccagtctgtgtcccgggacgcatccccacccgtctgtccaaggctttgtcccaccagctgcagccagcagcctcagaacccaaaatgagggtagcatagataagactgctgagccccctttctgtggtctttcctttccatgacctagagaaaagagctttgctggagggagacccccaaaaagaattagggtgctaacatcccaccaaaagcatcatcccacccaaaatgttgcttttcattctatgtcaataatttaaggtggaatttctctcaccctgtggagatgaaagtggcaaaaggttgtcccagcagtgttgggggatggggtgtgcacatcattcttttgggggtagatgacctgctggctggtgggcttttctccaggactactgcaggtagagaccctctgggcttgtgtggagtgggagcagccgtgttgggactatggggaggagctggtctgggtgcaaattaaggccagtgttggggtctgagtgctgtccagaaaggctgtgtgaccaaccctcactagttcctgaggtcagggtctccatgttagggaacagagcaagagacttggaacagctccctacagctgcacttctagaaggtcagcctgtccgattcttgtaacctggaggtccctccccatctgcagccccctgagctgcaggagcggccccatcagtgcacctgattggaacacactagatttcaggtcctggaaactgggcgctaggatccgtttccctggctgcagagagtgggaggtgtgatgtggaatatcccttctcccagcacaccccaattaatactgaagagtagggcaggaggaggtgctgggaaaaccgggtttcttggcacatgggggtgcaagcactgtggttgaaattggccatgtccaaggcacaccagacgatttcaggtcatttttagccctagactggaaaggggtcaggggacaggtgacctgggctcagcccccagcagctcccaactgcccctctcccaagcaactcctgatccctgcttttgaggaaataaacaaataaaaccccgctatctccgaagatttttctttaatgaaaaggattcgtttttccaaattctatttccaaagccgaggagattgccgggctggagcgcatcgttggtgacgcttgcccgtcggaccctggcagcggctggaggaggctcagcccatcggtccgtccggaggggcttgcgggaggggttggtttgtttgggatttaggggttggttgaggatttgttttgtttaggtagggagtattggggtgataagttagaacaactgcgaaacgagttagcgggcgcattcggccggcctcttctttcacccccgacttcatgcggcttgggctgagggcggaccacattcggccccgccgctgcgtgccggcttcgttccggccgaaatttgaaaggaggaaaaacgacgcgatcgactgaaggaccctgccggccgggactggtcacccgcagagaaggaagaaggacgaggatgcggatggcggcgctggtggcagggaccggcgtctctgtgcgcgcgggccgggaccgcgatcctcgcgctggggccagccagccgccgccccgagaggtctcgcccgcgctgagccctgtccctggggcccccgcccctgttgcgcccggagctcagccacagatgtccagccacaattctcggttggccgcagactcgtacaagaattgcgtttggacaatcagtggcgaagcccctgagttcagggccctggtctcctgcggggttccccttcgctcctaaaaagcgccagtccaggacagctcggagctgcgcgtcggaccacctagcaggcgctcagcagcggctgcccatccggcggtaaggtggactagcaagcacgcggatcctgaccctgtgcggggatccccatcgcccctggcgtggctccttcgatcgcggcccggagtccgcagagtggcccgcgttgggtctcagcgccgccccaggtcgagggggaatctcctctgtctggcctggggaaccccgactcccctctccctgcccccagcctgggatctccgggaatccggaaggcaggagccccaggccgggtcgcgtttccgagcccggggtccgggctgctggattcgtgggtcccccgcccccgcccagccccgcgcacgcaccggctcgggcgctctccgctttcctgtggctgagtcgcggccggggcgcctgcggtggcggtggcggcggtggcccgggcggcggggagtgctggaatgcgccgccgggtcacctgcagcgcccgtggagccggactgggagccggcgggctgccgaggcgcaaggctgaacccgagcaggcgcctctggcggctcggggccggggcgggcttttagtgggccgctccaacaatacgggcctggcgcggagaaaggggctcggctgcaattggtactggatttgaataacgccacggggccatcaatggtcattgtgtcggcgggtaatgaatctccgctgtctctcgggctggccaggcagctgcaacctgcgctcaggcagctcttaaagacatagcgtgcccctccccgggggccgcctccccctctgcaccggccggacccctcgtcctcccacccccactcggcaccctcaactcccgatgccccgcctgctccctcggcctgacccctttgcccatcgccccctcccttctcctgggccaggcaccagcatcccggccctgctctcccgtggacctgactcaggccccggccttggctgagctctccaagagcacccagggcaccccagagtcttttacggcccaccccctgtctcccagctgcatggaaaccaaaggcctctggagccccctccctaggcccctgcccaggggcttccactggagggtgagggggaacagtctggaagtcagagggtcaccccctgagaagaccatgctgaaggataaaggagaagggggtacagtccccacccctgggctgaggatgccatccctggagaccacaccccacgcgggagctggagcctgccccctcccccgaccaaggaccagagcttgattcccaggctccagcaggctcctgggtacctcggggctagcagcaagggtggggggaggggagcaggtgggtgtgagaggggcgtggaatctgtgaatgcttgtcttgtcattgtctcttccattggacagtccacccatccaggagagcaggggctctgtccaaggtctaatgcgcccccagccccacccccagcctggtctggcagagacggttctcagtctattgggtaaatacatagccagcttctcacccccaaagcccagcctgtctttcccaatgaacctcacaccctaaagtgggagtgtgtggccatttttcccatacagcctgccttccattcaccccagagttctccaagcacccagaatacccctgcctctgtcctggcacaccaagctgccttgctctgaaatgctctcctgtcctcacaatctctgggtggccttgccacgtgcccggctgaattgtgaatatcggtttgtctgagtctcctccctaggacaggaaacgggtcctacggatctttgtgcctccagggcctagtacagtgccctccccccaaccaatcattaaatatctgtgggtggttgcacgcatgcccggtgactttaaaatgagccacatagacttcttggagtttcttataaaagttgaaagaatgttg

SEQ ID NO: 1883710 - DNA, 4001 bp, Homo sapiens
atgattggttggggggagggcactgtactaggccctggaggcacaaagatccgtaggacccgtttcctgtcctagggaggagactcagacaaaccgatattcacaattcagccgggcacgtggcaaggccacccagagattgtgaggacaggagagcatttcagagcaaggcagcttggtgtgccaggacagaggcaggggtattctgggtgcttggagaactctggggtgaatggaaggcaggctgtatgggaaaaatggccacacactcccactttagggtgtgaggttcattgggaaagacaggctgggctttgggggtgagaagctggctatgtatttacccaatagactgagaaccgtctctgccagaccaggctgggggtggggctgggggcgcattagaccttggacagagcccctgctctcctggatgggtggactgtccaatggaagagacaatgacaagacaagcattcacagattccacgcccctctcacacccacctgctcccctccccccacccttgctgctagccccgaggtacccaggagcctgctggagcctgggaatcaagctctggtccttggtcgggggagggggcaggctccagctcccgcgtggggtgtggtctccagggatggcatcctcagcccaggggtggggactgtacccccttctcctttatccttcagcatggtcttctcagggggtgaccctctgacttccagactgttccccctcaccctccagtggaagcccctgggcaggggcctagggagggggctccagaggcctttggtttccatgcagctgggagacagggggtgggccgtaaaagactctggggtgccctgggtgctcttggagagctcagccaaggccggggcctgagtcaggtccacgggagagcagggccgggatgctggtgcctggcccaggagaagggagggggcgatgggcaaaggggtcaggccgagggagcaggcggggcatcgggagttgagggtgccgagtgggggtgggaggacgaggggtccggccggtgcagagggggaggcggcccccggggaggggcacgctatgtctttaagagctgcctgagcgcaggttgcagctgcctggccagcccgagagacagcggagattcattacccgccgacacaatgaccattgatggccccgtggcgttattcaaatccagtaccaattgcagccgagcccctttctccgcgccaggcccgtattgttggagcggcccactaaaagcccgccccggccccgagccgccagaggcgcctgctcgggttcagccttgcgcctcggcagcccgccggctcccagtccggctccacgggcgctgcaggtgacccggcggcgcattccagcactccccgccgcccgggccaccgccgccaccgccaccgcaggcgccccggccgcgactcagccacaggaaagcggagagcgcccgagccggtgcgtgcgcggggctgggcgggggcgggggacccacgaatccagcagcccggaccccgggctcggaaacgcgacccggcctggggctcctgccttccggattcccggagatcccaggctgggggcagggagaggggagtcggggttccccaggccagacagaggagattccccctcgacctggggcggcgctgagacccaacgcgggccactctgcggactccgggccgcgatcgaaggagccacgccaggggcgatggggatccccgcacagggtcaggatccgcgtgcttgctagtccaccttaccgccggatgggcagccgctgctgagcgcctgctaggtggtccgacgcgcagctccgagctgtcctggactggcgctttttaggagcgaaggggaaccccgcaggagaccagggccctgaactcaggggcttcgccactgattgtccaaacgcaattcttgtacgagtctgcggccaaccgagaattgtggctggacatctgtggctgagctccgggcgcaacaggggcgggggccccagggacagggctcagcgcgggcgagacctctcggggcggcggctggctggccccagcgcgaggatcgcggtcccggcccgcgcgcacagagacgccggtccctgccaccagcgccgccatccgcatcctcgtccttcttccttctctgcgggtgaccagtcccggccggcagggtccttcagtcgatcgcgtcgtttttcctcctttcaaatttcggccggaacgaagccggcacgcagcggcggggccgaatgtggtccgccctcagcccaagccgcatgaagtcgggggtgaaagaagaggccggccgaatgcgcccgctaactcgtttcgcagttgttctaacttatcaccccaatactccctacctaaacaaaacaaatcctcaaccaacccctaaatcccaaacaaaccaacccctcccgcaagcccctccggacggaccgatgggctgagcctcctccagccgctgccagggtccgacgggcaagcgtcaccaacgatgcgctccagcccggcaatctcctcggctttggaaatagaatttggaaaaacgaatccttttcattaaagaaaaatcttcggagatagcggggttttatttgtttatttcctcaaaagcagggatcaggagttgcttgggagaggggcagttgggagctgctgggggctgagcccaggtcacctgtcccctgacccctttccagtctagggctaaaaatgacctgaaatcgtctggtgtgccttggacatggccaatttcaaccacagtgcttgcacccccatgtgccaagaaacccggttttcccagcacctcctcctgccctactcttcagtattaattggggtgtgctgggagaagggatattccacatcacacctcccactctctgcagccagggaaacggatcctagcgcccagtttccaggacctgaaatctagtgtgttccaatcaggtgcactgatggggccgctcctgcagctcagggggctgcagatggggagggacctccaggttacaagaatcggacaggctgaccttctagaagtgcagctgtagggagctgttccaagtctcttgctctgttccctaacatggagaccctgacctcaggaactagtgagggttggtcacacagcctttctggacagcactcagaccccaacactggccttaatttgcacccagaccagctcctccccatagtcccaacacggctgctcccactccacacaagcccagagggtctctacctgcagtagtcctggagaaaagcccaccagccagcaggtcatctacccccaaaagaatgatgtgcacaccccatcccccaacactgctgggacaaccttttgccactttcatctccacagggtgagagaaattccaccttaaattattgacatagaatgaaaagcaacattttgggtgggatgatgcttttggtgggatgttagcaccctaattctttttgggggtctccctccagcaaagctcttttctctaggtcatggaaaggaaagaccacagaaagggggctcagcagtcttatctatgctaccctcattttgggttctgaggctgctggctgcagctggtgggacaaagccttggacagacgggtggggatgcgtcccgggacacagactggtcagcacagactggctctgccactcccttctccagatggctctattagactaccccctctcagattgtctgagtgttcacccccacccctcttttgggtgaagggtagctctgaggccctaggctgaggatggagaggttgtatcacagaccacggctggggggatatgaggtgccacccgtttccaaggatgaagctccaagcaaggctagtaaacaacctagtcttttatttgcccaaggccggctgttgcaagcactgaggccccaagacttccagaagggaaggggaggaggggcaaagcactgtgcctaccaggtgct

SEQ ID NO: 1883711 - DNA, 4001 bp, Homo sapiens
ggatgaatccaataggttcctttcatctgtccatttattctcctcaccccaacttgccagcacaagcatgtgtggcctttgagggtacgggagacactccaagtttaaacaggtaaaattcagagagatgaacctggaccatcggaaaggttagaataatcctaagaagttctccccagacaacacttaagctgaggagatgccgcctctgggggctgcacctgagtggttaccgggacaggcacaggggcctgggcaggctttctgggtgcaatttcctgcagtggcctggagactggggcccagtcccctaccaggcagtgcaccctgctgagctctgggacccagcatctcctggttgcttacagctctgcaaggagatatcaaagccaggataaatggtttgaagccaaagtggtggtggggggcagctgtggtagagaagggattgctgatggggagtggagagagcccagacggaagaggtctgggggcagggagggaaaggccaagggagaagagaaatcagaattaaatgaaaacagggtttgtagctgcgcccctctcagtaaagttctgccatgcatgcattaaccttccatcaatgaaaacaaaatccagggacctcatgcctgcctgctggggcatataaagcctaggggacataatatcttccaggtgggtgtgcccagaagcacacattggtacttgacaagtcatttaaaactgactgtcaaggtcaaaacaacaccacctgcaggcacaactgaaatgtcttcatccattcccccgctctgagttctctgttgttgttgttttaaactaaaacacagtttgagcagcagacaagcctgacaactgttcaaacatatgtatgtgcaacttattagcttgcaaatggagatatctggaagctaaagacatgtgacaggggtagggggcaggttagccactgactctgaggggtcaaaggaggaggtcctttgatgggctgaaggaagaaggccttcagtgatggaacccactcctgatggagtatttgaaaatgatgcttttcactgatgacacacaaaacagaggcagttattatgaaaagaaggggcccctgcccttgagatctgtttattttgcaattaacaagggttaaagaggcccccttctgaaacttttgcttgggggcctaaaatttaaacacctactactgcctaggtgcccacagagtccaagaaaatccaagcctcatgatctaactagctcttacatcaaaaagaaaatatacatgtattttaaattgctgaacgaaactgaatcacccccatgccttgttgaaataaaaaacctgattaaaggccaggcgcagtggctgacgcctgtaatcccagcactttggggggctgaggtgggtggatcatttgaggtgaggagttcaagaccagcttggccaacatggtgaaacctcatctctattaaaaatacaaaaacgagccaggtgtggtggcgcgcacctgtaatctcatctactcgggaggctgaggcaggagaatcgcttgaacctgggaggtagagtatgcaatgatccgagattgcgccactgcactacagcctgggtgacagagcgagactctgtctcaaaaaaaaaaaaacaaaaaaaccctgattaaatcaaatgtaggggccctaagacattctgcgggttattctaaatcacccccttacttttccagagaagaaaattaggccagggaggcccagtgacttgcccaaagtccccgcctgtgactggatgcagttcctaggaagcacggcctccttctgagcaacagaaaagcaggaagcctcaccagggagctttctcacccattcaccggcacgctccagcctcttcctgaccttcttacctgtgacatgacggcagggtctggagtcagtgcaagctgtctgggtgataccagtccacacagtccccaggcaacacacactgctctccaacacctgcagcacaatcagctgggaagacctgttagccttccagataccaagactgcggctcaattcactgagtcagtctccagggtagggcccaggcagctgaagggagcccagggcacgtgccaattctttgggataaaagtgacagaatttactttcataattgtttttttctcatccttttacattttctattttgtgtatgtgttttatagtgtacctaatatattaacattgtactaaatgcatataacttataaataaataaatatagatatatgaattgggtaattgctcaaaaagaggtctataaacagaaaagcatgggggcctcctgcaccaaactgtgagtcccaagagggcaggacctgtgcttcctcactgctgtaaagcaaagcccttgcccagggcctgacgcatgcaggtcaggtcctcactcaccactgacagaatgaaaggcgaattccatctccagctgtatcatggactcccagatatttctgaatagaatcatctcccaaagtgtgttttgaggaggtggtttttttgaaaccacagtggttccatgaaatgctcactgtaaaaagggctccctcgacacaacagttgggggaatactgcttatcctgtctctgtcttcaagatgcacagatataccaggatattaaatcaggatcataagaatattaaaggctttcttagaagccctccagtaaagaatctcttttaagtttatttaatccatttatttcctaaactaattaacctacagttccttttcccacattattaacattccataaaactagtcttccttgaaaccaactttagaaactcccaatttagatttaggctaaaggtctatacttcctcatggccacagcatcatcagcattcatcacacctgtccgttgatacatgtttgtcgagtgagttcttggctttgtccatccacccctttccaactgcgctttcaataggatgttctaagattgcacatctatgaaaaaaggcaaaaactgcagctggctcattcccaaagaaaagcaccatccttaggtcctcaagatgtccttttagaggagacctactcaaaaactaggacctgccaaccacagtttccaacaacttagcaaggtgggctccaaggagcacaggccaagggtgggtaggaccaggctcacaggagcacctcctcctccttgcctaccccaagtcttggctggggaacccaaatatcattcacactttcttagaatgaagttccaagatttccattttatggtgagaaacagggaggtgattattcttagcaagctagctgggaaggtaggagcagatttggtttgttcaatgactgcagatttggcattctgtcttctgggaacaatgtctagactttccgaggagtcacctctataaatagcatggttagttaaccaagaaatataacatgttctactctgagctccactctggggttaaatcagggcggatttgtgcaatgtacctcaactcccacttggtattcaattttttttaaaaaaaagtaatccatttttgaagggggcatccccctcacatctgtggcattttaatataataatgttaaacttctcttaaagaaaagctgaggctgggcacggtggctcacgcctgtaatcccagcacttcaggaggccgaggcaggtggactgcctgagctcaggagttcgtgaccagcctgggcaacatggtgaaaccccgtgtctattaaaatacaaaaaattagccaggcgaagcagcgtgcacctgtagcccctgctactcaggaggctgaggcagaactgcctaaacctgggaggcataggtggcagtgagccaagattgcaccactgcactccagcctgggcaacagagtgagactccgtctcaaaaaaaaaaaaaaagaaagaaaaaagaaaaggtggctgagacactcttccaattacttattaggggtgaaatgtagagacaaggcaatttctcaccca

SEQ ID NO: 1883712 - DNA, 4001 bp, Homo sapiens
ctggcctttattatttttaaacagtatgaaatttagaagcaaacacgtatacaaaaaaaaaatccattacatttattaataatatatcttagattctcatcctgttcttttaaatggcgcccactggtctcatacagaggagctgtgtgactttctggaattatagaaatatccgcatccagccatgtgctgagcagaccaatgtaaaatgttcagcaggttttccaatgtctcttggatatatttaatcatctctgcagaagaactcaaaatctcagagcagctccactccagatccagggcaggaggcagcctccagggagggaggctgcgtttacgagaatctgccttttgtgtgtgcctggctgggaccagcctctgggaaagagaagcaccaagatgtgaacagggctgtgggccgatggctttagcagccacataatccctcctttgatgtccagggtcagttcgagcctggtcccccaggctaggaggagacgaatgaaagaatcttgctgtggtctttcctgcaaaggaaacagcagtaacattgattacccagtcaccgggaggaattcttgtgagcgcgcacctctgtgtgcctttgctctccactttcaagagaggactttaatcacaggacaaggagaagacccaggcccatttcagtctccgggacgggtcacagcgagccgtgtgacgctggcctgctcacacgtggccatgacaccagcaggctgtactcaggctttgcgtacacaatagctgctaggagtacccatttcagacacgcacccactctaactgttctcagaaagtctcagctcacctcgccgtgggagagctgggccctgcctcccttacacatgggggcaaacggccccctgctggcactgtgtcctgccttcaggcctgggagctcttaactttctgccaacagggttttccaagtctacaaacccccacgccgcaggagcacatgcagatgactggcaccgtgctgccgccgggccggggtggacgcagggtggacgcgggcctgtctgccgcgagtgggagccccagctctcctgagcctcgggcacttacagacacgaaggctttttgctcaagggctcgactcctgttcctgctgaactgagccagtgtgtaaaatgagaactgatatcagctcagtaggcaccggagggcgggtccaatcgacagcccggagaagcagcgcctcagctgggagctccgtgggcaccgtctgctggcgcaggagacgcgaaggcctggactgcaaatacaagagagagttcaccgcgcccagaacaacaggagctcctccgaaagccccgccccgccccgctcacagccatgagctaccacatgatttcacacgacttaggtgatgcatttggttttagttttttgtaagaagaatttttgcaactttcaatacatttgacctttcagacagatgtccgattagtgcatgtttctgtggacagacttaaggactcagtacatggctagcattcccagcaggagacagtgcatccttggggtcaagtggtctctcatcctccaggatcgcgctccgcacccaagctgactgtgcagcagcggccggcccgtcagcaacggcctctgccccagcggctccaacttaactgtccccatctcaccttctcttcaggtgcagaacttagccactgtgaacaaagcggaaaccaatcactgttcaccaatcagctaagctctgcaccttgttagagaggtcatcgctgggcataaataaagggacggtgaccggtgagcatcttcctcagctggtggcttcttttgtttccaaagaagagctacgagatgcacctgttctccaatctgcagtgagcgcgaccacggtttctggaggagcagccaaggtcgtggttgcgtggtaatccctggcaatgtgattttaatcttaagtcacaaatcagcatgccaggaacccaagcagccagagcacctgagagcagcgccaccccgtgctgtctgcacacactgggcttccgcggaaggacgccggcgacactgccgccttcacgcctgttatgctagcaaacaggtggagtttctgtttgttgttcgtttagttggcatcctagaggtataatttcttgaatcaaagggactccagagatgaccataaaaatgccagtgcagctttggaactgaagaaaaatgcagggaccggccatgcgacacacacaattgctaaaggcagctgtccttgctattagtttactgcctctaacccttggggacaagatcccttctctccaggcagattctagctgccctgggaaggctttggggactctcaagtcaggaggtccccctgctggaaggggccctgggacaatcccggccactgttcctcacggggactggttggggggcaggcttgcaacccctggatgcatctggaggggtggggacaggatcgaagatgctggggagggggaaaagggagacttgtgaccaagatgactcctttgcctgcctgggcaaaaattccccataaagagtggcgaggggtgtgccctgtggtgctgctccaaaacctgcaccaaagggaatgatgaaaggactagctggccttgtagtttcacacactttaacacgtacgccacgaaataacaaaacgaaagagaaacaccatttacactgattactattatgaggccggcagtgaggtaagtgcacagtctgtgtgccgccagcccgtcctggaggggagccgcgtcaagtctgcagcaggcgtttcgctacgagacgctcagtcccgtttccctttcctggcacacatggttcctgactcttctggaagaatatgatcatgcttctgaaaaactttttatttcttttcattattagagttctttcagataaataagctacttaaacacgttacacagaaatggttttcataagcacaaaacattagaagaaaactcaatgttcaaaactgagtgaagaatatcaacaccaaatattcaatatccatgaaaaattatagagaagctataacacgaaaaatgcttcagatttgataaagtttttttaaagatacaaaattagacatcccctattaatatcatataaaacactgaagaaaaacggagcagacacagaaataatgatgattgttagagaaaaaaaatctcacagctatcctaacaaaaccttgtgtactaccgctaggttgctttaatagtgtagaaacccatactgagcaactaactgctaggaagtaaatctaacaggttaattccaggcacaattaacagaggaagtgatttaaataatctaggactccaatagaagccaggggagaaattccgctccaacacaacaaagcaaaaagtaggacctgccctcaagacacagggtcatggaggccatatgccacgtgtgctgtgtgcgccgcgggtgctgtgtggtgcgtgcactgtgtgtgccacatgtgctctgtgtggtgcgtgcggtgtgtgctgtgtgtgccgcaggtgctctgtgtggtgcacgcgctgtgtgtggtgtgtgtgctgcatgcagtgtgcgcgctacgtgtggtgcatgtgctgtgtgtgctctgtgttgtgcatgcgctgtgtgtggtgtgtgtgccgcgtgtactctgcgtggtgtgtgtgctgtgggtgctccaggtgctctgtgtggtgtgtgtgctgcgtgtgccgcgtgtgctctgtgtggtgcgtgcgctgtttggtgtgtatgctgcatgtgccgtgtgtgctctgcgtggtgcgtgcgctgtgtgtgctgtgtgtgccgcgtgtgctctgtgtggtgcgtgcgctgtgtggtgtgtgctgtgcgtgctctgtgtggtgcgtcctctggtgtgtgtgtgctgcatgcagtgtgtgtgctacgtgtggtgcatgtgctgtgtgtgctgcgtgtgcctggagagcctcctgccagccgatgaccaggcgtgg

SEQ ID NO: 1883713 - DNA, 4001 bp, Homo sapiens
tcagtcactgggacaagaaaagagagttctggagaccaaggcctcccagtccagagcttctaatgagatccatggtagagccccacttcaccccaaacaggccagaatttgtgctgccccctggagccaggcagaggagactgtgggtgtgttcaggtgcactcatgctcagcccaacttggcacagggcccatggctgcacccgttcctacagccttctccaggcattttcaaacattctgccccatggacagtgccaaggaagctcagtgcccagcttctgtctataccctaaaccttgtggagaaagaaaaatcataccaccagactcccacgatgcctgaatatgcccaggctctccattttatcggaagagggtgccccacgcgcagccaaattacttttgttttcaggcttctaagagaactaacactaccttgaaaacaacaaagaaactagtgaggtggggggggaacaccagaatgtggagaatacctttttcttgtacgtgctttttttttttttttttttttttttttgagatggagtcttgctctgtcgcccaggctggagtgcagtggcgcaatctcggctcactgcaactgccacctcctgggttcaagcgattctcctgcctcagtctcccgagtagctgggattacaggtgcccaccaccacgcccgcctaattttttgtattttagtagagacagggtttcaccatgttagccaggatggtctcgatctcctgacctcgtgatccacccacctcggcctcccaaagtgctgggattataggcatgagccaccgcacctggcctttattatttttaaacagtatgaaatttagaagcaaacacgtatacaaaaaaaaaatccattacatttattaataatatatcttagattctcatcctgttcttttaaatggcgcccactggtctcatacagaggagctgtgtgactttctggaattatagaaatatccgcatccagccatgtgctgagcagaccaatgtaaaatgttcagcaggttttccaatgtctcttggatatatttaatcatctctgcagaagaactcaaaatctcagagcagctccactccagatccagggcaggaggcagcctccagggagggaggctgcgtttacgagaatctgccttttgtgtgtgcctggctgggaccagcctctgggaaagagaagcaccaagatgtgaacagggctgtgggccgatggctttagcagccacataatccctcctttgatgtccagggtcagttcgagcctggtcccccaggctaggaggagacgaatgaaagaatcttgctgtggtctttcctgcaaaggaaacagcagtaacattgattacccagtcaccgggaggaattcttgtgagcgcgcacctctgtgtgcctttgctctccactttcaagagaggactttaatcacaggacaaggagaagacccaggcccatttcagtctccgggacgggtcacagcgagccgtgtgacgctggcctgctcacacgtggccatgacaccagcaggctgtactcaggctttgcgtacacaatagctgctaggagtacccatttcagacacgcacccactctaactgttctcagaaagtctcagctcacctcgccgtgggagagctgggccctgcctcccttacacatgggggcaaacggccccctgctggcactgtgtcctgccttcaggcctgggagctcttaactttctgccaacagggttttccaagtctacaaacccccacgccgcaggagcacatgcagatgactggcaccgtgctgccgccgggccggggtggacgcagggtggacgcgggcctgtctgccgcgagtgggagccccagctctcctgagcctcgggcacttacagacacgaaggctttttgctcaagggctcgactcctgttcctgctgaactgagccagtgtgtaaaatgagaactgatatcagctcagtaggcaccggagggcgggtccaatcgacagcccggagaagcagcgcctcagctgggagctccgtgggcaccgtctgctggcgcaggagacgcgaaggcctggactgcaaatacaagagagagttcaccgcgcccagaacaacaggagctcctccgaaagccccgccccgccccgctcacagccatgagctaccacatgatttcacacgacttaggtgatgcatttggttttagttttttgtaagaagaatttttgcaactttcaatacatttgacctttcagacagatgtccgattagtgcatgtttctgtggacagacttaaggactcagtacatggctagcattcccagcaggagacagtgcatccttggggtcaagtggtctctcatcctccaggatcgcgctccgcacccaagctgactgtgcagcagcggccggcccgtcagcaacggcctctgccccagcggctccaacttaactgtccccatctcaccttctcttcaggtgcagaacttagccactgtgaacaaagcggaaaccaatcactgttcaccaatcagctaagctctgcaccttgttagagaggtcatcgctgggcataaataaagggacggtgaccggtgagcatcttcctcagctggtggcttcttttgtttccaaagaagagctacgagatgcacctgttctccaatctgcagtgagcgcgaccacggtttctggaggagcagccaaggtcgtggttgcgtggtaatccctggcaatgtgattttaatcttaagtcacaaatcagcatgccaggaacccaagcagccagagcacctgagagcagcgccaccccgtgctgtctgcacacactgggcttccgcggaaggacgccggcgacactgccgccttcacgcctgttatgctagcaaacaggtggagtttctgtttgttgttcgtttagttggcatcctagaggtataatttcttgaatcaaagggactccagagatgaccataaaaatgccagtgcagctttggaactgaagaaaaatgcagggaccggccatgcgacacacacaattgctaaaggcagctgtccttgctattagtttactgcctctaacccttggggacaagatcccttctctccaggcagattctagctgccctgggaaggctttggggactctcaagtcaggaggtccccctgctggaaggggccctgggacaatcccggccactgttcctcacggggactggttggggggcaggcttgcaacccctggatgcatctggaggggtggggacaggatcgaagatgctggggagggggaaaagggagacttgtgaccaagatgactcctttgcctgcctgggcaaaaattccccataaagagtggcgaggggtgtgccctgtggtgctgctccaaaacctgcaccaaagggaatgatgaaaggactagctggccttgtagtttcacacactttaacacgtacgccacgaaataacaaaacgaaagagaaacaccatttacactgattactattatgaggccggcagtgaggtaagtgcacagtctgtgtgccgccagcccgtcctggaggggagccgcgtcaagtctgcagcaggcgtttcgctacgagacgctcagtcccgtttccctttcctggcacacatggttcctgactcttctggaagaatatgatcatgcttctgaaaaactttttatttcttttcattattagagttctttcagataaataagctacttaaacacgttacacagaaatggttttcataagcacaaaacattagaagaaaactcaatgttcaaaactgagtgaagaatatcaacaccaaatattcaatatccatgaaaaattatagagaagctataacacgaaaaatgcttcagatttgataaagtttttttaaagatacaaaattagacatcccctattaatatcatataaaacactgaagaaaaacggagcagacacagaaataatgatgattgttagagaaa

SEQ ID NO: 1883714 - DNA, 4001 bp, Homo sapiens
agtggcgcaatctcggctcactgcaactgccacctcctgggttcaagcgattctcctgcctcagtctcccgagtagctgggattacaggtgcccaccaccacgcccgcctaattttttgtattttagtagagacagggtttcaccatgttagccaggatggtctcgatctcctgacctcgtgatccacccacctcggcctcccaaagtgctgggattataggcatgagccaccgcacctggcctttattatttttaaacagtatgaaatttagaagcaaacacgtatacaaaaaaaaaatccattacatttattaataatatatcttagattctcatcctgttcttttaaatggcgcccactggtctcatacagaggagctgtgtgactttctggaattatagaaatatccgcatccagccatgtgctgagcagaccaatgtaaaatgttcagcaggttttccaatgtctcttggatatatttaatcatctctgcagaagaactcaaaatctcagagcagctccactccagatccagggcaggaggcagcctccagggagggaggctgcgtttacgagaatctgccttttgtgtgtgcctggctgggaccagcctctgggaaagagaagcaccaagatgtgaacagggctgtgggccgatggctttagcagccacataatccctcctttgatgtccagggtcagttcgagcctggtcccccaggctaggaggagacgaatgaaagaatcttgctgtggtctttcctgcaaaggaaacagcagtaacattgattacccagtcaccgggaggaattcttgtgagcgcgcacctctgtgtgcctttgctctccactttcaagagaggactttaatcacaggacaaggagaagacccaggcccatttcagtctccgggacgggtcacagcgagccgtgtgacgctggcctgctcacacgtggccatgacaccagcaggctgtactcaggctttgcgtacacaatagctgctaggagtacccatttcagacacgcacccactctaactgttctcagaaagtctcagctcacctcgccgtgggagagctgggccctgcctcccttacacatgggggcaaacggccccctgctggcactgtgtcctgccttcaggcctgggagctcttaactttctgccaacagggttttccaagtctacaaacccccacgccgcaggagcacatgcagatgactggcaccgtgctgccgccgggccggggtggacgcagggtggacgcgggcctgtctgccgcgagtgggagccccagctctcctgagcctcgggcacttacagacacgaaggctttttgctcaagggctcgactcctgttcctgctgaactgagccagtgtgtaaaatgagaactgatatcagctcagtaggcaccggagggcgggtccaatcgacagcccggagaagcagcgcctcagctgggagctccgtgggcaccgtctgctggcgcaggagacgcgaaggcctggactgcaaatacaagagagagttcaccgcgcccagaacaacaggagctcctccgaaagccccgccccgccccgctcacagccatgagctaccacatgatttcacacgacttaggtgatgcatttggttttagttttttgtaagaagaatttttgcaactttcaatacatttgacctttcagacagatgtccgattagtgcatgtttctgtggacagacttaaggactcagtacatggctagcattcccagcaggagacagtgcatccttggggtcaagtggtctctcatcctccaggatcgcgctccgcacccaagctgactgtgcagcagcggccggcccgtcagcaacggcctctgccccagcggctccaacttaactgtccccatctcaccttctcttcaggtgcagaacttagccactgtgaacaaagcggaaaccaatcactgttcaccaatcagctaagctctgcaccttgttagagaggtcatcgctgggcataaataaagggacggtgaccggtgagcatcttcctcagctggtggcttcttttgtttccaaagaagagctacgagatgcacctgttctccaatctgcagtgagcgcgaccacggtttctggaggagcagccaaggtcgtggttgcgtggtaatccctggcaatgtgattttaatcttaagtcacaaatcagcatgccaggaacccaagcagccagagcacctgagagcagcgccaccccgtgctgtctgcacacactgggcttccgcggaaggacgccggcgacactgccgccttcacgcctgttatgctagcaaacaggtggagtttctgtttgttgttcgtttagttggcatcctagaggtataatttcttgaatcaaagggactccagagatgaccataaaaatgccagtgcagctttggaactgaagaaaaatgcagggaccggccatgcgacacacacaattgctaaaggcagctgtccttgctattagtttactgcctctaacccttggggacaagatcccttctctccaggcagattctagctgccctgggaaggctttggggactctcaagtcaggaggtccccctgctggaaggggccctgggacaatcccggccactgttcctcacggggactggttggggggcaggcttgcaacccctggatgcatctggaggggtggggacaggatcgaagatgctggggagggggaaaagggagacttgtgaccaagatgactcctttgcctgcctgggcaaaaattccccataaagagtggcgaggggtgtgccctgtggtgctgctccaaaacctgcaccaaagggaatgatgaaaggactagctggccttgtagtttcacacactttaacacgtacgccacgaaataacaaaacgaaagagaaacaccatttacactgattactattatgaggccggcagtgaggtaagtgcacagtctgtgtgccgccagcccgtcctggaggggagccgcgtcaagtctgcagcaggcgtttcgctacgagacgctcagtcccgtttccctttcctggcacacatggttcctgactcttctggaagaatatgatcatgcttctgaaaaactttttatttcttttcattattagagttctttcagataaataagctacttaaacacgttacacagaaatggttttcataagcacaaaacattagaagaaaactcaatgttcaaaactgagtgaagaatatcaacaccaaatattcaatatccatgaaaaattatagagaagctataacacgaaaaatgcttcagatttgataaagtttttttaaagatacaaaattagacatcccctattaatatcatataaaacactgaagaaaaacggagcagacacagaaataatgatgattgttagagaaaaaaaatctcacagctatcctaacaaaaccttgtgtactaccgctaggttgctttaatagtgtagaaacccatactgagcaactaactgctaggaagtaaatctaacaggttaattccaggcacaattaacagaggaagtgatttaaataatctaggactccaatagaagccaggggagaaattccgctccaacacaacaaagcaaaaagtaggacctgccctcaagacacagggtcatggaggccatatgccacgtgtgctgtgtgcgccgcgggtgctgtgtggtgcgtgcactgtgtgtgccacatgtgctctgtgtggtgcgtgcggtgtgtgctgtgtgtgccgcaggtgctctgtgtggtgcacgcgctgtgtgtggtgtgtgtgctgcatgcagtgtgcgcgctacgtgtggtgcatgtgctgtgtgtgctctgtgttgtgcatgcgctgtgtgtggtgtgtgtgccgcgtgtactctgcgtggtgtgtgtgctgtgggtgctccaggtgctctgtgtggtgtgtgtgctgcgtgtgccgcgtgtgctctgtgtggtgcgtgcgctgttt

SEQ ID NO: 1883715 - DNA, 4001 bp, Homo sapiens
tcaagaaaaccacacccaacacactttcccacaaccagcttctttcttcctgctccaacccacgggcacccatgccctccagagcatctgtctgttccttccttcaccggtcaaatattttctgagtgcctcttctgggccagggcaggccccgaggaagcaccagctacgatgaaagaggaccagaaaaagcagtcaccatgggtccatctgagttaagaagaggcagtttaggtgtgcctagttccaagtttacaaacaaaaccttaggctacaagtgtcatcttctcgtaagaaccaaataacttacctttggttcgacaaatctcaatcaagttgaccacattctcgtgttttagaagctgaaggatcttgatctcccgcaaggctgtaatggggaactgggtgagaaagaggggaaagtggtcaagagtgagcgcagtacagagcccagccctggggtctgtactgacagccaagttgggagacagagcaagatcatgggctctgaaaccagctgtctcagaagccttgtctataaaatggatattagtagcatgcacacttcaagatgatggtttgagacaacaaactgaaacagcaatactttgctattagccactaaacgctcggcggtttcagtcttcaaatttcagctctatggctgtttcgttggcaacaaacatgatgatttaaaaatgtccttgctaatgcacattacgcaaaagaaggtttatgggaagttgtactagagctaagatggggtggagaagggaccgctccttttaaatacattaaataattgagtatcagacacctttcaaaaagcatgcatatataatctttcttttacattaagcgaaatttaacactaaaaaaaggtgtttaaaggcttcctaacttcgtgaaataaagtgcacacgatgcatgcatcaactccccctcctggcctcacccataactgcctaagaatgaaacatttagttttagggtggaagccacattccctggaaatttctgaactactacaaaaaaattaaatctcaacctgagactcccagaagcagcagggtggaaaaccgacccggggtcccgggcagttagccggccggcccgcacgcccgatccgtactcaccccctccttctcgttttccatcagcaccttcttcagagccaccttctggccggtcttgcggtgcctggccttgaacacctccctgcaggcggaaagggagacccgagaactcatcaggccatttccgcagggcccgcccctcccccactacaggaggaggggcagcagcaaagagattcccgggcggggctgggctaggtacccagggcacgcggctaccccgccacccggcagcctgtctcgttcggagcctctgcttccttccctcagtcccttctcctcacttgggcgtcccttggagagatcccgctcccctcacgggcgcctctctgcagcccctccccgcccccaccacgggcctcaggctcctccccaccagccggctccgtcaggccggggcggggtgcggcgcggcctagagaccagcaggcaagcccggggacagacgacttctctaccaactcggggggggcccgggcatcccgacgtcggccctaggggtgcaggcccagggctcccggccccgaggggcccagccttacccgaaggtgccttggccgatcttggcgagcttctcgtatttggaaacttcatcacaaaaagggcactccaccgagtcgtactgctttgccatggccgcctccaacgcgccgccgccgcccccagtcgctgctgccgccgctcctgctccgggtcccgccgccgccgcactccaggcccctccgcggccgcgccacttccgcctccacggccacttccggcctcgcggcgccgaccccgcctcttccgcccgccgcccaccgccaggccccctgggacttgtagttcccgagaggccagggggagccggagctgcagaggcgcctccgccgccgccgccgctgcccccgcctccgccgccgccactactagcggcggccccgatcgggggcgcggggagccggggcgccggagctggggctcggggtggcgcgtcccgctgcatgggcccgggccgccgctgctgccgaagctgctgccgctctggcgcccgatccggggccagccgcagtgccctgctcctcctcctccgacggcgccgcctccgccgggctgcgcggggcggcgggcggggggtcagcccccgagccgcggcctgggagctccctggccggacccgggcccggggcggccgggcgagggggcgagacgggaagagccgactaggagacggcccgagagcccaggagggggcgcgttataaagggggaggtgcccggcctcgccctcccctcctcctccgcccgcccccgccctcctccctcccaccctccgcggccgcacctgccgccgccgccaccgcccgcccgctcgctgtccgccggccgccctcggcgcgtcaccgcccgcggcccctcctccgccttcggaggtggggccccgcgctcggcacctggctgcgggcgccctgccgcgtgcctcagtttacccccacatgtcggctgcagcggaaagccccttcctccccggctcggagtgcccccacagaggcgaaggcgggaggcgcggagggagcgtcctccggccctgggaggagagaacggcccccgcctccgcctcccccggtccccgccaccctccgttgacatggcaaccgacggccgccagggggcgcggcggcactagcggcgacgagcaagcaacgcccgggccttctatcgctggggtctggctctccgggaggcagggatgggacccgcaggactcccacctccgctgagtcgtgccagagctggtcgggccccgagtcagtaatcgcaaaaaacagctaccattttctcagcactcttgtgtactcaggaagtgctgggcgttcccgccgaatcctgaatcaacagccccatagtcaggatcactaacccattttgcagaagaagacgttgaggctcagaggtgaggtcatttgcccaaggtcacacggcgacaaagttgggacccgaacctgggtgtctgagtgaggggattctcttgactcacgctattcgctgttgggccaggaggatagcagtggggaggcctgctgtccttatgcaggcgcgagctcaccgttcaccccccccatctccctcccccatcgcgcccatcccttccctcgcatcttcctggctccagcggcccccagattccccctccagctctgcccaaggacagcctccagcaaagccgtcttttctgcctcctctgccccgcttcaatctgccccctcctctccagccctctgcgggtggatcctgagacctagccccccagtctggcctctctgtccccgaagaacctgaatgtgacattggaggctctttccagttcacaccccacccctcaagctgtggccatgcaaatctctctactgtctccccaagcctttctgcgttcagggcggtgctcccctgatcctacactcccccagactctcgttaccctctcttcctgcaagaagccattggagtgggcgcggtggctcacgcctgtaatcccagcactttgggagaccaaggcaggcggatcacaaggtcaggagttggagccagcctggccaatatgttgaaaccccgtctctactaaaaagacaaaaattagccaggcgtggtattgggcgcctgtagtcccagctacttgggaggctgaggcaggagaattgcttgaacccaggaggtggaggttgcagtgagccgaggtcttgccactgcactccagcctggtgacagagagagattccgtctcaaaaaaaagccctcggggtggctcccagctctcaccccacactgcttagcctcaaagcctcctaggaggaggcaggaatggctttggtgaccttgatgtcacaag

SEQ ID NO: 1883716 - DNA, 4001 bp, Homo sapiens
tgtctaattttgtatctttaaaaaaactttatcaaatctgaagcatttttcgtgttatagcttctctataatttttcatggatattgaatatttggtgttgatattcttcactcagttttgaacattgagttttcttctaatgttttgtgcttatgaaaaccatttctgtgtaacgtgtttaagtagcttatttatctgaaagaactctaataatgaaaagaaataaaaagtttttcagaagcatgatcatattcttccagaagagtcaggaaccatgtgtgccaggaaagggaaacgggactgagcgtctcgtagcgaaacgcctgctgcagacttgacgcggctcccctccaggacgggctggcggcacacagactgtgcacttacctcactgccggcctcataatagtaatcagtgtaaatggtgtttctctttcgttttgttatttcgtggcgtacgtgttaaagtgtgtgaaactacaaggccagctagtcctttcatcattccctttggtgcaggttttggagcagcaccacagggcacacccctcgccactctttatggggaatttttgcccaggcaggcaaaggagtcatcttggtcacaagtctcccttttccccctccccagcatcttcgatcctgtccccacccctccagatgcatccaggggttgcaagcctgccccccaaccagtccccgtgaggaacagtggccgggattgtcccagggccccttccagcagggggacctcctgacttgagagtccccaaagccttcccagggcagctagaatctgcctggagagaagggatcttgtccccaagggttagaggcagtaaactaatagcaaggacagctgcctttagcaattgtgtgtgtcgcatggccggtccctgcatttttcttcagttccaaagctgcactggcatttttatggtcatctctggagtccctttgattcaagaaattatacctctaggatgccaactaaacgaacaacaaacagaaactccacctgtttgctagcataacaggcgtgaaggcggcagtgtcgccggcgtccttccgcggaagcccagtgtgtgcagacagcacggggtggcgctgctctcaggtgctctggctgcttgggttcctggcatgctgatttgtgacttaagattaaaatcacattgccagggattaccacgcaaccacgaccttggctgctcctccagaaaccgtggtcgcgctcactgcagattggagaacaggtgcatctcgtagctcttctttggaaacaaaagaagccaccagctgaggaagatgctcaccggtcaccgtccctttatttatgcccagcgatgacctctctaacaaggtgcagagcttagctgattggtgaacagtgattggtttccgctttgttcacagtggctaagttctgcacctgaagagaaggtgagatggggacagttaagttggagccgctggggcagaggccgttgctgacgggccggccgctgctgcacagtcagcttgggtgcggagcgcgatcctggaggatgagagaccacttgaccccaaggatgcactgtctcctgctgggaatgctagccatgtactgagtccttaagtctgtccacagaaacatgcactaatcggacatctgtctgaaaggtcaaatgtattgaaagttgcaaaaattcttcttacaaaaaactaaaaccaaatgcatcacctaagtcgtgtgaaatcatgtggtagctcatggctgtgagcggggcggggcggggctttcggaggagctcctgttgttctgggcgcggtgaactctctcttgtatttgcagtccaggccttcgcgtctcctgcgccagcagacggtgcccacggagctcccagctgaggcgctgcttctccgggctgtcgattggacccgccctccggtgcctactgagctgatatcagttctcattttacacactggctcagttcagcaggaacaggagtcgagcccttgagcaaaaagccttcgtgtctgtaagtgcccgaggctcaggagagctggggctcccactcgcggcagacaggcccgcgtccaccctgcgtccaccccggcccggcggcagcacggtgccagtcatctgcatgtgctcctgcggcgtgggggtttgtagacttggaaaaccctgttggcagaaagttaagagctcccaggcctgaaggcaggacacagtgccagcagggggccgtttgcccccatgtgtaagggaggcagggcccagctctcccacggcgaggtgagctgagactttctgagaacagttagagtgggtgcgtgtctgaaatgggtactcctagcagctattgtgtacgcaaagcctgagtacagcctgctggtgtcatggccacgtgtgagcaggccagcgtcacacggctcgctgtgacccgtcccggagactgaaatgggcctgggtcttctccttgtcctgtgattaaagtcctctcttgaaagtggagagcaaaggcacacagaggtgcgcgctcacaagaattcctcccggtgactgggtaatcaatgttactgctgtttcctttgcaggaaagaccacagcaagattctttcattcgtctcctcctagcctgggggaccaggctcgaactgaccctggacatcaaaggagggattatgtggctgctaaagccatcggcccacagccctgttcacatcttggtgcttctctttcccagaggctggtcccagccaggcacacacaaaaggcagattctcgtaaacgcagcctccctccctggaggctgcctcctgccctggatctggagtggagctgctctgagattttgagttcttctgcagagatgattaaatatatccaagagacattggaaaacctgctgaacattttacattggtctgctcagcacatggctggatgcggatatttctataattccagaaagtcacacagctcctctgtatgagaccagtgggcgccatttaaaagaacaggatgagaatctaagatatattattaataaatgtaatggattttttttttgtatacgtgtttgcttctaaatttcatactgtttaaaaataataaaggccaggtgcggtggctcatgcctataatcccagcactttgggaggccgaggtgggtggatcacgaggtcaggagatcgagaccatcctggctaacatggtgaaaccctgtctctactaaaatacaaaaaattaggcgggcgtggtggtgggcacctgtaatcccagctactcgggagactgaggcaggagaatcgcttgaacccaggaggtggcagttgcagtgagccgagattgcgccactgcactccagcctgggcgacagagcaagactccatctcaaaaaaaaaaaaaaaaaaaaaaaaaaagcacgtacaagaaaaaggtattctccacattctggtgttccccccccacctcactagtttctttgttgttttcaaggtagtgttagttctcttagaagcctgaaaacaaaagtaatttggctgcgcgtggggcaccctcttccgataaaatggagagcctgggcatattcaggcatcgtgggagtctggtggtatgatttttctttctccacaaggtttagggtatagacagaagctgggcactgagcttccttggcactgtccatggggcagaatgtttgaaaatgcctggagaaggctgtaggaacgggtgcagccatgggccctgtgccaagttgggctgagcatgagtgcacctgaacacacccacagtctcctctgcctggctccagggggcagcacaaattctggcctgtttggggtgaagtggggctctaccatggatctcattagaagctctggactgggaggccttggtctccagaactctcttttcttgtcccagtgactgattccagaacgttcttaggatttgctctctgctgtcacatgcctttgcgtgggactgtatagctggctgtgccat

SEQ ID NO: 1883717 - DNA, 4001 bp, Homo sapiens
aatgttcatttccacacatggaacccagctcatcaactacattgaggtcaagggggcactggatatgtctgtaactgatgtagatgagggtacatggaactctgcaaaaggcaaaagaagcccaaataaactgatgaaacaagtttttaaaactaagttataggtaaaataaataaaccagttcttgtaataaactgtatgtcctggccaattgaccctgcaacaaattaccattaatataacgaatggataaggcactgtgaatctaattttcagctaaagctgttttgtgagttcttaaaagccttcataggcaagatcagcttgtacaatgatgtctttaaacaaattatccttatataaagagatgcttataaaagttgtagactaaaactacctcacttttgtgctacacatttttgttaaattagcagcttagtttaatatactccaagaggcatgaaatgaaggtataatgtgatctttctgtatgttttaataccctgagtaataataaataatgacaatcgagaatagtgactgctactttatttcttggaaaagcattaaaattaacatgaaattttatttattaaaagcaaagctttttattaaaacttcaatgcttaaaaacatgaaacatcaaacagtatttattaaacattagtatttattaaacattaaaatacaattgtatttactgaacattcttactctttaaagtgaatgtgtaaaaaccacttttaaaagagatctacagataatgagtaactccagaaacaaaggaagatgaggaatgtgaactaaccaggagaagaacttgagatccttgacaattaactccttggtctctcaagatttctatctttacaaagaattctacatgtactatcgttctggcatagaatttccacacatttcacataaaatcccttgtctctaactaaagaaaacttttttcttagtagtgaaataaatgtgttgagtgtctactggtatgcatatatcaagaattttagagacactaaatttttagacatgtgataagaatcatctgactaaaataccttatttccttatcttgagggtcctatggagtcactattattactctaattttacatttgtgtaaactgtggctcagaggttaaatgacttaagaacgcaccagtaatgagatttgaccataagttttactttgaagctcatgcttttcccaataaaatatgctgacttccacaagtctatggatccaatgacacatttactgtgactgctttaaagagttaggtttgcaggcccagaactcaacattatctgtttatttctttattattagttttgtgccagggatttcaccaaagacatttataatgcaaaaactataattatttgatatctcttttgcatcagggtagagtttcaaaaatatgtattgagaacctactatgtgtcacactctaaggatacagtggttatccctaacaaggtccctaaccctcaagaagcttacatggtagtgcgggagaaaagacactaagcaagtaaacaaatacgtttcagggagcaccaatgtttctgaaaaagcagagtaatgggataaagggtgactgaagtgctggagtattttagatagcatggtcacagaaggcttctctgaggagatgatatcctcgctgaggcccaaatgatgagagaaaggtaggcaagctaagaggcaagaacatcctaggtgtgtccaaggaatagccatacaggccaatgtggctagcatggagtgaattcatggtaggacacaatacatagcaggacaggaagtaaggaaggtgagaaaggccatgtcatggaaatccacatccaaggaagggcgcacatacacagcaatacacgaaggactggcatgcaggtggccatggctgctgtcagacaggaaagatggcaatatgttggcatagcaggttcccagttcaacagctatgccagcatcttgcctcctctccagttccaagttacaggagaatactatgactcttcagtgttttacttttccaaaatttttcctttcacctgagggagggaaaacacactcattaattgaaagcgcacttatttctgatcataacaacatagtcttccttagagtgtccgcttttgaagatgtagttaggcacaggaggtttgtgggtagttccatttttttaatggtctttgatctaaaatgaacctcgagaatgtttatggactacttgtgaaaccacagggatgaaattgtgacaaaaattttattaaatcaataatgtctaaagttgatgacagttaattataggctattaccaccatatttatagtccacaaaatatcccagtgactctcagtacaattttatttttactctaataactttacttggtcaatttctgccactcagatgtatttaaacaataacaaactgtggctcagcagtgtgtagttagttcactgctttatgtgctcttaaaaataatgttatttttggatttttttaaagacattcttgctctgtcatccaggatacagtgcagtggtgcgaccatagctcactgcagcctcaatctcccaggctcaggtgaatcctcccaccctagcctctcaagcaactgggactacaggtgtgtgccatcactctttttttttttttttgtatttttagtagagacaaggtctcgctatgttgcccaggctggtctcaaacccttaaactcaagccatactcctgcctccacttcccaaagtgtttggattacaggcatgagccaccatgccctgccaaaaataatgctcttttgagccaaaaattcccagctagaaacttatttcacaagtacatttgcaaaagtaccactaagttctaggtccaaggatgttcactgcaacactgtttttaatagtaaaagattggagacaacttgaacactcatcagtatgattgatacaggctaaataaataatatagttatacaacagaatatttggtggtccttacaaaacagtaaggcataagaataatgacattatgtataacttttgtgcaagtgaaaatgtatacacagacacatacctggagggcatacatacatgttttttattaaaggataaatgagcaatttattattttaaataaaaaaattggataggattataaattatgtttgctttcctctttaatatgtctctattaaaaaactagtaagtaatacgtattatttacccaaaatggagtgtaaggtaacctataaaggtaaaacattttgttatatagtgctaccaaggtatagataaggaagaagcatactcttttaaatatgattctagtatcaattgcctttgccagaaacaaaagtccagcattacctaagcctggtactagatatacacatatgcagtcacccacgcatatacagtatgtggtgtctgttcttgtgagggtaggaacttatgagtgttctattgcacaaaagcctgtaacatcttgtcctgaggctaggtaacttgtggaagaggtactaattgacttcctaggatacaattcaacttaattgcatgatctattaatgtaagggtatttaggaatttggggatcattaagtacagagcattgaatcaaaattaatggcaaatgcaaaacaggttaggtaacaaaattctgaattgagaagatttaactgaataaagcttctccaataaactcattattttaaaaaatattactaatatctgatattcataattaagaggcaggtacaagctgcatcattttagaaggtatatggtacatatttgaaaacagtaatttcttgtgacttttttcagttccattttgcacataaaaatttcagattcaaggccaggcatggtcttgagtacatctcagaacttttgaaggccaaggtggaaggatcacttgaggccaggagatcaagatcagccagagaaatatagcaagattccatctctactaaaaa

SEQ ID NO: 1883718 - DNA, 4001 bp, Homo sapiens
tttaggaaggttgactatgtttgtttccctcttgcatgcataaaaccttgcctgacatctcacatctcttatagtcatttacactacagtttttgcctttacatccaaatatagatgtaagttttaaaaaaataaatttgaaacaacaaattactaaaacatatatttctcttacattcctagccgtgatattatacattctgaagagagaaaatttcagctgacaccatgttggaaaaggcaaatactctcaaaattttgtgtctgcttcatgaaatataaaagcatatagtcaaatacagcacacagaaaaacaatagcaactgcttgctccaaaaactagactggtaatcctaatccaaaaagtggacctgaaaataaagatggcaaagacatgacaaacatacaaaccctttttcaccttactaattccctacctagagtagacattgatgaatggatggataccagaaatcaaacctttttgtaatcctgttttaaagatttaactggcttaagtccaacctagctggctcttccatgactttctctacagtgtgtctgaattttcaatacaatggaaattatagtaaagtagcaagttttcctacagtttacttggggattttagaattggtcttacctgatttattctgaaactgagtcaatgaaaatccagtctctaaatacacacacacacacacacacacaaacacaaacacacacttcaggaatagccaatccaggggataatttcaaagtctagtacataattgataaacactattcaaaaatttttattcttttatattcaagtgacactcaaggaaagaaaaataactctagtctacttttccttcgcacaatacaacacttggtacttttcactgaaatcataccttaattttcaaatctttcaccatttacaaactctaaaaagtgtaaagatgagtgattcagagagtgagactatgtaaaccatttacacaaagacattgaaaccctctggacaagttgaatgagaacaaatcagcacttacttggcataaaccactgatgcacatatccaaagattctgtatagcaacgcgtaccatctaagaccttaggtgctagttcaacaaccagggttgttcctttggcttggcacttgagtgaacatgggttgtcagggtcattagacacaggaagccattcataaaactggccatggtgcttgacatcattatgagctgagcattgctgagctcggaaatcacctgcttctggtgggcagtcctggagaaaaaagagagaaaggacatacaaaggttaggaggatacccccaaacatgaaaccagagcagctatatggtctgcttaggtcttagaaagcaaaacaaatgtcctggtcatgatagatggaacttataatatcatcttagaggttatatgattatttggcttgcaaaatgtagaaatctgataaagcaatcacctcaaaatacattttctgattgagtttaaatggaaaaataattggcttgaaatagatattctgattaggtgggacatacattttttgaaagttgtctattggttcatgaattcttccacactgtactatcattttgacttcctcataagtagaacctagtaaagtcagaggattagttgaaattatttgtctctttcagttctgatattgagagctatgacaattgtttatttgaataactagcagtaaaaagttataaaaatttcattcaaaaagtttttgtggagttgtaattttttgtctaggacttaggttgcatagtatctagaattaaacatggggaacaaaaaatatgaaaccatttatatatgaattgctttggcttaaggcagcatggcagaatggaaagagcatggacttcctccttagatgggtgggtggctgcaatgcagtgcagagttattgcccctattctaacacagggaagcctagtcttgtgttagaacagaggcaataactctgcacagctctcaaggttgttgtgagaagttcacgaactcatgctggccaaatatatgcacaaggaatatactgagtagatggtagctattactatgattatttaatgaggccacagaaggcaaagggatggagtatgaggagattctctcaatttgaattgtaaattatattgttagagatcagtggaaaataagaatctttttgatgtaagtttcataaagggcaatttaaaatgtaaaactatggctaacaatggccattatctaatgaataataaatctcagtaaaagcaggtaagatttaattttaaaaaggcaaatattgcctatcccttggaagggctttttgataggtttatcttattctacaagccttcagattaaaatttaccatggaagactgtcgtcgactctccagctgtagaaaggcttttattctaattttttgttttaaataaaggatttccatgtagccttcagcagttccctgttactacattatcattgtgagagttctcttatataaggtttctttctctgaaaaatctctttacctttaaataagcattctaaaacagcactgaaaattttgactcttttccaaaacattagtgatactactaaagagcatataacgctctggtagttgagggagcacaaattctttctaggcaatgtggggtagaaacaaatatttatttaggatgaacatgaaattgttcaaaatacaatataaaatgtcaaagacattttactgttagtattatgtgttctcagagtgaataaaccatagtagcagaggaaaagaataatgtatataacataggtacagatacacaggcacccagcaaggcttaacattttgaatattgtctgaaaagagtatgaataaaatttaccaattattaattttttagataataggatgcagtttaaattttttaagatccataaataaataaatatgtgtgctatacaggctgtttacacgtttattttgtaaaataaaacaaaaactacctacaaccagcaaaactatattatgaattacaacacaggtaaattgtgtcaaatcatgacatacaatacaaattaactttattttttttttttttgacaaggagtctcgctctgtctccccgggtggagtgtagtggcgtgatctcggctcactgcaacctccgcctcctgggttcaagcagttctcctacctcagccttctgagcagttgggattacaggcatgtgcccccacacccagctcatttttttatatttttagtagagacagggttttgccatgttggccaggctggtctcgaactcctgacctcaggtgatccacctgccttggcctctcaaagtgctgggattataggcatgagccaccgcaactggccacaaacaactttaaatgtttaacacaagctcctttcagaccatatgttctagagcacagagaaactgatttaatattgtcttaatgaactcacattccaaagataagacttccacttgcctaatttacaaattctaccaatatctgcctaggcctcacttactaacttctgccctaaaacaactctataactaacaactgcccccaaactctacacgtagccttccttaaatttccccacttgagatacgatagagtctctgtcaaggtgctgctctctcctgcttagcatgtttaataaacctacctttatatgatccacaagttcctggtcattgaatgggagcgtctaaagttgaactgacagtttagcaatgtttaaatacagtattttcgtttgatagtacctatcatcccaggagtcacttgattactcagtacaagtacagaagaagtagagtacattgtactgggggtacagtacttcattatactgaaatacaataaagcagaacattgaggaaattgtttgaaatggttccaaactcctcttaaaatttcctttgcctcctttttctatacaagtgaaacagttagaagggtcag

SEQ ID NO: 1883719 - DNA, 4001 bp, Homo sapiens
ccataaaaaggactttatgaaagtcacaattctcagctccatgtttaccacctgcagtagtagcaacagttttatactgaaccatccataaccaccaacccaaatttttaaccagtataagatatctgtctgtgagtcagctggctggggatgaatgaggtgcaatctggtcactttctgagacacagtaaactgaatccctaacccgctataagcacccagctgtcatcaacttaaattttagtctgtggttaagtaccaatttatttgcagggcaaagtgagcctcagaaaaattctactgtgttgttagattgccttaaggccaccaagtcatagcttactaccataatttgtagagttttcatcaattccagtgaactatatagtgattctttgtaattcttaccagttatcacccacattcttgaaatgctgctttaacatctaacttcaaataatctgttatcttatttctacgttctatcttgttgattattctcaaagagaaatgtagtgcttttgtaccttttctatcaaacttacagagtacataaatctaccaacaagttatttagatagaagttaccacccttctccataaacacggaaacaggctctcctccatcagggtttctttataaaggaaaaatgtttaagtagcatcaaccccatatgaggattctacctgtattttgccacacagagatttcaaactaactacatgtaaggaaaattatttccaaaatctaacgtttatttcagttgaaatgcaaaatagtgcaagtattactaatttgtaaggctgcccagaaaaattaacagtttttctcttgtgaaaacagacttccatgatgtgggggtgggggcacccactgttatgcccttagaaacattaagaccctcacgtaaaaggactaggaaattaagtttgtaattaagaaaaatcaaagaaagatagagataactgcacactgggaaaaataaatactagcctttgaaatttacattgcatgctgcaccattacatattaatacaaaccaccctagactcatgccttagtgctatattattactagtttcccctttaaaattatgtgtggaaattactatcctgtttcataaaggttactggcttggccaattaataccagctctaatttttattggattaaaatacatcacttcagatatgtaaactttcttctatacattaccacacacaaatcatttgagtatattaaaactaaaaaatcgacctactgccatcagaaagaagtctgagaaatagcttcatttattttcaatattataccctaaaagaaacttgtaccgacccttaaatccttatcctaaacacttggcaccagatgtgtttcagaataattttctaggttttagtaagattattacggtttacattgtgttcattattggatatcctcaatagggctcttgattaacatcgcataattgaacactgccagcatattacacgagtatagtttattattactataaggttaacacaatctacttgaaatttacctacagccagaaaaacatgctatttttctagctaggaatacaaaagggtgcaattactactacccatagaaatattcagtagtcctcatgtgaaaacagacttccatgctactagggagggggagaaaaagagaaaccacccactgttttgttctttcttccttaaatagcattcggagaaatctaacctacaaaggcagcagacagaaaacaaggtcacaatttggccaacgatggcatgggctttatctcccctaaatcttggtagtatcccagaacgcagcgttctagtcgctacctagttaagaaaaaggggttgactgttttctgaagccacgccctaaatgaagtgtcccgcatacagtaaggacaacaaattttaaatgtccctactcgctttcccccaatctactttaattggggggaaggggacagggacatttaaaatttgtctaattttactgatcgattacagccaccatgttctagtacggtgcttcaggactcaaacgcaaaagtttctcaaagcccaaaatttggccagtgtatactagcagaaaatgatgcccaaagtccactcaagttcttaatcggccttaaaatgaaactcctttaataataccctcaattgtatgactgcggctaacctataatggcccaaatcaccatacccagtaaacattttcgaatccccatcaagctcatttttcggggggtcgcctccaaagcttattcttataccactcacttcaaaaacaagaaaaagaaaagtgttcctctgtgttaacagatgaaaatgaccatttgaccattctaaaccacaaactagtaaaagctgcatcaccccgtcagcgacagggaaagtgtgtcacggttgctaaaggaaaaaggacggcaccaggtgggttttcctggactggttcaaagaactggaactgagaccagctactgaacggcctaattacttcggccacggccgagaaaaaagtgacgggatggtcactccgcgtcgccgaggaccccatgacccccaagttgcgccggttcctacccaggtactaaatgcggcccggtgggcactcttccctcaccctccgcgcacaccgaacaaaggcccaaccggcccggcgcggccaggcacccaaccatgtccgactgcgcggggcgccaggtggccgcgaccccaaaccccggccctcgccctccggccccgggctccgccccccaggccccggcccccacccccgaccctactatgcctgggtcgccccgcccgcgggggccccggctgagggagccggctcggggtctaagaaaggcgcccaccggtactcgtagtgttcgtcgaagtacttgtccgagtagtagatctgcttgtgggccatcctgctggcgcgctgcagaaaatgaaacgagagcgcgaagagcgggcgcagcagacaaaaccacgtccagcccaggcaacaactcgccggagactaacgaccgcagtcccaacgatccggatttgaatccgacagcccgccgccgattggacagcagcgccgaccaatcaccttctgcggaagtcggccggctgccagcctatcgtcgccgccgcctcgcaaagtccgcttcctgggtcagccaatcagagatctgttgcgaggttgcccgagggaagataggtacgtcacgggggtggcagggcccttaacgggcaggggcgtggccagaggagggcgaagtcgggacgttaagggccgcagagcgcgtgcgcaggaacgtggaaagttccaggacacggaaccgttgggacggaggacctgaaggtggagtgaggtatcacggggtttggtgatgacgtagtcggtcgaggccggaagcgtgggccacagggctttgagcggaagctgtcgaccttgcacggtgatggcgctcctcgtgatcccttgtatcccctcaggctcgagccaggagcctaggtccactttgaaaagtagtaaaaggcagaaaggttctgcggtgtgagggggagggcggcttcgtggtcggctgggtcgggggagcgccgggcggccgcggcgtggctgtgtccggggctgccctgcgcagccggccgtttcgccgcctggtgcacttgctgagcttccggcctggcccgtcgcggggctcctggcgcccccctagacgactgtgtggagaatggagcctgcggagccacgcgtagagagaggcccggagccggcgcggtggcggcgggcgccagtggtcccagccactcgggaggccgaggtggagtgtcgcttgagcccaggagttccagacaggcctgagcaacagagccagaccccgtctccacaaagaaagaaacaaatgggccagagacccagaatgctttctgtagcctaacctaatgttcaaaaccagggcagacccaagccatggaaagcttgagggaataaaataatatt

SEQ ID NO: 1883720 - DNA, 4001 bp, Homo sapiens
gctgccagacacccggttaacccctgcaccccagtcccctagacccctgcagtccaagggaaatgaccagggtgccctcaggctgaggggcaaggagtgtgggggccctgccgaggtgccacaaaaaacccctccccgcccactagggtgcacagaagcccctgccacctccttcccctgttgctggtctcctttaagaatgagtctatttggctttcacatctggattccagaggtgaccagagagaatggggagggctgggggtgggcttgtggtaatgaactccagctggccaaggagtgggggaagggaccctcttcttcctgagggggctgttggaggctacagcatcctcaacgggggagcggggctctgggtggggcctgtgattttggcctccaagccccctcccaggtccctgtctcctccaagtttgtcctgggcaggggccccaactctccaccttgggaggggccctctgtcgtcactggcgggggcgccaagccatctggacctcattaccccaaccctggcctcccccaccatgggggcccctggaagggatggagtgtgcagtggcatggggtgcgggtggggggtggcttcctgccggtctctctgcaggctccctagatgcccccatgggtttggggtctcccatgttgaggttccttactcagggccagggagaccatgtgacctggggctgagggccggagaccgggtgacactgtgggggaggggcacgtgccactgagggggtcccctgatctcatgcctgagcctgcaggcctttctggagcttttgtgtacatctgagttaagtcgtgtgcgaaaacagctctgagaatcatatgtggggagatgggagtcagctgtgggctgtgggtgctgggaggcggggtgtgtttgtgtgtgtgtgtgtgtgtgtgtgtgtggcttgtgggtctggtgtgtgggtgttttttaggagtgtgattggagtataagcatctaggtgtgtttggaatatgtggtctgcatttgcatctgggggtgaaatctgtgtgcctggggagtgactctgggcacctgcctgtgcttggggtgtaaaagcaggtgtgtgtggggagggggctctaggagggagggtgtgagtatggggtgtttgagaatctgtgtatgtctttgggatgtgaggatggggggagtgttccagttgtgagggtgtgtatgggtgtgtgtgcatgcacttgtgtgtgtccgtgtgggacatgggtgtgagattgaaagtgtgggggtgctcatgtgtgtgagttctggggctgtgagtgtcaaggtgcgtgtgtgttgaatgtgagtggattcttgcactaggaccactggggatgtggaggtggtccaggctggtgggagagtggtctgtacttctctactcaaccaccagccctcaggttttggggtgagggaggctctttgggcagaccggcggctgcccacatccccagtccccattgacccccccatcctctcagtcttcctcggccacccttcccccatcaccgctacccccaaccagtcccacacagggtggcacccccatccatctgtgcctcctcccagcccgccctgtgccccaaccccctggctccaggctccggttctgggatggcaggcaggggtcggtccagctctccagtggcggcggtgccgagggtctaacccagcccagcctaaccaatgtgcagactactgtacaatttgggagtcctgaacagatagtctaaacactgggtagacggagtggaggtgtcctctggtccatccaggcagcagtgtctgtccatccggtgggcgcttcagccccatcccctggagatccgagaaccccccaaccccagcctgtgtccccctagccccagaccagccagcccgtggtcccctctctgctcccaactccccttctgcctcctttgacgtggcaggggtgagcgggagctggggctgagaaggaggggcctgaggagggggccggccggcaggaagggaggggtggggggaggaggccgctcctacctagtgtccaaccccgaagcacagggcgggtggtggcggggcctctctcgaacggttccagatgttccctggccgtgtgtgcaacttcctcctctcctcccccagccgccctctggggctcccggccacccgcctggcataaagagggctttatgtggctgcatgggccaggggggcgttgggggcagagaggggtgggcgggatgacgccaggacgggggagcaaggtccccctaaacccagccccccacctgagatcctaggcaaggctcatgcccaacctctttgagtccccgaggcccacacagacgacccccgtgaacaagtagggcatgggtgacaaaaacccctcccctctcccagagccccatcctggggtacctcctccctagatccctgaacccctcccctgggacacagcagcctacatacacatgtgcccacaccgagcacacacatgggcctagcaccccacacgcctgtgcacagatacacataactcctcccagacagctctagataaatcaaacacacagcccattgtaccacggtgtgcaggtaagatgtgtaccccagtataagtccacaggcatggctctgcaaacatgtaggctcgcacaattgccacacacatccacaaagtgtgcacacatccacactgagatgcagacacgctgacaccgacacatggttcatgctgggcacctccccagatacacatgtgcacacacacacaatagctgataggatatgtacttgggcttgcatgtgttggcacaaacacacaactacacacatgttgcacacacaggcacaccatctccaggcttgtgctggctgccttattgctaacacatggggagctcgggggagtgggctgagccggccctttgaagccgccgggtctggtggccccccttcctggtctctgcagtcaggaaatgaagtcagaggcggccaggccgggggtgagagaggcctgagtgtgcggtccctgcctgaggctggcctggcttgtatccaggacttgcctggggagggattttgggagccactctcagcctccccacccctcaccagccccctggcccccggcatatatgcagagctggtaggactggctctgcgggggtcggcggtgcccaggaggcctacggtccgtggccaggcttttatctagctgcaccttcgcagtgggagggggctgatgcttagaagccctgggccagtcagggggactcttagagagtgaggtgtggcagagaacagtgccaacctcaccccattgctcctacctgcacccacaggagaaagagaagaaatacatgctgtctgtggacaacctcaagctgcgggacgtggagaagggctttatgtcgagcaagcatatctttgccctctttaacacggagcagaggtgcctgcctgcccctggctgtggctgctgcagccccaaaaccaccctcactgagtagaagctgggtacagggatccagggaggagaggaacctcccctaggccccacagcaagccatccactgacagatgcttattgagttcctgctttgagctagacatcatgtcaagatctcccatcccctccccttcccttccctcctccttccctccctcttttccttcctcccttccttccttccatcctccctcctttcctccctccctcccttcctcccttccttccattctccccttccctccctccctccgtcccttcctcccttccatagtcactggtatagtgcatgctcttcatgagacactctgccaggcactggagccaaagggccctagtcaggcctggtcctcttctcctgctctctttcctatagggtggtggcagtactagtcctcttccttcctgacccaaggctgactctagtgggccctctgctactcggagatgagagttcagtccagcggccat

SEQ ID NO: 1883721 - DNA, 4001 bp, Homo sapiens
aatctccttgaaattgtaaaaatataatacacaattttatactaccttctaattttacttcctcaagcatttgttgtagtttctagaatagctatctagccattacactgtacataaaagtgatcctccaatttatttccacttctaaaaagatgcttaaatatagaataaagcatttcatacctcccttctcgtttaaaattccaaaaagggccaacaatccacattataggttaaacactttgtctctgttatacacttttcagaatttataagactgaaaaattataaaatttcatccaatgaataattctgtactttattaaagtctggtttctctaaacatttacctatcatctaagcaatattaacatgtacaacaaagtagtaatatggtataaatagaaaataaacactccaagctgataattccataaggtctaatgattctattaaaacaaacacaaatcaaaattttccattttagggccccaaattcaacttgaaacattttttatatgataagattaaagcagctgcccaattttcaggaagctctgtctcaagttaaggaaaaaaagagaaaggaggaactatagttctttgggtgacttaaatcactgccttttttactttttttgccttaaaatcaagataaagttctcacctaaagattaacctctgaagacaatgaaaaataaccaggattggactttaaaaaacaacttaaaagtcagccccctcatacaaaactcgacaacaaataaacctagacttaactgtcattttcaaatccaatttttacctgaattggtaaaaatttatttaaaacaaaatgcaaaatacaatattgtttcaattttggcccaggagataaacactttaatgcagagttaataaactccagcgaataaataggatcattttcctaatttcacttcaaagctgccaggatttcaataaggaagttcaaaggcccgattccagaaactagaggtccccggaaagtgaggggcgtctggccacagcctcagttccaaaccaggtatagttcttgagctgtcattcttagtcctattaccactaatacaaggtcaaaaaaacggtcctgtaaggtgtcaattaaggggtcacttttgcctaaggtttccttaacttctctcctagtgaagccgctctaagtgaacatttccgctgtgttttttttaatgactgccattgtctcgctggagaatcggaggctcttttagaagtactgttggaaaattcaggattttacaaaacattttctcagctgtacagggcaaaaacaaactttaatcctactagccatgggtgtaaaccacaagcctaatttctcttctaagaagggaaagcttagttaagttttaaagtgacagtaattttaggtggtaaaatgagctcaactcaaacatcgctgtatgaaagcgctctccgccaacacgctcatggacacacacaactccttcctcgaggtttagggacagagagcgaacctgtgacttcgggccaggatgacgacctgagatttggacaagaggaggcggcggttccgcgaagagccaagggcggccggcgctccgggatgcgccggaccccgcggcgcatcctcgtttgggcgccaacgggcgccggcggtcctcggacccgggtgtcgactgccgtgtgcccactgccgtgtgcccaggccccgaagcctcctcaactccttgaggggcgcctccctagccagctcagcgcgcagcgggaccaaggctctcccagcttacctgcgggtccgagtaggaggacagaagcgccgcccggcctcgcccaagcgcacacgaaggggccgcttcccgccccccgcaccccagaccaggcggctcacggaacaccgcctcccagctctggcccgggaccaggcggtcccccagccggcttcggcgccgcggccggggacgcgcgtcttccttctccaggcgccggacgtggaacctgcgagcccctggcggcgccccaagttatgcacaggtcgcagctgctcaccaagctcctcctgggaggccgccctggtccccgagaggggcgcgcgggagtggacgttcccgcaccttcgccccatccacacctgccgccgccgccggggccgccagcgccgtggctccgccccggctccgcccctcgccgcccccggctcccgctccagccgccgccgcgaccgccgcggaaaggagggggagggaagaggcgcctggacggggctgcgggagcggccgtgctgagcctcctcccttgggcccggacgggacccaggtttctccactgcaacgcagctcccgagtgacggaattttgtgggggaagcggcggccactacgctcgcttttggcacagtagccctttgcgggtgggagcttctcgcagtcagagctaagggagagggagtccacctgcaagagccagagctcgcccttgtactctccgaatgcaaacttagcaaattgaacagcggaagtacttccttggtcggacccctgctcttctaggggtcttctagaaacgtggcggctatcacaggccccgtggtataactggcatttggaaaacgagggtgtttttccatctggagtggcctctctcctatcctcaaccctccgtgtccttcgacgcctctctcagatgccatctccaccaagaattttttccgggtacccacctgcgcccagatttgattccgccctctttgggacagcctgggtgctctgaacctttccactgccccttcaggtgtatgagagcgccttgtgaaatgcatgggccatcgttagttatttttattgcaatatgtggtttcatattcagtactgtagtatacaagcagagatatttatgctttcacaacacttttcatttgggtttgaattccttaaacatgaagactatagtaagttgcccatctctggaagtaaatactgaggggtacatggcagggtaatccgacccgatgacctagccagaagttctggctgtcctactcaactatgccctccgcaagcccagcatggtagcctttcacctggatttgaaggggaaaattgtatttctctctgaatgtaattacattttggcaaaggtcagtctagttaccaccaaaaaatattctacgagttgaagggtgggggtgggagcgtcagagcaaggttaatagtggtattttattgattttgaagtaaatataactctacgtagtcatttgttcaaccaaaacgaaaaatattcatcaaatattccctaataagttggtactcatttccttagccactttaaaaaacacaagtcaaatataattgattatataaattgtatttgcatgaagatttgagtccaaggactataagaaagattcaaattttaaattttctgcatacgatatggttaaataaaatgtttgtatactatttcctatacctaagtgtatgttttgagttgagatgtcagtagtgtttaatggttaatagtgttaagtaaacgacagctaggaatcactacagttagcttagaacaggttgaatttatgaactcccattttaaagaactgagaaatctcaaaccatatgactgccttgaccaagaaataaaaaaaattaaacagattcttaatattaaaatttctgaaaattttgaaaaatgaatttttaaaattaacagtcctagtatttttaaaaagcaaatattttagaaatcatgaaaaatgtaccttaagatgtaaaagaggataaacctcagagctaaggtctttttaaaaatgtagttagtgaaacctattcatggaaaactcaaaagcattctttgaagtgaaaaaagtactctaaatttattatggaaagtatagtatcattgaactcaaatagctattttaaacatcgtaattctgtgagtaacaagaaaaaaaagctttccttatatgtgaatcccactaggcaagactttgtccaaagt

SEQ ID NO: 1883722 - DNA, 4001 bp, Homo sapiens
gaagcaaggagtgggatggggagaataacaaaccagtccagaagctctataaactcagtgtacacagggccttagaccacagctgagtaagaattacctgtctaaggaagaagataaataatgaagaaaaggaggagtgaagagtccaaagtgaaattctgcctcctccacatttccttacactggttccaccctcttttctaaaggactgtcattccccttcccagtattctagcctcactgcaatatggtatgtctcaagtagaaagtgagctggtgggagagaccagtcagcttttagagacacagtatatacaataaccagtgggaaaagtactcgccagctcccttgactgctctctacatatttatggggtacataataatgtttcaatacatataatgtatagtaatcagataggggtaattggcatatccatcatcttgatcatttatcattttggtttttttttttttttttgagatagagtctcactgtcgcccaggctgcagtacagtggcatgaccacagctcactgcaacctccaccacctgggttcaagagattctcccacctgagcctcccgagtagctaggactacaggtgcatgccaccaagcccagctaatttttgtatttttagtggagatggggtttctccatgttggccaggctggtcttgaactcctgacctcaggtgatctgcccgccttggcctcccaaagtgctgggatttgaggcgtgagccaccgtacctggcctcatttcttttgttgggagcattctgtatcttccttctagctacttgaaatgatataatttattgttgaactacagtcattctacagtgctgtagaacattagaacttatgccttctaagtaatttttgtatcctttaacaaatctctctctacccaccccttcccagccccaacctcccttgagaggtcacatcttccctttcttgattaatctgccctggaaacccagctccacagggtgtcatatagcaacctggctgacattagatttccagcatgaggggaacggccgagctgctgaagggcacaggggatgagctgcttacgtggaattcttccattctcaccctccaaaacagtggtgaaacacagaaacatacaatgacagcatcacaatagatcatctggaggctatggtagtagtaaatattaattcaatattttcatacagtaatacatggttttgtgtccttgacaatgcctagtgattgtggatgcttactctaatgctaactaaaaaaataacaaggggttgtttcaattacataggcaaatagtaaacgtgtatttcaaaactagttccattattagcccactaaaatgaatttagcagttttcgaagcatcacaatgagaaagtaaaagacacatttttaaggtaatttaccttggaaacttaagtttatgagatgaatctttcatcaggtaggttaagcatacctttactgtcttgattattatttaagaactccagttaatttaatttccccaaatatgcataagagatttctgcttctctattccagtgttgggagagatttcttcaaataaatgaaaatacattttcttacagctttacattcttccttatacatttaaatattgtttatactcttaaatcaatgagaatttgtaataaatatttcatttgctcaaagtaaaaaatggaaacactgatttactaaatgatcattgctgactttttttaatccaaatacttttaattctccaaaattggaaggtaccgatgggaagcatgttcactttccaaatgagaatcgcatggcatacacactgtcttatctaattcatcaggacacccacccactggcactgaaaagctgtaatcccagcaagcaagagccatacccgtgtgcatgcactcatgtgaaaatatcacacacactaaattgcattgaggccgtgacaacatgcaacttagtaatgtgcaatatctccaccagagcaagcagaatgggagcatcagggaagaagggtgtgatgtatacattcaggagacaacatgctgctgaagagaggaaaatggtctggggataaaggatgcatgccactgactcaaaacttcatgaaatgaaaacccaattgcaaatgtattcaactgagaagaatacttattcagaatcaaaataatgagtaaggttcaaaacttcaatgagatagtgatcataaagaaaccacatacttcagaaggcaaagcttcacgaacagacactatcactgtctggtcatgcaattaacccccaatttcaattccatttttgacttattcacagatcatataaatgaatgtaatgatttccacttagctgcaacatagatgatgattaatgactgatgcttataaaagttggtatcactgatatttgtaggctaaactgcactttgaggacattacaatattttcatagtcattcataaattataaataaccacttatttttccctcaaaatctttttccatgaagaaacatattgcctcttcaacacaaaccttcaggatgaaaaatccaacaggagctcttagaaagagaactcactaccatcttctccacaggagaaagctcttcagaggaatctctgtaaaatctgtacattttaagtcttgaatttgagccagtaaagaaacagccctaggaacttaaactgcaaaaaaaacaccttgaattatagccttaaaattacataacttgatatagctttggttagaaaaatgtctcaggccataacccattctttagtctgtaccatatttatcagactcataaaaatctatcaattctgagaaccattagattatagttctggtaccaaaggttgttaaaattttttctgtatttaaaataaggtgataataaaacaaatggtttttaaatgccagtatactatggaaccaagacataagctactgttataatacataattagtgtatgcactcccaagaagggaagtcgaatctaatttgtaaaagactgatttcctcatatcgctgtagatgacagcactctttgtaatctcaaattctctcctgagccaaagacctgaatttctaaatgccaccctcttatgtccacaaatataagtcatgatcttccctaaccagctcctcttgaaagaaggcatcatggtgtaacagagtatgtgctttcaatcagctgaacctaggtgtgactaacagctttacttaccactgactggcaaacacaacagctaggaattaagtttaaaacaaaaaaggtggcatatttggtatgaaaaaaggtgacagacatttagaggatggtctgctgtaagaaagcagaacaagagaaaattcaaaagctgtgatgtgaaaatagaaacatttttctaagaataagagtcagtaacaatgaagattacttgaggaaaatggaagcatcatctttcttgaagttctttatgaacaaggtagatatttttctgcaaagcttggcttaagccacactgactggagaattcctaccagcctttgatatggctgctacaataaatagctttaccccactgggaagataaaagattagccttcctttttggtagagcatttgcaaaagcttttctgagtcagaaagatatcacctagataaacaaaagattatctattgctagaattttcatcatttcatttattcagcaaagatgatagtcaatggtcatataggacttaggagggaagctatagctggtacttccttcgaaacagcttcaccccaattgctgttacactggataatatactcccaaatctggaatctttatagatggcccctgtgtggatacctgaggacactatacaggtgttaagagcattttttttaatcccacttgacagccaatcgcggaaacaaggtattggtgaagatcttacccaggccttgctagtaggaaaaggggagagaacttagcaaaagttctacaga

SEQ ID NO: 1883723 - DNA, 4001 bp, Homo sapiens
ggtggggtcagtccggctgcggagatcccctgcccctgtcctgtggccggtccgggccagggcggcactgggcgctgagggctggggtccctggcggccggcggggccagcgggtattgattgttggttcttatttatagagcaccgggggtggacgcggcgctttgcaaaaccaaaaagacacagtgctgccgcgacgcgctattgagagggaggagggccagctgcagctgtgttcccgtcatagggagagctgagactccccgcccgccctcctctgccccctcccccgcagacagacagacagacggacgggacagcggcccggcccacgcagagccccggagcaccacggggtcgggggaggagcacccccagcctcccccaggctgcgcctgcccgcccgccggttggccggctggccggtccaccccgtcccggccccgcgcgtgcccccagcgtggggctaacgggcgccttgtctgtgtatttctattttgcagcagtaccatcccactgatatcacgggcccgctcaacctctcagatccctcggtcagcaccgtggtgtgaggcccccggaggcgcccacctgcccagttagcccggccaaggacactgatgggtcctgctgctcgggaaggcctgagggaagcccacccgccccagagactgcccaccctgggcctcccgtccgtccgcccgcccaccccgctgcctggcgggcagcccctgctggaccaaggtgcggaccggagcggctgaggacggggcagagctgagtcggctgggcagggccgcagggcgctccggcagaggcagggccctggggtctctgagcagtggggagcgggggctaactggccccaggcggaggggcttggagcagagacggcagccccatccttcccgcagcaccagcctgagccacagtggggcccatggccccagctggctgggtcgcccctcctcgggcgcctgcgctcctctgcagcctgagctccaccctcccctcttcttgcggcaccgcccacccacaccccgtctgccccttgaccccacacgccggggctggccctgccctcccccacggccgtccctgacttcccagctggcagcgcctcccgccgcctcgggccgcctcctccagactcgagagggctgagcccctcctctcctcgtccggcctgcagcccagaacgggcctccccgggggtccccggacgctggctcgggactgtcttcaaccctgccctgcaccttgggcacgggagagcgccacccgcccgcccccgccctcgctccgggtgcgtgaccggcccgccaccttgtacagaaccagcactcccagggcccgagcgcgtgccttccccgtgcggcccgtgcgcagccgcgctctgcccctccgtccccagggtgcaggcgcgcaccgcccaacccccacctcccggtgtatgcagtggtgatgcctaaaggaatgtcacgcagttttcggtctgtgtcgcttgttgacgccggcagacagtgtaaagggagggcaaaggcatgggggaagcttcgagcgctccaggcggccgcggccgctcaggcttgggcggcagcggcggggctccccgggtccgcgggcgaggcacagccgtgggggtcgggatcggggttcgggtctggcggtctcggcgggcggagggcggcggtgcggaggcggcggcggcgcgcacggcaggcggtgagcccagagcccagcgccaggcaggaagccaggctgacgaggaaggaggccggcccgagcgtgtaaaccacggccaggtcccgcagggcgagcggctgcgcgcaatggctaaaggcggcgtcggaaaaggcagtcagggggctgagcgtcaggcgtcccggccacacgcagagcaccgtctcggcctctgtgggacacagacaaaggcgcggcgtcaggtggcggctgccgcaccgccctgcagaccccgacccgcgtccccagcagctcacctgacgcgggcagcgggtgccggcgcagccaggcgcagagcgggcgcagcgcgcacccgcagccccaagggttgccgcgcaggtgcagcgcgtctagagcgggcaggcggcccagcagccccggcgcgagtgccgccagctcgttgtcctgcaggctgagtgagcgcagcagcgggagcgcgcctagcgccgcgggctccaggcgcgccagccggttgccggccaatgagaggttgcgcagcgcgcgcagcggcgcgaaagtccctggtgccagtgcttccagctggttggcgctcaggtccagcagctgcagcgcgcccaggccccagaaggctcgcacatgcaccgagtgcagcccgttctcgcgcaggtccaggcgctgtagcgcgcccgctcccgcgaaggcacctggcggcagcgcacggacgcggttgtggtccagcagcagcgcgcgcaggcgcaggctcaggcccgggggcacggcgggcagcgagagtgccgagcagctggccaggcctcccggcacgcacgtgcacacctcggggcagtccggggcgcccagggaccccgagggcgaggccgtggccgacacctgggcccagacaggccaaggcgacagcagcagcaacagcagcagcagcggccgaggccgcgaccaggaagggccccgcatgggggcagcccccccgcccccggcacccgcggtgggaggcccgctgcctgtgcgtccctggagcccgtcgtccgcggagcccgttcctgcggcgcctgcacaaatattaactctctggcccgagctcaggcagttcctgtcccacggctggatccacgcttggggcgggggcagggcaaacagccaacgcccggcaccgccagccacctgtccgggagctccaaactactcttggctcagcgccggccacagcgctatcaagaccacctcaccccgccttgtccaccaccgggcgcccgccgagccctgacctgagcagcaggacaccgcccacctgcacccgcccagctcacggctgcaacaggcgcccacacgcaatgcaacccagaggtcctgctcctcacccgtctcgaccccacccaggctccgcaaagtgatcccaacgtgcacatgcggagtggcccccacgcagggatggtcccattcccatgctggatagggcctgggttggagacaggccttggggtggagggagacagcacacccgaggcaggagaggcgtgcctgccccacccctcccccccaggactctcctgggatagaggtacagaccagtgcagtggggcaggggtatcagcccaagtcctgctgttaaacccagcgcccttcacagttgccagttgcaggtcctgttctaggggctttccaaagctgggtgcaggaaggagccgggctgaccagctgtggcagagaaggtggaaacattaggggtatggcttactgccagggggcagaggaacaggggaacttgctgtggggcctgggcactctgctttgatgagacccatatgcgcgtgcaccccccatgatgcagccgtgaggggtgtgagggcctgcagggaggacggtgcacaaccactaaacaagctttaattcccctcccccagctgccctcaggagggcctgcagggaggacagtgcacagccactaaatacgctttaattcccctcccccagctgccctcagccctctactcaggtggtaggggcgggggtggtggcggctcctctgaagaagcctccatggggatggccacaaggctctgatcctctagtggtggcaccagggagacctccaggtcagcgtccattagctgggactccacgtaaaccgggtgcaggtccatgagatcttcctggaccccaaaattctccaccaacctgcatgacgggccgggtcatcacgagctggtagagtccttgttcccccaggacaggctggcgtctgggacagtgcacccccacaaagggcctcccttgggacagca

SEQ ID NO: 1883724 - DNA, 4001 bp, Homo sapiens
atgcccaatttgtcaatttttggttttgctgcttgagcttttggtgtcatcaataaaccattacctaaacaaggttatagatttttcgcttacatttaggccacaaataattttattttcgtatatggtgtgagggaggggtacatggctattatttaatattcagtaatggtagagacaatgtttccaaaagtaagcaggaaaatcttggaaattctatctagtggtgcaaaaaactcattaataatctgaagaaaaatatctcaaagtagttaagaattttcttacctacactcacatgacagaaatcagttctcttgaagtaacttcatcttctctttgaggaaaactggtaaaacttaaaaaatcttaaagctaaaaagatgagaatctcacattcaaatatagattccagttttccattttaccctttttattgcttattcatgatttttatgaaggatgagccctatacctttctggtttagtccctaatgagagaagtcttaaagtgtctttttaaatgttttgctaataacctcatgcagagatacttgatcaatctatgacttaagtatctagtgagccacccttgagacctttccttctcaaagtctatttatatttacttaacaattctaacaaggtgggtgacgagctttccaagtcagtatcagatcagaaggggataaaattgctaataagggaacaacagagaagataaaaaatcttaagtactcaagaaccacaacagaccagggtaatcaactctacaggaaaagacacctacatacctcaaacagttttgaaagcatcaaaagcatcatagtctaatcaagttattgattcaagttatcatttaaaaaaaagtctgtgacaagtagtatctttcattttcttttaccctcattaatttttcagatgtgtgagtgcctctgagtttaatttaagaaaaaacaggacaagaacagttgggctgtttaactaactgaaatagctatttctgatcacagtatgccattaaaaggtattaaacagaaggtttaaggcattttagatcttcaactcttattataacctctagcctttcaaggaccaaaataagtgtttgtgcatttactgatttatttaggttcattgtgtaccttatcagaggccaactgaaacttatgggattgttatctgaagactaacagacctttagataccaacacattctaatctcttcaaggctggtcctactatggcccacatctatgggagcttattagagatgcagacttaccagcctcacctcgcacctacgagtcagaacctgcattttaacaagatccctaggggatgagcattcacatcaaagtctgaacatcaccactcttgcactgttctaacaattattcaggaatatctatctgaatttttatttttgagaaaataagatttaagctttctgagaagaggatcattccttttttttttttttttttgagacagtggctcactctgtcacctaggctggagtgcagtggcacaatcatggctcactgcagccttgacctccctgggttcaggtgttcctcccagtttagcccgccaagtagctaggactacaggtgtgcaccaccacactcagctttttttttttttttttttggtggggagggggtggtttgtagagacagggttttgccatgttgccctggctggtcttcaactcctaggctaaagcgatcctcttgccctgggctcccaaagggctgggattacaggcatgagccactatgcctggccagctcattcagcttttactgtgttttttagggagtctctactttccccaaagattaagaatcactgcattattacgtcaagcataaacactcagtataacagcattgactattcaggaagaatcatgtaccagcgaccgggctatggcagctgctgaggagaagcagcctccatgcataaatcacaggattgctatggcccatcgaatccactggagagctgtccatgcacaacagcatccagcaaccacagggcagggacagagcaggttaaccttgcacaacaaccttgttgtgcagagggatgccatcccctttgcttccctcttattataatccaggcccttgactcttcgctgctccacaactccttcaggtcaccttaacctcaacttcccgttcagcaatttcgagaccaccctccctgatattaactacatattattcacattacttcatattattttgcctcaatatattttagaaacgcacactaaaaccatgttttgtttaaaatttcataattccttccagaattgcttcccttttaaactactgtattagtggttccaatattcttcccattacttaggcatgacatttttgagtcacccctgacactactcagaagatacacacaaccaattaatcatcaagtcatgtggatcctacctataagcctatttctgttcccccttttcattctcctctaaatccatttctgtttctccttttattctcaggtcttcataatctattaagtcaaatgtaacctgaaagtgggaccgtctcaaacgtttcctcaatttagttatatcctattaacatagactccacaggtatactcatgcaaatgtacaaaatgtgtatacaatgacattcaccgaataattgtttctccaggcaaataactgaaaacaatctaaatattcatggtgactgaagtaaattacggtacatcaataaaataagtatctcgcagccattgaaggtaataaattaagacatataaaaatacgtattgcctatacataaagtcacagctatatcaatttatactatgtatatcattttaaaaagattttactcatttcaaacactacctcattcaaaaaggcgaccataaattcctgaggctggaaacgaacgaacggcaagccccgaagaaacacgctcttttaaaaattaaatcttgtgctactgtttcggggttgtaacgcgtgcgtgaccctcgtctttgagggccggatcctgcagggaagagagggcgtacctgaggggcctcgcgtgcctggacagccccgcgggccagcaagcctaaaagcaactcatccggcgtccacgctgcaaccgggcgcacggaggtgatgcaacgcgctgaaaatgcgggatccagtgaaggagacaggctccgcaccggccaatcagtgcgcgctgcctgacacctgccaacaagccaggcgccgattggtcgcgccggacatgattgcgcccactggctcggatggtgcgacagtggtgcttgctggttttgcgcctccacgtggaaaacgaaccagcgctgagggcggcgctgtgcgtgctgcttgtatccgttgcagtagtgtagaccgaggtctcactcgggttgtgggcacctccgggtaggtgacggcccactgggaaggggcgccgaggtcggggctcatgttcttcatcttgtttgcttttgtcagtatttatctgactggacacttcgtacctaaattgataacgacaaacagcaacttccggagaggtggctttaataattatacttttgggccctgagccgccgaccccaaagccgcttctcctatcataaatggctacgtgaaacgataataacaaaagggaaggaagggtctgacaaccagatttaaaagttttattgtattttacttaaaatgtttccggtaatgaaaacattgcacaaacgatttttttttctttttttgagaagcggtctcattctgtcgcccaggctggagtgcagtggcacggtcatggctcactgcagcctcaacctccccggatcagatgatcctcgcacctcatccctggccaagtagctgggactacaggctagcgccaccacgcccggctaatttttgtattttctgtagcaacggggtcttgctatgttgcctaggctgctgtcaaactcgtgggctcaagcgatctgcttgcctt

SEQ ID NO: 1883725 - DNA, 4001 bp, Homo sapiens
ccagtgcggacaccacctcctagctctcactagctcatgcaggcctctggggccctcctgaatccacacctcccagggctgggtcctggttgttccccaatggggagctgtgcctctctatcaccagcaggcatgtgatcacacctcccaggaagcacaggatcacacctcccaggaagcacgggatcacacctcccaggaagcacgggatcacacctcccaggaagcacgggatcacacctcccaggaagcacgggatcacacctcccagggagcacgggatcacacctcccagggagcacgggatcacacctcccagggagcatgggatcacacctcccagggagcacgggatcacacctcccagggagcactggatcacacctcccagggagcaccggatcacacctcccaggaaccacgatatcacacctcccaggaagcacaggatcacacctcccaggaagcacaggatcacacctcccagggagcaccggatcacacctcccagggagcaccagatcacacctcccaggaaccacgatatcacacctcccaggaagcacaggatcacacctcccaggaagcacaggatcacacctcccaggaagcacaggatcacacctcccaggaagcacgggatcacacctcccaggaaccacaatatcacacctcccaggaaccacgatatcacacctcccaggaaccacgatatcacacctcccaggaaccacgatatcacacctcccaggaagcacgggatcagacctcctggggagcacgggatcacacctcccaggaagcacagtatcacacctcccaggaagcacgggatcacacctcccaggaaccacgatatcacacctcccaggaagcacaggatcacacctcccaggaaccatgatatcacacctcccagggagcacaggatcagaccccccagggagcacaggatcacacctctcaggaagaacaggatcacacctcccggggaagacgatagcacacctcccagcgagtgtgagatcacacctcccagtgagcgtgggatcacacctcccaggaagcatggtatcacacctcccaggaagcacaggatcacacctcccaggaagcacgggatcacacctcccaggaagcatgggatcacacctcccagggagcaccagatcacacctcccaggaaccacgatatcacacctcccaggaaccacgatatcacacctcccaggaaccacgatatcacacctcccaggaaccacgatatcacaccttccaggaagcacaggatcacacctcccaggaagcacgggatcacacctcccaggaaccacgatatcacacctcccaggaaccacgatatcacacctcccaggaagcacaggatcagacctcacagggagcacgggatcacacctcccagggagcacgggatcacacctcccagggagcacgggatcacacctcccagggagcacgggatcacacctcccagggagcacgggatcacacctcccaggaaccacaatatcacacctcccaggaagcacgggatcacacctcccaggaaccatgatatcacacctcccaggaagcacaggatcagaccccccagggagcacaggatcacaccgctcaggaagaacaggatcacacctcccagggaagacgatagcacacctcccagcgagtgtgagatcacacctcccagtgagcgtgggatcacacctcccaggaagcatggtatcacacctcccaggaagcacaggatcacacctcccaggaagcatgggatcacacctcccaggaagcacaggatcacacctcccaggaagcacgggatcacacctcccaggaaccacgatatcatacctcccaggaaccatgatatcatacctcccaggaagcacgggatcagacctcccagggagcacgggatcacacctcccaggaaccacgatatcatacctcccaggaaccatgatatcacacctcccaggaggcatgggatcagacctcccagggagcacgggatcacacctcccaggaaagcacgggatcagacctcccagggagcacgggatcacacctcccagcgagtgtgggatcacacctcccaggaagcacagcatcacacgtcccaggaagcacgatatcacacctcccaggaagcacaggatcacaccttccaggaagcacaggatcacacctcccaggaaccacgatatcacacctcccaggaagcacaggatacacctcccagggagcacaggatcatacctcccagggagcacaggatacacctcccagggagcacgggatcacacctcccagggagcacgggatcacacctcccaggggagccacaggttcttaatgggacaaggccagcgcttagcagaagtgttcctggtgtttcttggtgtctgcccatcagtggcccccacctggctgcctgttgaagtcatccggggagccccctaaaagtacgcattctaggtccacctctaggccttctaagccaagccacccgcggggaggtggtggtagaacctgcagtgtgtgaggtcccacaccccaccccatagggttctctgctcggctacacttggagctcacttcacttcagcggcatggagacagtagccccacccgtccccacacacccgcacttctgcaggaaagggccttccgtcagagcccacagcgggctgggcctgcagctgaatgaagtcaactacttaaacgtcctgaagagggaaggaaaccacactgaataaagttagaggtgtgcacatgcaacgttctgcatgctttagagttacaggtgtgcacaggtagcattgtgtgtgctttggatggagttggaggtgtgcacaggtagcattgtgtgtgctttagatggagttggaggtgagcacaggtagcatcgtgtgtgctttagatggagctggaggtgtacacaggtagcattgtgtgtgctttagatggagttacaggtgtgcacaggtagcattatgtgtgctttagatggaggtgtgcacaggtagcattgtgtgtactttagatggagatggaggtgtgcacaggtagcattgtgtgtgctttagatggagttggaggtgtgcgcacaaagcactgtgtgtgctttaaatggagttggaggtgtgcacaaagcattgtgtgtgctttagatggagttggaggtgtgcacaggtagcatggtgtgtgctttagatggagttggaggtgtgcgcacaaagcactgtgtgtgctttaaatggagttggaggtgtgcacaggtagcattgtgtgtgctttagatggagttggaggtgtgcacaggcagcattgtgtgtgctttagatggagttggaggtgtgcacaggtagcattgtgtgtgctttagaaggagatggaggtgtgcacaggtagcatcgtgtgtgctttagatggagttggaggtgtgcacaggcagcattgtgtgtgctttacatggagttggaggtgtgcacaggtagcattgtgtgtgctttacatggagttggaggtgtgcacaggtagcattgtgtgtgctttacatggagttggaggtatgcacaggtagcattgtgtgtgctttacatggagttgaaggtgtgcacaggtagcattgtgtgtgctttagatgaagttggaggtgtgcacaggtagcattgtgtgtgctttagatggagttacaggtatgcacaggtagcattgtgtgtactttagatggagttggaggtgtgcacaggcagcattgtgtgtgctttagatgaagttggaggtgtgcacaggtagcattgtgtgtactttagatggagttgcaggtgtgcacaggtagcattgtgtgtgctttagatggagttggaggtgtgcacaggcagcattgtgtgtgctttagatggagttggaggtgtgcacaggcagcatgtgtgtgctttagatgaagctggaggtgtgcacaggtagcattgtgt

SEQ ID NO: 1883726 - DNA, 4001 bp, Homo sapiens
ttgcacatgggacccatgaatggaggaggcactctggccatgtggccagaggccccgctcctgtcctgcagatgtcttggtgacgaaacccgatccatgcatgtggaggaaggtgggggcatccctggagctggcctgtgccaggccaaagtgctcctttgagctgcccagggctgtcctagtgagtgtcctcaggctctggccacccaggagggccaggggcgtctgcattcgggagtgggttggagaaggggacgatgggagagcaggaagcttttgcaactgctccagggccattgggagggtgcaattggctgacacccggaacttcattgatgcttaccccacgtgccctctgtgtgggtcccgctcccagtgcggacaccacctcctagctctcactagctcatgcaggcctctggggccctcctgaatccacacctcccagggctgggtcctggttgttccccaatggggagctgtgcctctctatcaccagcaggcatgtgatcacacctcccaggaagcacaggatcacacctcccaggaagcacgggatcacacctcccaggaagcacgggatcacacctcccaggaagcacgggatcacacctcccaggaagcacgggatcacacctcccagggagcacgggatcacacctcccagggagcacgggatcacacctcccagggagcatgggatcacacctcccagggagcacgggatcacacctcccagggagcactggatcacacctcccagggagcaccggatcacacctcccaggaaccacgatatcacacctcccaggaagcacaggatcacacctcccaggaagcacaggatcacacctcccagggagcaccggatcacacctcccagggagcaccagatcacacctcccaggaaccacgatatcacacctcccaggaagcacaggatcacacctcccaggaagcacaggatcacacctcccaggaagcacaggatcacacctcccaggaagcacgggatcacacctcccaggaaccacaatatcacacctcccaggaaccacgatatcacacctcccaggaaccacgatatcacacctcccaggaaccacgatatcacacctcccaggaagcacgggatcagacctcctggggagcacgggatcacacctcccaggaagcacagtatcacacctcccaggaagcacgggatcacacctcccaggaaccacgatatcacacctcccaggaagcacaggatcacacctcccaggaaccatgatatcacacctcccagggagcacaggatcagaccccccagggagcacaggatcacacctctcaggaagaacaggatcacacctcccggggaagacgatagcacacctcccagcgagtgtgagatcacacctcccagtgagcgtgggatcacacctcccaggaagcatggtatcacacctcccaggaagcacaggatcacacctcccaggaagcacgggatcacacctcccaggaagcatgggatcacacctcccagggagcaccagatcacacctcccaggaaccacgatatcacacctcccaggaaccacgatatcacacctcccaggaaccacgatatcacacctcccaggaaccacgatatcacaccttccaggaagcacaggatcacacctcccaggaagcacgggatcacacctcccaggaaccacgatatcacacctcccaggaaccacgatatcacacctcccaggaagcacaggatcagacctcacagggagcacgggatcacacctcccagggagcacgggatcacacctcccagggagcacgggatcacacctcccagggagcacgggatcacacctcccagggagcacgggatcacacctcccaggaaccacaatatcacacctcccaggaagcacgggatcacacctcccaggaaccatgatatcacacctcccaggaagcacaggatcagaccccccagggagcacaggatcacaccgctcaggaagaacaggatcacacctcccagggaagacgatagcacacctcccagcgagtgtgagatcacacctcccagtgagcgtgggatcacacctcccaggaagcatggtatcacacctcccaggaagcacaggatcacacctcccaggaagcatgggatcacacctcccaggaagcacaggatcacacctcccaggaagcacgggatcacacctcccaggaaccacgatatcatacctcccaggaaccatgatatcatacctcccaggaagcacgggatcagacctcccagggagcacgggatcacacctcccaggaaccacgatatcatacctcccaggaaccatgatatcacacctcccaggaggcatgggatcagacctcccagggagcacgggatcacacctcccaggaaagcacgggatcagacctcccagggagcacgggatcacacctcccagcgagtgtgggatcacacctcccaggaagcacagcatcacacgtcccaggaagcacgatatcacacctcccaggaagcacaggatcacaccttccaggaagcacaggatcacacctcccaggaaccacgatatcacacctcccaggaagcacaggatacacctcccagggagcacaggatcatacctcccagggagcacaggatacacctcccagggagcacgggatcacacctcccagggagcacgggatcacacctcccaggggagccacaggttcttaatgggacaaggccagcgcttagcagaagtgttcctggtgtttcttggtgtctgcccatcagtggcccccacctggctgcctgttgaagtcatccggggagccccctaaaagtacgcattctaggtccacctctaggccttctaagccaagccacccgcggggaggtggtggtagaacctgcagtgtgtgaggtcccacaccccaccccatagggttctctgctcggctacacttggagctcacttcacttcagcggcatggagacagtagccccacccgtccccacacacccgcacttctgcaggaaagggccttccgtcagagcccacagcgggctgggcctgcagctgaatgaagtcaactacttaaacgtcctgaagagggaaggaaaccacactgaataaagttagaggtgtgcacatgcaacgttctgcatgctttagagttacaggtgtgcacaggtagcattgtgtgtgctttggatggagttggaggtgtgcacaggtagcattgtgtgtgctttagatggagttggaggtgagcacaggtagcatcgtgtgtgctttagatggagctggaggtgtacacaggtagcattgtgtgtgctttagatggagttacaggtgtgcacaggtagcattatgtgtgctttagatggaggtgtgcacaggtagcattgtgtgtactttagatggagatggaggtgtgcacaggtagcattgtgtgtgctttagatggagttggaggtgtgcgcacaaagcactgtgtgtgctttaaatggagttggaggtgtgcacaaagcattgtgtgtgctttagatggagttggaggtgtgcacaggtagcatggtgtgtgctttagatggagttggaggtgtgcgcacaaagcactgtgtgtgctttaaatggagttggaggtgtgcacaggtagcattgtgtgtgctttagatggagttggaggtgtgcacaggcagcattgtgtgtgctttagatggagttggaggtgtgcacaggtagcattgtgtgtgctttagaaggagatggaggtgtgcacaggtagcatcgtgtgtgctttagatggagttggaggtgtgcacaggcagcattgtgtgtgctttacatggagttggaggtgtgcacaggtagcattgtgtgtgctttacatggagttggaggtgtgcacaggtagcattgtgtgtgctttacatggagttggaggtatgcacaggtagcattgtgtgtgctttacatgga

SEQ ID NO: 1883727 - DNA, 4001 bp, Homo sapiens
atttgtgtttatgtgaagtgtatgtgtgttgtgtgtgtacctgtgtgtgtggtgtgcctgtgtggtgtgtgtgtgtgcctgtggggagctgtgcctgtgtatgtggtgtgtgtgcctgtgtgtgtggtgtgtgtggtgtgtgtgtgtgtggtgtatgcctgtgtgtggaggtggtgtttgtgcatgtgcctgtgtggtgtgtgtgctggcgtgtgtatggtatatgtgtgcgtgcctgtggggaatgtgcctgtgtgtgtggtgtgtgctgcatgtgtatagtgtgcatgcctgtgtgtgtggtttgtgctgtgtctgtatagtgtgtgtgtgggtgtggtgtgtgtgcctgtgtgtatggggtgtgtagtgtgtgtggggtggggattgaagtgctctcctgggtgaccagggccactgggaaggttctctctgcctggagcccagcgggcaggaagggctttgcaggagagggaacagcagggcagaggccagagggagtggggagaggaaggggaagtgggagggggctggtgtggcctgagcagagatggggagggaagccacacggggcagtaacccagacgcaggctgggggcggtgcagacccatgagagtgggtcacactccggctccaggtgtttcaaagatggggttgatgggatttgctgagaagaggaggtcgaaagtgagacgagagaattccaggagatgctcagccacaggcatgacccccacagtgccgcaggagcacacacacacgcgcacacacgtttacccactgacagctgtggcctggtgagaccaggctgaggacagctgcctcagcgacccaggctcagatgccaccagtgccccatgtggcctcggggaatctgctgctcagagctcctgtctgcccatttgcacatgggacccatgaatggaggaggcactctggccatgtggccagaggccccgctcctgtcctgcagatgtcttggtgacgaaacccgatccatgcatgtggaggaaggtgggggcatccctggagctggcctgtgccaggccaaagtgctcctttgagctgcccagggctgtcctagtgagtgtcctcaggctctggccacccaggagggccaggggcgtctgcattcgggagtgggttggagaaggggacgatgggagagcaggaagcttttgcaactgctccagggccattgggagggtgcaattggctgacacccggaacttcattgatgcttaccccacgtgccctctgtgtgggtcccgctcccagtgcggacaccacctcctagctctcactagctcatgcaggcctctggggccctcctgaatccacacctcccagggctgggtcctggttgttccccaatggggagctgtgcctctctatcaccagcaggcatgtgatcacacctcccaggaagcacaggatcacacctcccaggaagcacgggatcacacctcccaggaagcacgggatcacacctcccaggaagcacgggatcacacctcccaggaagcacgggatcacacctcccagggagcacgggatcacacctcccagggagcacgggatcacacctcccagggagcatgggatcacacctcccagggagcacgggatcacacctcccagggagcactggatcacacctcccagggagcaccggatcacacctcccaggaaccacgatatcacacctcccaggaagcacaggatcacacctcccaggaagcacaggatcacacctcccagggagcaccggatcacacctcccagggagcaccagatcacacctcccaggaaccacgatatcacacctcccaggaagcacaggatcacacctcccaggaagcacaggatcacacctcccaggaagcacaggatcacacctcccaggaagcacgggatcacacctcccaggaaccacaatatcacacctcccaggaaccacgatatcacacctcccaggaaccacgatatcacacctcccaggaaccacgatatcacacctcccaggaagcacgggatcagacctcctggggagcacgggatcacacctcccaggaagcacagtatcacacctcccaggaagcacgggatcacacctcccaggaaccacgatatcacacctcccaggaagcacaggatcacacctcccaggaaccatgatatcacacctcccagggagcacaggatcagaccccccagggagcacaggatcacacctctcaggaagaacaggatcacacctcccggggaagacgatagcacacctcccagcgagtgtgagatcacacctcccagtgagcgtgggatcacacctcccaggaagcatggtatcacacctcccaggaagcacaggatcacacctcccaggaagcacgggatcacacctcccaggaagcatgggatcacacctcccagggagcaccagatcacacctcccaggaaccacgatatcacacctcccaggaaccacgatatcacacctcccaggaaccacgatatcacacctcccaggaaccacgatatcacaccttccaggaagcacaggatcacacctcccaggaagcacgggatcacacctcccaggaaccacgatatcacacctcccaggaaccacgatatcacacctcccaggaagcacaggatcagacctcacagggagcacgggatcacacctcccagggagcacgggatcacacctcccagggagcacgggatcacacctcccagggagcacgggatcacacctcccagggagcacgggatcacacctcccaggaaccacaatatcacacctcccaggaagcacgggatcacacctcccaggaaccatgatatcacacctcccaggaagcacaggatcagaccccccagggagcacaggatcacaccgctcaggaagaacaggatcacacctcccagggaagacgatagcacacctcccagcgagtgtgagatcacacctcccagtgagcgtgggatcacacctcccaggaagcatggtatcacacctcccaggaagcacaggatcacacctcccaggaagcatgggatcacacctcccaggaagcacaggatcacacctcccaggaagcacgggatcacacctcccaggaaccacgatatcatacctcccaggaaccatgatatcatacctcccaggaagcacgggatcagacctcccagggagcacgggatcacacctcccaggaaccacgatatcatacctcccaggaaccatgatatcacacctcccaggaggcatgggatcagacctcccagggagcacgggatcacacctcccaggaaagcacgggatcagacctcccagggagcacgggatcacacctcccagcgagtgtgggatcacacctcccaggaagcacagcatcacacgtcccaggaagcacgatatcacacctcccaggaagcacaggatcacaccttccaggaagcacaggatcacacctcccaggaaccacgatatcacacctcccaggaagcacaggatacacctcccagggagcacaggatcatacctcccagggagcacaggatacacctcccagggagcacgggatcacacctcccagggagcacgggatcacacctcccaggggagccacaggttcttaatgggacaaggccagcgcttagcagaagtgttcctggtgtttcttggtgtctgcccatcagtggcccccacctggctgcctgttgaagtcatccggggagccccctaaaagtacgcattctaggtccacctctaggccttctaagccaagccacccgcggggaggtggtggtagaacctgcagtgtgtgaggtcccacaccccaccccatagggttctctgctcggctacacttggagctcacttcacttcagcggcatggagacagtagccccacccgtccccacacacccgcacttctgcaggaaagggccttccgtcagagcccacagcgggctgggcctgcagctg

SEQ ID NO: 1883728 - DNA, 4001 bp, Homo sapiens
gtctgtatagtgtgtgtgtgggtgtggtgtgtgtgcctgtgtgtatggggtgtgtagtgtgtgtggggtggggattgaagtgctctcctgggtgaccagggccactgggaaggttctctctgcctggagcccagcgggcaggaagggctttgcaggagagggaacagcagggcagaggccagagggagtggggagaggaaggggaagtgggagggggctggtgtggcctgagcagagatggggagggaagccacacggggcagtaacccagacgcaggctgggggcggtgcagacccatgagagtgggtcacactccggctccaggtgtttcaaagatggggttgatgggatttgctgagaagaggaggtcgaaagtgagacgagagaattccaggagatgctcagccacaggcatgacccccacagtgccgcaggagcacacacacacgcgcacacacgtttacccactgacagctgtggcctggtgagaccaggctgaggacagctgcctcagcgacccaggctcagatgccaccagtgccccatgtggcctcggggaatctgctgctcagagctcctgtctgcccatttgcacatgggacccatgaatggaggaggcactctggccatgtggccagaggccccgctcctgtcctgcagatgtcttggtgacgaaacccgatccatgcatgtggaggaaggtgggggcatccctggagctggcctgtgccaggccaaagtgctcctttgagctgcccagggctgtcctagtgagtgtcctcaggctctggccacccaggagggccaggggcgtctgcattcgggagtgggttggagaaggggacgatgggagagcaggaagcttttgcaactgctccagggccattgggagggtgcaattggctgacacccggaacttcattgatgcttaccccacgtgccctctgtgtgggtcccgctcccagtgcggacaccacctcctagctctcactagctcatgcaggcctctggggccctcctgaatccacacctcccagggctgggtcctggttgttccccaatggggagctgtgcctctctatcaccagcaggcatgtgatcacacctcccaggaagcacaggatcacacctcccaggaagcacgggatcacacctcccaggaagcacgggatcacacctcccaggaagcacgggatcacacctcccaggaagcacgggatcacacctcccagggagcacgggatcacacctcccagggagcacgggatcacacctcccagggagcatgggatcacacctcccagggagcacgggatcacacctcccagggagcactggatcacacctcccagggagcaccggatcacacctcccaggaaccacgatatcacacctcccaggaagcacaggatcacacctcccaggaagcacaggatcacacctcccagggagcaccggatcacacctcccagggagcaccagatcacacctcccaggaaccacgatatcacacctcccaggaagcacaggatcacacctcccaggaagcacaggatcacacctcccaggaagcacaggatcacacctcccaggaagcacgggatcacacctcccaggaaccacaatatcacacctcccaggaaccacgatatcacacctcccaggaaccacgatatcacacctcccaggaaccacgatatcacacctcccaggaagcacgggatcagacctcctggggagcacgggatcacacctcccaggaagcacagtatcacacctcccaggaagcacgggatcacacctcccaggaaccacgatatcacacctcccaggaagcacaggatcacacctcccaggaaccatgatatcacacctcccagggagcacaggatcagaccccccagggagcacaggatcacacctctcaggaagaacaggatcacacctcccggggaagacgatagcacacctcccagcgagtgtgagatcacacctcccagtgagcgtgggatcacacctcccaggaagcatggtatcacacctcccaggaagcacaggatcacacctcccaggaagcacgggatcacacctcccaggaagcatgggatcacacctcccagggagcaccagatcacacctcccaggaaccacgatatcacacctcccaggaaccacgatatcacacctcccaggaaccacgatatcacacctcccaggaaccacgatatcacaccttccaggaagcacaggatcacacctcccaggaagcacgggatcacacctcccaggaaccacgatatcacacctcccaggaaccacgatatcacacctcccaggaagcacaggatcagacctcacagggagcacgggatcacacctcccagggagcacgggatcacacctcccagggagcacgggatcacacctcccagggagcacgggatcacacctcccagggagcacgggatcacacctcccaggaaccacaatatcacacctcccaggaagcacgggatcacacctcccaggaaccatgatatcacacctcccaggaagcacaggatcagaccccccagggagcacaggatcacaccgctcaggaagaacaggatcacacctcccagggaagacgatagcacacctcccagcgagtgtgagatcacacctcccagtgagcgtgggatcacacctcccaggaagcatggtatcacacctcccaggaagcacaggatcacacctcccaggaagcatgggatcacacctcccaggaagcacaggatcacacctcccaggaagcacgggatcacacctcccaggaaccacgatatcatacctcccaggaaccatgatatcatacctcccaggaagcacgggatcagacctcccagggagcacgggatcacacctcccaggaaccacgatatcatacctcccaggaaccatgatatcacacctcccaggaggcatgggatcagacctcccagggagcacgggatcacacctcccaggaaagcacgggatcagacctcccagggagcacgggatcacacctcccagcgagtgtgggatcacacctcccaggaagcacagcatcacacgtcccaggaagcacgatatcacacctcccaggaagcacaggatcacaccttccaggaagcacaggatcacacctcccaggaaccacgatatcacacctcccaggaagcacaggatacacctcccagggagcacaggatcatacctcccagggagcacaggatacacctcccagggagcacgggatcacacctcccagggagcacgggatcacacctcccaggggagccacaggttcttaatgggacaaggccagcgcttagcagaagtgttcctggtgtttcttggtgtctgcccatcagtggcccccacctggctgcctgttgaagtcatccggggagccccctaaaagtacgcattctaggtccacctctaggccttctaagccaagccacccgcggggaggtggtggtagaacctgcagtgtgtgaggtcccacaccccaccccatagggttctctgctcggctacacttggagctcacttcacttcagcggcatggagacagtagccccacccgtccccacacacccgcacttctgcaggaaagggccttccgtcagagcccacagcgggctgggcctgcagctgaatgaagtcaactacttaaacgtcctgaagagggaaggaaaccacactgaataaagttagaggtgtgcacatgcaacgttctgcatgctttagagttacaggtgtgcacaggtagcattgtgtgtgctttggatggagttggaggtgtgcacaggtagcattgtgtgtgctttagatggagttggaggtgagcacaggtagcatcgtgtgtgctttagatggagctggaggtgtacacaggtagcattgtgtgtgctttagatggagttacaggtgtgcacaggtagcattatgtgtgctttagatggaggtg

SEQ ID NO: 1883729 - DNA, 4001 bp, Homo sapiens
gaaacccgatccatgcatgtggaggaaggtgggggcatccctggagctggcctgtgccaggccaaagtgctcctttgagctgcccagggctgtcctagtgagtgtcctcaggctctggccacccaggagggccaggggcgtctgcattcgggagtgggttggagaaggggacgatgggagagcaggaagcttttgcaactgctccagggccattgggagggtgcaattggctgacacccggaacttcattgatgcttaccccacgtgccctctgtgtgggtcccgctcccagtgcggacaccacctcctagctctcactagctcatgcaggcctctggggccctcctgaatccacacctcccagggctgggtcctggttgttccccaatggggagctgtgcctctctatcaccagcaggcatgtgatcacacctcccaggaagcacaggatcacacctcccaggaagcacgggatcacacctcccaggaagcacgggatcacacctcccaggaagcacgggatcacacctcccaggaagcacgggatcacacctcccagggagcacgggatcacacctcccagggagcacgggatcacacctcccagggagcatgggatcacacctcccagggagcacgggatcacacctcccagggagcactggatcacacctcccagggagcaccggatcacacctcccaggaaccacgatatcacacctcccaggaagcacaggatcacacctcccaggaagcacaggatcacacctcccagggagcaccggatcacacctcccagggagcaccagatcacacctcccaggaaccacgatatcacacctcccaggaagcacaggatcacacctcccaggaagcacaggatcacacctcccaggaagcacaggatcacacctcccaggaagcacgggatcacacctcccaggaaccacaatatcacacctcccaggaaccacgatatcacacctcccaggaaccacgatatcacacctcccaggaaccacgatatcacacctcccaggaagcacgggatcagacctcctggggagcacgggatcacacctcccaggaagcacagtatcacacctcccaggaagcacgggatcacacctcccaggaaccacgatatcacacctcccaggaagcacaggatcacacctcccaggaaccatgatatcacacctcccagggagcacaggatcagaccccccagggagcacaggatcacacctctcaggaagaacaggatcacacctcccggggaagacgatagcacacctcccagcgagtgtgagatcacacctcccagtgagcgtgggatcacacctcccaggaagcatggtatcacacctcccaggaagcacaggatcacacctcccaggaagcacgggatcacacctcccaggaagcatgggatcacacctcccagggagcaccagatcacacctcccaggaaccacgatatcacacctcccaggaaccacgatatcacacctcccaggaaccacgatatcacacctcccaggaaccacgatatcacaccttccaggaagcacaggatcacacctcccaggaagcacgggatcacacctcccaggaaccacgatatcacacctcccaggaaccacgatatcacacctcccaggaagcacaggatcagacctcacagggagcacgggatcacacctcccagggagcacgggatcacacctcccagggagcacgggatcacacctcccagggagcacgggatcacacctcccagggagcacgggatcacacctcccaggaaccacaatatcacacctcccaggaagcacgggatcacacctcccaggaaccatgatatcacacctcccaggaagcacaggatcagaccccccagggagcacaggatcacaccgctcaggaagaacaggatcacacctcccagggaagacgatagcacacctcccagcgagtgtgagatcacacctcccagtgagcgtgggatcacacctcccaggaagcatggtatcacacctcccaggaagcacaggatcacacctcccaggaagcatgggatcacacctcccaggaagcacaggatcacacctcccaggaagcacgggatcacacctcccaggaaccacgatatcatacctcccaggaaccatgatatcatacctcccaggaagcacgggatcagacctcccagggagcacgggatcacacctcccaggaaccacgatatcatacctcccaggaaccatgatatcacacctcccaggaggcatgggatcagacctcccagggagcacgggatcacacctcccaggaaagcacgggatcagacctcccagggagcacgggatcacacctcccagcgagtgtgggatcacacctcccaggaagcacagcatcacacgtcccaggaagcacgatatcacacctcccaggaagcacaggatcacaccttccaggaagcacaggatcacacctcccaggaaccacgatatcacacctcccaggaagcacaggatacacctcccagggagcacaggatcatacctcccagggagcacaggatacacctcccagggagcacgggatcacacctcccagggagcacgggatcacacctcccaggggagccacaggttcttaatgggacaaggccagcgcttagcagaagtgttcctggtgtttcttggtgtctgcccatcagtggcccccacctggctgcctgttgaagtcatccggggagccccctaaaagtacgcattctaggtccacctctaggccttctaagccaagccacccgcggggaggtggtggtagaacctgcagtgtgtgaggtcccacaccccaccccatagggttctctgctcggctacacttggagctcacttcacttcagcggcatggagacagtagccccacccgtccccacacacccgcacttctgcaggaaagggccttccgtcagagcccacagcgggctgggcctgcagctgaatgaagtcaactacttaaacgtcctgaagagggaaggaaaccacactgaataaagttagaggtgtgcacatgcaacgttctgcatgctttagagttacaggtgtgcacaggtagcattgtgtgtgctttggatggagttggaggtgtgcacaggtagcattgtgtgtgctttagatggagttggaggtgagcacaggtagcatcgtgtgtgctttagatggagctggaggtgtacacaggtagcattgtgtgtgctttagatggagttacaggtgtgcacaggtagcattatgtgtgctttagatggaggtgtgcacaggtagcattgtgtgtactttagatggagatggaggtgtgcacaggtagcattgtgtgtgctttagatggagttggaggtgtgcgcacaaagcactgtgtgtgctttaaatggagttggaggtgtgcacaaagcattgtgtgtgctttagatggagttggaggtgtgcacaggtagcatggtgtgtgctttagatggagttggaggtgtgcgcacaaagcactgtgtgtgctttaaatggagttggaggtgtgcacaggtagcattgtgtgtgctttagatggagttggaggtgtgcacaggcagcattgtgtgtgctttagatggagttggaggtgtgcacaggtagcattgtgtgtgctttagaaggagatggaggtgtgcacaggtagcatcgtgtgtgctttagatggagttggaggtgtgcacaggcagcattgtgtgtgctttacatggagttggaggtgtgcacaggtagcattgtgtgtgctttacatggagttggaggtgtgcacaggtagcattgtgtgtgctttacatggagttggaggtatgcacaggtagcattgtgtgtgctttacatggagttgaaggtgtgcacaggtagcattgtgtgtgctttagatgaagttggaggtgtgcacaggtagcattgtgtgtgctttagatg

SEQ ID NO: 1883730 - DNA, 4001 bp, Homo sapiens
ctcccagtgcggacaccacctcctagctctcactagctcatgcaggcctctggggccctcctgaatccacacctcccagggctgggtcctggttgttccccaatggggagctgtgcctctctatcaccagcaggcatgtgatcacacctcccaggaagcacaggatcacacctcccaggaagcacgggatcacacctcccaggaagcacgggatcacacctcccaggaagcacgggatcacacctcccaggaagcacgggatcacacctcccagggagcacgggatcacacctcccagggagcacgggatcacacctcccagggagcatgggatcacacctcccagggagcacgggatcacacctcccagggagcactggatcacacctcccagggagcaccggatcacacctcccaggaaccacgatatcacacctcccaggaagcacaggatcacacctcccaggaagcacaggatcacacctcccagggagcaccggatcacacctcccagggagcaccagatcacacctcccaggaaccacgatatcacacctcccaggaagcacaggatcacacctcccaggaagcacaggatcacacctcccaggaagcacaggatcacacctcccaggaagcacgggatcacacctcccaggaaccacaatatcacacctcccaggaaccacgatatcacacctcccaggaaccacgatatcacacctcccaggaaccacgatatcacacctcccaggaagcacgggatcagacctcctggggagcacgggatcacacctcccaggaagcacagtatcacacctcccaggaagcacgggatcacacctcccaggaaccacgatatcacacctcccaggaagcacaggatcacacctcccaggaaccatgatatcacacctcccagggagcacaggatcagaccccccagggagcacaggatcacacctctcaggaagaacaggatcacacctcccggggaagacgatagcacacctcccagcgagtgtgagatcacacctcccagtgagcgtgggatcacacctcccaggaagcatggtatcacacctcccaggaagcacaggatcacacctcccaggaagcacgggatcacacctcccaggaagcatgggatcacacctcccagggagcaccagatcacacctcccaggaaccacgatatcacacctcccaggaaccacgatatcacacctcccaggaaccacgatatcacacctcccaggaaccacgatatcacaccttccaggaagcacaggatcacacctcccaggaagcacgggatcacacctcccaggaaccacgatatcacacctcccaggaaccacgatatcacacctcccaggaagcacaggatcagacctcacagggagcacgggatcacacctcccagggagcacgggatcacacctcccagggagcacgggatcacacctcccagggagcacgggatcacacctcccagggagcacgggatcacacctcccaggaaccacaatatcacacctcccaggaagcacgggatcacacctcccaggaaccatgatatcacacctcccaggaagcacaggatcagaccccccagggagcacaggatcacaccgctcaggaagaacaggatcacacctcccagggaagacgatagcacacctcccagcgagtgtgagatcacacctcccagtgagcgtgggatcacacctcccaggaagcatggtatcacacctcccaggaagcacaggatcacacctcccaggaagcatgggatcacacctcccaggaagcacaggatcacacctcccaggaagcacgggatcacacctcccaggaaccacgatatcatacctcccaggaaccatgatatcatacctcccaggaagcacgggatcagacctcccagggagcacgggatcacacctcccaggaaccacgatatcatacctcccaggaaccatgatatcacacctcccaggaggcatgggatcagacctcccagggagcacgggatcacacctcccaggaaagcacgggatcagacctcccagggagcacgggatcacacctcccagcgagtgtgggatcacacctcccaggaagcacagcatcacacgtcccaggaagcacgatatcacacctcccaggaagcacaggatcacaccttccaggaagcacaggatcacacctcccaggaaccacgatatcacacctcccaggaagcacaggatacacctcccagggagcacaggatcatacctcccagggagcacaggatacacctcccagggagcacgggatcacacctcccagggagcacgggatcacacctcccaggggagccacaggttcttaatgggacaaggccagcgcttagcagaagtgttcctggtgtttcttggtgtctgcccatcagtggcccccacctggctgcctgttgaagtcatccggggagccccctaaaagtacgcattctaggtccacctctaggccttctaagccaagccacccgcggggaggtggtggtagaacctgcagtgtgtgaggtcccacaccccaccccatagggttctctgctcggctacacttggagctcacttcacttcagcggcatggagacagtagccccacccgtccccacacacccgcacttctgcaggaaagggccttccgtcagagcccacagcgggctgggcctgcagctgaatgaagtcaactacttaaacgtcctgaagagggaaggaaaccacactgaataaagttagaggtgtgcacatgcaacgttctgcatgctttagagttacaggtgtgcacaggtagcattgtgtgtgctttggatggagttggaggtgtgcacaggtagcattgtgtgtgctttagatggagttggaggtgagcacaggtagcatcgtgtgtgctttagatggagctggaggtgtacacaggtagcattgtgtgtgctttagatggagttacaggtgtgcacaggtagcattatgtgtgctttagatggaggtgtgcacaggtagcattgtgtgtactttagatggagatggaggtgtgcacaggtagcattgtgtgtgctttagatggagttggaggtgtgcgcacaaagcactgtgtgtgctttaaatggagttggaggtgtgcacaaagcattgtgtgtgctttagatggagttggaggtgtgcacaggtagcatggtgtgtgctttagatggagttggaggtgtgcgcacaaagcactgtgtgtgctttaaatggagttggaggtgtgcacaggtagcattgtgtgtgctttagatggagttggaggtgtgcacaggcagcattgtgtgtgctttagatggagttggaggtgtgcacaggtagcattgtgtgtgctttagaaggagatggaggtgtgcacaggtagcatcgtgtgtgctttagatggagttggaggtgtgcacaggcagcattgtgtgtgctttacatggagttggaggtgtgcacaggtagcattgtgtgtgctttacatggagttggaggtgtgcacaggtagcattgtgtgtgctttacatggagttggaggtatgcacaggtagcattgtgtgtgctttacatggagttgaaggtgtgcacaggtagcattgtgtgtgctttagatgaagttggaggtgtgcacaggtagcattgtgtgtgctttagatggagttacaggtatgcacaggtagcattgtgtgtactttagatggagttggaggtgtgcacaggcagcattgtgtgtgctttagatgaagttggaggtgtgcacaggtagcattgtgtgtactttagatggagttgcaggtgtgcacaggtagcattgtgtgtgctttagatggagttggaggtgtgcacaggcagcattgtgtgtgctttagatggagttggaggtgtgcacaggcagcatgtgtgtgctttagatgaagctggaggtgtgcacaggtagcattg

SEQ ID NO: 1883731 - DNA, 4001 bp, Homo sapiens
cacacctcccaggaagcacgggatcacacctcccaggaagcacgggatcacacctcccaggaagcacgggatcacacctcccaggaagcacgggatcacacctcccagggagcacgggatcacacctcccagggagcacgggatcacacctcccagggagcatgggatcacacctcccagggagcacgggatcacacctcccagggagcactggatcacacctcccagggagcaccggatcacacctcccaggaaccacgatatcacacctcccaggaagcacaggatcacacctcccaggaagcacaggatcacacctcccagggagcaccggatcacacctcccagggagcaccagatcacacctcccaggaaccacgatatcacacctcccaggaagcacaggatcacacctcccaggaagcacaggatcacacctcccaggaagcacaggatcacacctcccaggaagcacgggatcacacctcccaggaaccacaatatcacacctcccaggaaccacgatatcacacctcccaggaaccacgatatcacacctcccaggaaccacgatatcacacctcccaggaagcacgggatcagacctcctggggagcacgggatcacacctcccaggaagcacagtatcacacctcccaggaagcacgggatcacacctcccaggaaccacgatatcacacctcccaggaagcacaggatcacacctcccaggaaccatgatatcacacctcccagggagcacaggatcagaccccccagggagcacaggatcacacctctcaggaagaacaggatcacacctcccggggaagacgatagcacacctcccagcgagtgtgagatcacacctcccagtgagcgtgggatcacacctcccaggaagcatggtatcacacctcccaggaagcacaggatcacacctcccaggaagcacgggatcacacctcccaggaagcatgggatcacacctcccagggagcaccagatcacacctcccaggaaccacgatatcacacctcccaggaaccacgatatcacacctcccaggaaccacgatatcacacctcccaggaaccacgatatcacaccttccaggaagcacaggatcacacctcccaggaagcacgggatcacacctcccaggaaccacgatatcacacctcccaggaaccacgatatcacacctcccaggaagcacaggatcagacctcacagggagcacgggatcacacctcccagggagcacgggatcacacctcccagggagcacgggatcacacctcccagggagcacgggatcacacctcccagggagcacgggatcacacctcccaggaaccacaatatcacacctcccaggaagcacgggatcacacctcccaggaaccatgatatcacacctcccaggaagcacaggatcagaccccccagggagcacaggatcacaccgctcaggaagaacaggatcacacctcccagggaagacgatagcacacctcccagcgagtgtgagatcacacctcccagtgagcgtgggatcacacctcccaggaagcatggtatcacacctcccaggaagcacaggatcacacctcccaggaagcatgggatcacacctcccaggaagcacaggatcacacctcccaggaagcacgggatcacacctcccaggaaccacgatatcatacctcccaggaaccatgatatcatacctcccaggaagcacgggatcagacctcccagggagcacgggatcacacctcccaggaaccacgatatcatacctcccaggaaccatgatatcacacctcccaggaggcatgggatcagacctcccagggagcacgggatcacacctcccaggaaagcacgggatcagacctcccagggagcacgggatcacacctcccagcgagtgtgggatcacacctcccaggaagcacagcatcacacgtcccaggaagcacgatatcacacctcccaggaagcacaggatcacaccttccaggaagcacaggatcacacctcccaggaaccacgatatcacacctcccaggaagcacaggatacacctcccagggagcacaggatcatacctcccagggagcacaggatacacctcccagggagcacgggatcacacctcccagggagcacgggatcacacctcccaggggagccacaggttcttaatgggacaaggccagcgcttagcagaagtgttcctggtgtttcttggtgtctgcccatcagtggcccccacctggctgcctgttgaagtcatccggggagccccctaaaagtacgcattctaggtccacctctaggccttctaagccaagccacccgcggggaggtggtggtagaacctgcagtgtgtgaggtcccacaccccaccccatagggttctctgctcggctacacttggagctcacttcacttcagcggcatggagacagtagccccacccgtccccacacacccgcacttctgcaggaaagggccttccgtcagagcccacagcgggctgggcctgcagctgaatgaagtcaactacttaaacgtcctgaagagggaaggaaaccacactgaataaagttagaggtgtgcacatgcaacgttctgcatgctttagagttacaggtgtgcacaggtagcattgtgtgtgctttggatggagttggaggtgtgcacaggtagcattgtgtgtgctttagatggagttggaggtgagcacaggtagcatcgtgtgtgctttagatggagctggaggtgtacacaggtagcattgtgtgtgctttagatggagttacaggtgtgcacaggtagcattatgtgtgctttagatggaggtgtgcacaggtagcattgtgtgtactttagatggagatggaggtgtgcacaggtagcattgtgtgtgctttagatggagttggaggtgtgcgcacaaagcactgtgtgtgctttaaatggagttggaggtgtgcacaaagcattgtgtgtgctttagatggagttggaggtgtgcacaggtagcatggtgtgtgctttagatggagttggaggtgtgcgcacaaagcactgtgtgtgctttaaatggagttggaggtgtgcacaggtagcattgtgtgtgctttagatggagttggaggtgtgcacaggcagcattgtgtgtgctttagatggagttggaggtgtgcacaggtagcattgtgtgtgctttagaaggagatggaggtgtgcacaggtagcatcgtgtgtgctttagatggagttggaggtgtgcacaggcagcattgtgtgtgctttacatggagttggaggtgtgcacaggtagcattgtgtgtgctttacatggagttggaggtgtgcacaggtagcattgtgtgtgctttacatggagttggaggtatgcacaggtagcattgtgtgtgctttacatggagttgaaggtgtgcacaggtagcattgtgtgtgctttagatgaagttggaggtgtgcacaggtagcattgtgtgtgctttagatggagttacaggtatgcacaggtagcattgtgtgtactttagatggagttggaggtgtgcacaggcagcattgtgtgtgctttagatgaagttggaggtgtgcacaggtagcattgtgtgtactttagatggagttgcaggtgtgcacaggtagcattgtgtgtgctttagatggagttggaggtgtgcacaggcagcattgtgtgtgctttagatggagttggaggtgtgcacaggcagcatgtgtgtgctttagatgaagctggaggtgtgcacaggtagcattgtgtgtgctttagatggagttggaggtgtgcacaggcagcactgtgtgtgctttagatgaagttggaggtgtgcacaggcagcattgtgtgtgctttagatggagttggaggtgtgcgcaggtagcatcgtgtgtgctttaggtggagttggaggtgtgcccatgta

SEQ ID NO: 1883732 - DNA, 4001 bp, Homo sapiens
acaagtgactgacacatagaccagaggaattgcccagtttaatccttgaattcttcactcacaaaattgcaaaatatcactgtcattttaagccgctaaatttttaagtagaacaatctccttgtctttactggccttcgcctccatctcaactctaattccacagctttgatcctgtcatttcctggaccgcttcaacactgaactgtccataggctgcaaacacctttctatctgttcttcctcttacttacttcaccatgccagaatttaatattcagcaaacctcatcaccctaaactcctgaagttttctccagtctgtcagctgattcttggctttgatttacttcttttctatcctgttcaagccacataatgtatcatatcaatactctctatcatgttaaacttctgggatcaatccctgctcccagcctgcaaattcatatctctggattagtctacttattcacctctttcacttctacacataggaagctggaagttacttgagtctttgttctttggttttctgcatcaggtccctacaatgacatttagaagataagacagcactgtcttgttaagtaggaataaagtttatcaggtaattgaaaggaaacaaagagaactctaagtatcatggaagtaacaagtgctggaagcagctaccacccatagaacctggaaaacaaaggaaagaagctgcacttcttaaaacttaaaatctcagaggaggggaccccttgagtctggggcctagacctctgaggagaggtgtctgcccagcttatcttttaaatgccattttagggacctgatgcagaaaacaaaagaacaaatgctggcatttcaaagtgtgtgtgtgtgtgtgtgtgtgtgtgtgtgtgtgtgtctgtgtctgtgttttacaggggagtgagactggtttggggaatgttgggagaacattcaggaacaaactacttatggtggaacaaattacactctcagaatgaaaaagtaaaacatttttttctttctactccaggcttcagtcatccctttagtgccttctattgatagagcataaatgtgtttgcagagctcctgccccagcctcatatactgaaggtagaaggatgggcttgaagctgggagacagtagcctaacagatagtatagtaaatttaagtaaaatacttgtcgacaaactttggttttgaacccaagatggataattctaaaattgttttgaatcatgttagatgaatttaacccatttataattattatgataactcatatgtgttatctatttattcagtcttattttatgttttctgtttatgttgctttattttaaaattttctttcttttctttcacatcttttgatatgtttccttttaaaaatcatattattcagtaacttgtaaattagatagctaattctattatactgtgttacctacaaattagaatagcaatgataactacttatttaaaattatatttcttttcaatggcaataataaaattggataggatgctactcccaccaaagaacagagggctctgttttaaagaaattatgctaaaacataattggaaaataatatgtattctagtctgggagtctgtgtaccatgtctttctcattttgactcttggagagcccagtgtcaatgccagttccttttctgcttacccaaagaaagcccaccagtctatttgccctgtcatgccctgccctgcccagagcatccagcaagaattcccattcagtggtgagactgatggaaaacagactaatgttctcaacagcagaggaaaccacaccagccaccctggtcttttgatttaactagaactgagcaactgaagaccaattggcacataaggagaaacttctgtgatcaatcctttttttgttgcttgtcttggttttatgccttttatgtgccttgatataaaaggcataaaaccaagacaagcaacagaaaaactgacagcaaaagaagaagagaatccgaagacattaaaaatccccttaattgatgaattaaaagagattttggaaacatatctagataacaagagcaagatgttacaaaaatgtgacaaaaaaactgagatctttaataaagaaaaattaggatttaaaaaaaatttcaatagaaggcctggaaaatccaatgagctccttagagtcagagcaaaaagaaggaaaatattagagaagcaaaggaagtatagaaaaccaattcatcaggcttttcagaaagagtgaacagagaaaattaagagaacaaaattatatttatttatttattttttgttgagatggagttttgctcctgtcacccaggctggagtgcaatggcgtgatattggctcactgcaacctccgcctcctgggttcaagggattctcctgtctcagcctcctgagtagctgggatcacaggcacctgccaccatgcccagctaatttttgtatttttagtagagacaggttttgccatgttggccaggctggtctcgaactcctgccctcaagtgatccacctatctcgacctcccaaagtgttgggattacaggcataagccgctactcctggcccaaaattatatttcttaaaaaattaaaggaaattcccagggctgaatgatatgaatcccctattgaaagggcatgctgattcctgagtgcagtgaatgagaaatggccccaactgatatacatgctcattaaatttatgagcaccaaaggaaaaaagaggtttctggaaactcccagagagaagttaaaaaaaaaaaaagaaagaccctttttaaagggataaaggccagattgacatgaaactcttaagacgaggtaaaatattcaatttttttttttttttgagacggagtcttgctctgttgcccaggctgaagtgcaatggcgcaatcttggcttactgcaacctccgcttcctgggttcaagcaattctcctgcctcagcctcccaagtaactgggattacaggtgcacaccgccatgcccggctaatttttttgtattttagtagagacggggtttcaccgtgttgcctaggctggtctcaaactcctgagctcaggcagtccacccgcctcggcctcccaaagtgctaggattacaggcatgtaatctctttctcctcctcctcctcctcttcctccccctcctcttcttcctccccctcctcttcctcctcctccgcctcttcctcctctgcctcttccttctcctcctcccctcctctgctacttcttcttcttctcctctttttcttctttttctccttcttcttcttcttcttcttcttcttcttcttcttcttcttcttcttcttcttcttcttcttcttcttctccttctccttctccttcttcttcttcttttcttcttcttcttctctctctctctctcattatttccctacagtttccactcaaacaactttagagagcacttttatttctcaaacccaggctttcatctcatttaacagattatctgttgaacattttaccaaatatcctctggaattagtgaccaaatgatcaagtaacattaaagagtgttgctttactattctgttgcccagagttttcatttgggtaatatttttttagtgagcttgcctgcctttagagagtctcattcatctttttctagtctgacaacctgtggtaaatttagtctttaatatgtttatgggatgaaatagactgcatatttaagagtttcaaaataaaaatagcatagaaccctaaggatatagctatagctattagggaataaagaagtatggtatctatccttgataaactctgtctctgacttctttgtggaaagtgtaatatattttgggagcatatggctccatgctaatgcttattagcaaatgccatagcttatattgttctatgccttataaccatttcaaatggcatttgaaagatacaattttaaaacagcattggatgat

SEQ ID NO: 1883733 - DNA, 4001 bp, Homo sapiens
cattagcatggagccatatgctcccaaaatatattacactttccacaaagaagtcagagacagagtttatcaaggatagataccatacttctttattccctaatagctatagctatatccttagggttctatgctatttttattttgaaactcttaaatatgcagtctatttcatcccataaacatattaaagactaaatttaccacaggttgtcagactagaaaaagatgaatgagactctctaaaggcaggcaagctcactaaaaaaatattacccaaatgaaaactctgggcaacagaatagtaaagcaacactctttaatgttacttgatcatttggtcactaattccagaggatatttggtaaaatgttcaacagataatctgttaaatgagatgaaagcctgggtttgagaaataaaagtgctctctaaagttgtttgagtggaaactgtagggaaataatgagagagagagagagaagaagaagaagaaaagaagaagaagaaggagaaggagaaggagaagaagaagaagaagaagaagaagaagaagaagaagaagaagaagaagaagaagaagaagaagaagaaggagaaaaagaagaaaaagaggagaagaagaagaagtagcagaggaggggaggaggagaaggaagaggcagaggaggaagaggcggaggaggaggaagaggagggggaggaagaagaggagggggaggaagaggaggaggaggaggagaaagagattacatgcctgtaatcctagcactttgggaggccgaggcgggtggactgcctgagctcaggagtttgagaccagcctaggcaacacggtgaaaccccgtctctactaaaatacaaaaaaattagccgggcatggcggtgtgcacctgtaatcccagttacttgggaggctgaggcaggagaattgcttgaacccaggaagcggaggttgcagtaagccaagattgcgccattgcacttcagcctgggcaacagagcaagactccgtctcaaaaaaaaaaaaaaattgaatattttacctcgtcttaagagtttcatgtcaatctggcctttatccctttaaaaagggtctttctttttttttttttaacttctctctgggagtttccagaaacctcttttttcctttggtgctcataaatttaatgagcatgtatatcagttggggccatttctcattcactgcactcaggaatcagcatgccctttcaataggggattcatatcattcagccctgggaatttcctttaattttttaagaaatataattttgggccaggagtagcggcttatgcctgtaatcccaacactttgggaggtcgagataggtggatcacttgagggcaggagttcgagaccagcctggccaacatggcaaaacctgtctctactaaaaatacaaaaattagctgggcatggtggcaggtgcctgtgatcccagctactcaggaggctgagacaggagaatcccttgaacccaggaggcggaggttgcagtgagccaatatcacgccattgcactccagcctgggtgacaggagcaaaactccatctcaacaaaaaataaataaataaatataattttgttctcttaattttctctgttcactctttctgaaaagcctgatgaattggttttctatacttcctttgcttctctaatattttccttctttttgctctgactctaaggagctcattggattttccaggccttctattgaaattttttttaaatcctaatttttctttattaaagatctcagtttttttgtcacatttttgtaacatcttgctcttgttatctagatatgtttccaaaatctcttttaattcatcaattaaggggatttttaatgtcttcggattctcttcttcttttgctgtcagtttttctgttgcttgtcttggttttatgccttttatatcaaggcacataaaaggcataaaaccaagacaagcaacaaaaaaaggattgatcacagaagtttctccttatgtgccaattggtcttcagttgctcagttctagttaaatcaaaagaccagggtggctggtgtggtttcctctgctgttgagaacattagtctgttttccatcagtctcaccactgaatgggaattcttgctggatgctctgggcagggcagggcatgacagggcaaatagactggtgggctttctttgggtaagcagaaaaggaactggcattgacactgggctctccaagagtcaaaatgagaaagacatggtacacagactcccagactagaatacatattattttccaattatgttttagcataatttctttaaaacagagccctctgttctttggtgggagtagcatcctatccaattttattattgccattgaaaagaaatataattttaaataagtagttatcattgctattctaatttgtaggtaacacagtataatagaattagctatctaatttacaagttactgaataatatgatttttaaaaggaaacatatcaaaagatgtgaaagaaaagaaagaaaattttaaaataaagcaacataaacagaaaacataaaataagactgaataaatagataacacatatgagttatcataataattataaatgggttaaattcatctaacatgattcaaaacaattttagaattatccatcttgggttcaaaaccaaagtttgtcgacaagtattttacttaaatttactatactatctgttaggctactgtctcccagcttcaagcccatccttctaccttcagtatatgaggctggggcaggagctctgcaaacacatttatgctctatcaatagaaggcactaaagggatgactgaagcctggagtagaaagaaaaaaatgttttactttttcattctgagagtgtaatttgttccaccataagtagtttgttcctgaatgttctcccaacattccccaaaccagtctcactcccctgtaaaacacagacacagacacacacacacacacacacacacacacacacacacactttgaaatgccagcatttgttcttttgttttctgcatcaggtccctaaaatggcatttaaaagataagctgggcagacacctctcctcagaggtctaggccccagactcaaggggtcccctcctctgagattttaagttttaagaagtgcagcttctttcctttgttttccaggttctatgggtggtagctgcttccagcacttgttacttccatgatacttagagttctctttgtttcctttcaattacctgataaactttattcctacttaacaagacagtgctgtcttatcttctaaatgtcattgtagggacctgatgcagaaaaccaaagaacaaagactcaagtaacttccagcttcctatgtgtagaagtgaaagaggtgaataagtagactaatccagagatatgaatttgcaggctgggagcagggattgatcccagaagtttaacatgatagagagtattgatatgatacattatgtggcttgaacaggatagaaaagaagtaaatcaaagccaagaatcagctgacagactggagaaaacttcaggagtttagggtgatgaggtttgctgaatattaaattctggcatggtgaagtaagtaagaggaagaacagatagaaaggtgtttgcagcctatggacagttcagtgttgaagcggtccaggaaatgacaggatcaaagctgtggaattagagttgagatggaggcgaaggccagtaaagacaaggagattgttctacttaaaaatttagcggcttaaaatgacagtgatattttgcaattttgtgagtgaagaattcaaggattaaactgggcaattcctctggtctatgtgtcagtcacttgtttatattcaattagtggctagtctggcttagggagctcaagactgcttctctcacacacctggtgccttgtttgagacaactaggctcagctgag

SEQ ID NO: 1883734 - DNA, 4001 bp, Homo sapiens
accagctagtctggtccccttaaagaaaccacgtaggtgaaggcctaggccacagcctgttgctgagggtcttcgaggcttcactgattgtctccaatactcagtcctagaattattgttcttcagtcaagactgggagcaatgaatggtcagtgattaaataatatcagagacttctagtgcattaattccctaacctctctttggcctctcccaaatcctagatttacatatcagcaaagatagggaggactttggaatcagcatctgatcagaggaaccccttcggatgcctcctttaaaatgagtctgccctcttatttcctggagtcatttggatggctaaggagggccttggggacattttctctggcacgtgcgctccttgctgttgcttgtaacgaggaagctcccaagcgaatcctcacgctctgcaggacaggctgtctttcagcatctggacacgtgggctacatggagttgcaatttggagggcccccatcctggcaatggttcactcttcagagtttggggcaagccttgtaatatgcgtcctttctcctcatttgtacagcagcctttggcctcttttaggactagcaggaggagtggtgaggtcacagaaatgagtggacttcaggggaaaggagtgctataaaaaagcccagggacacactcctgaaacctgcatcgcatttgctgaaggggcctcaggtctgcagaatgatgagtcagctttccagcgcagggcccctacaggctgcgtgcacagggcatcatgccgaggacaagttcctcactcagctgggagtgggcagctggggcctgaactgcagagaaagggatgttggaagaacagagacggctttccaagtttctgctagtctggagtgaccaggaagggctgcagttccagcagtcttcggtcagctgagcgagtagttagtggtcaaaggcatagggaccctggtattggagtcatgcccagtgagccagccaaagccttcttttgcctgcccttggggtggaaatccagcatccggtggtttccgctcccctgctcccatgaaggcccattcctttgccacgtctccagggaggcacattttcaagtacgtgtctcttttgttcagttcttgtctcccaccaggacctttctttgaagcacactgctgcatgcgtgcaggcctcatgctcacccacacaccaccccggtcacctctgttctgtttaagtccatgtccaaaccacacgacccatgcatctttttttactgcacttactagatctctctctctctccttatgacaaagactttcatttatttttatttttatttttgcagtagaagtatatctaattccattagcttaaatttttgcaagcatttctaatctcttacaatacgcggtctctgcaaggtaaggcctcaggtcccctggccctttccctctcacacctgaggtcccacccaccagggcagtaccaactggctggctcccagaggtcagtggattctcccagggggctttgcctatcaacttcctctcccaggcaccatgctttccacacatggtccccctaccaactctggccccattttcagcctttccctgccttgccatgtttggaatttctctccctggcttcacctggagtttaagagtgaattagaaacgcagctgcccatcacctgcagatggctctgcaccctgatggtgaggcagctcgttccttggtgcagcctgggaccctgcctgagccagaggatgtgttttgtttatccacagcccccaaatatctcccaggcctattgcgacgggaccccaaccccaattctgactcccctccctgcttccactatacccagaccagggttggggaggggggtgggtgcagatctgggaatcgagaagcgcaggaaaggaagtgttggaaaccagaactggcaagctcactgtcttctctgcctcctccaggatccacacacatcctcaccccacagaaactgctggacacactgaagaaactgaataaaacagatgaagaaataagcagttaaaaaaataagtcgcccctccaaaacacgcccccatcccacagcgctccgcagcttcccaccaccgcccgcctcagttcctttgcgtctgttgcctccccagccctgcacgccctggctggcactgttgccgctgcattctcgtgttcagtgatgccctcttcttgtttgaaacaaaagaaaataatgcattgtgttttttaaaaagagtatcttatacatgtatcctaaaaagagaagctcatgtgcaattggtgcacagcaggagaaatttctggactgttaggatgaatggacgccttctccccgttatttaagatttgtgaccttgtacataaccctgggtgacgtgcacattgcttgggtatggaacggtagaaatttgggtgtttttaaaaccttgtttggggttgttcctgtccttgttgagaatcatagagatgtctgtgttcttggagtatttcacactgaggactaatctgctatcttcattccagtccctacccctcagtgcctgctctcatccaaataacctgggaggtgacaatcaggatatctcaggaggtccaaggtggaacagacctctttgcctttcccagcgtctcatacccccggtagtgcagctgtgggtggaggctggggtgtctgcacgaagtcaggccagcgtcctcctccacagcctgtcactgccccctccccagcctgtgtccacagtgctgtgatcccgagggaagtcctccagtctaagtcacagtgccctgacaggtgagaagcaaactcccgctggaagcctccatctctttggaaaaacagttagtctggagcctgtggcccaggcccttctgtccccaggcatcatcccaacagctcattttccctagtccgccttcgttcaagggtcaggaatggaccagaacagatgggttctggaggcccctgaacagagggctatggctgtggagaaggttcttggcccgttggactcacacagaccctgtaccctctcggcaagcatcttcagtcagattatcctcagtttcagatacttcataataccttgtgttgtgtggggtcatacatcatcgtgtttgtaagagaagatggtcattttattctctgtataaaacttagctctaaagcagaaactaaagcagcaaatgcaggaaggctgtctcgccatcctcaagactcagcagctctcattctccagtggtgagcacaccatttgtgctgctgctgttgtcgtgaaatataataacagtggaagtcacaaaaatgtcccctgcccagccccctcgccgcccttgacctcctgcaggccatgtgtgtattacttgtctagtgatgtcctctcaaagtgctgtacgcgagctcggcgccacctccgcctccctttcagagcctgctccccgccctctctgctcgctgcattgtggtgttctcttctcaaggctttgaaatctccccttgcactgagattagtcgtcagatctctccccgtctccctcccaacttatacgacctgatttccttaggacggaaccgcaggcacctgcgccgggcgtcttactcccgctgcttgttctgtcccctccctcggaccaaacagtgctcatgcttcaggaccttgtttgtcgaagatgttggtttccctttctctgttatttatataaaaataatttatcaaaaggatattttaaaaaagctagtctgtcttgaaacttgtttaccttaaaattatcagaatctcagtgtttgaaagtactgaagcacaaacatatatcatctctgtaccattctgtactaaagcacttgagtctaataaataaagaaatcagcaccccttcccggtgtccagggggctccagtctggctttcctttgggcaacggaaggagaaagcttttgcagtggttcatcgcagaggaggcgaccacctccgg

SEQ ID NO: 1883735 - DNA, 4001 bp, Homo sapiens
atctagcacttactgagagtgtgatgagtgagtgaattagttgacattgggttgccttattgatatgcccgtcaggccaagttccttgacttactaaggccagtgtattattttccattacatttagttcagtgatattttaaaaatgtgcataatactagcacatattcaaatgccaattcacatgagggaataatttcccaacagtgttatctagcttcttctcaagttccctgggtggaggtcagtctttgtagttgatgttgggttcctgacccaaacacagcttgtgccagttatggaaaggaaaaaaaaaaagggcagttttccatggtttggataaagaggtgaccgtgggaacatgtacagctctgtctgtagttctggtaaagtcactgaaaacgtaacccagcccggctctcttttgtacccacaaggaaatggggatagacaaggcctgtcaaacaagaggaaatggagcaaaaggaaatagacccattctgcaaagccatatggcatatgcagcagagggaagtgttggtcccattcaggagggaaaatatctctttagctatttattaggaaacattgaagtaatcttaaaaactgtgctatataaagaaaagatatgaaccccatctattcaatggaaaaatccaaatgcagataaaggcttatgaacagaaatgagtcattatagcactgctgataattgccaaaaaatatgtaacagctgggcgtggtggctcacacttgtaatcctagcactttgggaggccaaggcgggcagatcacctgaggtcgggaattcgagaccagcctgaccaacatggagaaaccctgtctctactaaaactacaaaattagccaggtgtggtggtgcatgcctgtaattccagctactcaggaggctgaggcaggagaatcccttgaaccccggaggcagaggttgcattgagccgagattgcgccattgcactccagcctgggcaacaagagcgaaactttgtcttaaaaaaaaaaaaaaaaaaatatatatatatatatatatatatatatatatgaaacaagcaactgtatgattatgaaatagtatgtctcactgattgttatataactcaaaattattttacgaggagattgtaatcacgtgggaaaatgctagcactagtgataatgctagtgattcaactcctgttgaatcactgcattattttaagatagtggttctcaaactccagcattcaaagagtgtaagacagaaagctgtattgctggcctaattctgtaaagaagaacacatttatgagcaaaaatgtgaaagcaaatgtgctaaaaggtttttctagataatgctatgactagtgattttaattttcgtttttgtatttttaaaacttctacaacatatatgtgttattccaaaaatcaaaaagaaacattaaaaaaatccatgtaatcaatatcaaacacaaaactttaactttgctcccagcaacaaatacataaaatatttaggggcatatttttatatcaaggtgattaaagcactgaccatgggaattttatgactatcctatgggaggttcagccatggtgcttaagatacccctagtgtccttctcatctcctttacaccagctctgcttgcaatcctgctgagtcctaaaatccccatgagtaggggtgactgtgagccatggacgtgcttagcaagaccaattggattccttcacctaggagtttaaactagagaacagtggggaagtgagaagatacacaaagagatgccaggttcaaggggcagccacagtaactttgacagaatgcagtgatccccaaagaagtgactctctggtgtctacactcctgtgaattcccctttcatgctgaggctgagcatggccataggacttcgttttgccagtgtgccaatgcctatcaaatatctacctgccatgtttgtcataggacaggcagatatgtgataggcattggcatattggggttggccctcttggaaacctgaaaccaccatgccctaagaagcctgagatgaacaacttcatggagaggggcccagccaggccaggtttatctcagtcgaacccagagcagacctgtaggagaatcaaccagccaacacattgcatcatgaggacgggaaaaatcattgtcattttcagccactaagttttagcagtgttttgttaccagcaatggataactgaggcagtcccaataggaactttggttgaatccctgtattattttaagatagtggttctcaaactccagcattcaaagagctgggtcaaaattcaagtgtctttaggggagagacattgttggcctcatttgcctttatatcccagttcctggaatggtgtttatcacatacctagacctgaagaaatatttgtaaataaatgaacaaatggatcttgggagtttgtttaaaatatgcccacctctggagatttctaatttggtaggtctaatttggtagggcgaggtccaggaaactgcatctgagtgatgctgagacaggtggcttgcagaccacatttttatcatcagggcctcaaattatccttgcaaccaaaagaggcaattgaccaatcttccacctggccgtgcatcagaattacctgaggagctttttaacgatattccttccagattctcacccctgacctaccaaatctgaaaacctctggagggggagactcacactctacattattaagaagctcctgggtgcagctggtgcagctggtccacagattggagggcatttttgctggcctaaccaacacaagtctccaaaagccatctggcagccaaacacacttttctcactcctgagaagaacacacacctactcagttaaacattatcacactaatctttaaagctttttaaaagacagctttcatttttacgtcaagaaatgtttgttagggactcctaaatctcagtgtctcatctgtcaaacaaaatttggtaacacctgcttcctgaatgccatgaagactacatgaggtaaggtgtgtgaccacacattgaaaccggaaacaccaagcacaggatttttaagactttaatcataagtatgacataaaggagattaaaattgtttatctatttttaggtaattattcagggttctttaggaggtaccttgttcctccttaatcagggagagacaggcctttgggacctcctacacaaaatgtttcagagaagggaaaccgtggacacatttcttattcctgcacatggtgtttaaagcactgtgtgctctgaaccctgcattaccttgttctttccttcccctggtccttttccctccctcctcctgcccctaagtgtcagcccttccaaaacactaatgcagtaggctggttcacatctttgactagccctggctcaagctgtgtattatatctgaaatgttcttaattcattaattattattgaaacagggtctcactctgttgcccagactggggtgcagtggcacaaacacggctcactgcagcctcaacctcctgggtctaagcaattctcccacctcagactcctgagtagctgggactacaggtatgtgtaccacatctggctaatttatcttaaatttcttttttttttagtagagacaaagtcctgctgtgtttcccaggctggtctcaaactcctggcctcaaatgatcctcctgccttggcctcccaaagtgctgggattactggcatgagccaccacatccggcgtggaatgttctttcttgtccatcccatccacttagaactctccagagtctttgatgtctgttgctatctcccaccctctggtcagatgaaattgactagcccctgttacgagctcccctagacatttatcctgttcccccccagaacacctggttgcacttacctaagtacataacctttccttcctcactgagtccaagctctttgagggcaggggcttttcctta

SEQ ID NO: 1883736 - DNA, 4001 bp, Homo sapiens
atctgtctgttccttccttcaccggtcaaatattttctgagtgcctcttctgggccagggcaggccccgaggaagcaccagctacgatgaaagaggaccagaaaaagcagtcaccatgggtccatctgagttaagaagaggcagtttaggtgtgcctagttccaagtttacaaacaaaaccttaggctacaagtgtcatcttctcgtaagaaccaaataacttacctttggttcgacaaatctcaatcaagttgaccacattctcgtgttttagaagctgaaggatcttgatctcccgcaaggctgtaatggggaactgggtgagaaagaggggaaagtggtcaagagtgagcgcagtacagagcccagccctggggtctgtactgacagccaagttgggagacagagcaagatcatgggctctgaaaccagctgtctcagaagccttgtctataaaatggatattagtagcatgcacacttcaagatgatggtttgagacaacaaactgaaacagcaatactttgctattagccactaaacgctcggcggtttcagtcttcaaatttcagctctatggctgtttcgttggcaacaaacatgatgatttaaaaatgtccttgctaatgcacattacgcaaaagaaggtttatgggaagttgtactagagctaagatggggtggagaagggaccgctccttttaaatacattaaataattgagtatcagacacctttcaaaaagcatgcatatataatctttcttttacattaagcgaaatttaacactaaaaaaaggtgtttaaaggcttcctaacttcgtgaaataaagtgcacacgatgcatgcatcaactccccctcctggcctcacccataactgcctaagaatgaaacatttagttttagggtggaagccacattccctggaaatttctgaactactacaaaaaaattaaatctcaacctgagactcccagaagcagcagggtggaaaaccgacccggggtcccgggcagttagccggccggcccgcacgcccgatccgtactcaccccctccttctcgttttccatcagcaccttcttcagagccaccttctggccggtcttgcggtgcctggccttgaacacctccctgcaggcggaaagggagacccgagaactcatcaggccatttccgcagggcccgcccctcccccactacaggaggaggggcagcagcaaagagattcccgggcggggctgggctaggtacccagggcacgcggctaccccgccacccggcagcctgtctcgttcggagcctctgcttccttccctcagtcccttctcctcacttgggcgtcccttggagagatcccgctcccctcacgggcgcctctctgcagcccctccccgcccccaccacgggcctcaggctcctccccaccagccggctccgtcaggccggggcggggtgcggcgcggcctagagaccagcaggcaagcccggggacagacgacttctctaccaactcggggggggcccgggcatcccgacgtcggccctaggggtgcaggcccagggctcccggccccgaggggcccagccttacccgaaggtgccttggccgatcttggcgagcttctcgtatttggaaacttcatcacaaaaagggcactccaccgagtcgtactgctttgccatggccgcctccaacgcgccgccgccgcccccagtcgctgctgccgccgctcctgctccgggtcccgccgccgccgcactccaggcccctccgcggccgcgccacttccgcctccacggccacttccggcctcgcggcgccgaccccgcctcttccgcccgccgcccaccgccaggccccctgggacttgtagttcccgagaggccagggggagccggagctgcagaggcgcctccgccgccgccgccgctgcccccgcctccgccgccgccactactagcggcggccccgatcgggggcgcggggagccggggcgccggagctggggctcggggtggcgcgtcccgctgcatgggcccgggccgccgctgctgccgaagctgctgccgctctggcgcccgatccggggccagccgcagtgccctgctcctcctcctccgacggcgccgcctccgccgggctgcgcggggcggcgggcggggggtcagcccccgagccgcggcctgggagctccctggccggacccgggcccggggcggccgggcgagggggcgagacgggaagagccgactaggagacggcccgagagcccaggagggggcgcgttataaagggggaggtgcccggcctcgccctcccctcctcctccgcccgcccccgccctcctccctcccaccctccgcggccgcacctgccgccgccgccaccgcccgcccgctcgctgtccgccggccgccctcggcgcgtcaccgcccgcggcccctcctccgccttcggaggtggggccccgcgctcggcacctggctgcgggcgccctgccgcgtgcctcagtttacccccacatgtcggctgcagcggaaagccccttcctccccggctcggagtgcccccacagaggcgaaggcgggaggcgcggagggagcgtcctccggccctgggaggagagaacggcccccgcctccgcctcccccggtccccgccaccctccgttgacatggcaaccgacggccgccagggggcgcggcggcactagcggcgacgagcaagcaacgcccgggccttctatcgctggggtctggctctccgggaggcagggatgggacccgcaggactcccacctccgctgagtcgtgccagagctggtcgggccccgagtcagtaatcgcaaaaaacagctaccattttctcagcactcttgtgtactcaggaagtgctgggcgttcccgccgaatcctgaatcaacagccccatagtcaggatcactaacccattttgcagaagaagacgttgaggctcagaggtgaggtcatttgcccaaggtcacacggcgacaaagttgggacccgaacctgggtgtctgagtgaggggattctcttgactcacgctattcgctgttgggccaggaggatagcagtggggaggcctgctgtccttatgcaggcgcgagctcaccgttcaccccccccatctccctcccccatcgcgcccatcccttccctcgcatcttcctggctccagcggcccccagattccccctccagctctgcccaaggacagcctccagcaaagccgtcttttctgcctcctctgccccgcttcaatctgccccctcctctccagccctctgcgggtggatcctgagacctagccccccagtctggcctctctgtccccgaagaacctgaatgtgacattggaggctctttccagttcacaccccacccctcaagctgtggccatgcaaatctctctactgtctccccaagcctttctgcgttcagggcggtgctcccctgatcctacactcccccagactctcgttaccctctcttcctgcaagaagccattggagtgggcgcggtggctcacgcctgtaatcccagcactttgggagaccaaggcaggcggatcacaaggtcaggagttggagccagcctggccaatatgttgaaaccccgtctctactaaaaagacaaaaattagccaggcgtggtattgggcgcctgtagtcccagctacttgggaggctgaggcaggagaattgcttgaacccaggaggtggaggttgcagtgagccgaggtcttgccactgcactccagcctggtgacagagagagattccgtctcaaaaaaaagccctcggggtggctcccagctctcaccccacactgcttagcctcaaagcctcctaggaggaggcaggaatggctttggtgaccttgatgtcacaagaggtcttgttctggggaagggcactaccagggaggggctggaaggtcaggctgaggaggaaggagccctctcctgagagtaacgt

SEQ ID NO: 1883737 - DNA, 4001 bp, Homo sapiens
atccctcgggattgtggacagggtgctggcctgcagaaaaggacatactggggctttattgcttctgggctgggaagcgtttcagggctccgaagcccacacccatctgaggaagcgctgctgcactggcctgggccttgggcaggtggcatcaaatccgatgctgggctctcacacgctctgctggggcattatggaccatctttgcagtttggcatgttccaaattaacaagggctctgctctgtggcctcttcctagctgttgattctgagtgagtgatcattttagtagaatttagatgttccagcctggcattctgagggcagctgtccttaagtagagcagagacagagatgaagctacagctgcagtctgtgatcagagccaaagcacgtggacctcctgcagcccctaacccttctgcgtcacgagcaccctaaattgcagaaggaagctgaaggggcagaggggatatggtgattttaaactgtaaggaacttcagggcaagttttgcactgattgggtctttgcaatgtaatttttcttaaaaagcttgttgtaaaagcataattagaatgttttgcacatttctttctattcaatggagaaattgcactgggtagatgtcactcagaatccagttctggccctttcagggagtgagactttaaaacaagtacacaaggtcccactactcttggtgaaactaaatggggctgctcaactccattcccaatccccatggaaagtgtgtggtgagctttctcaagtagcagcagccgacagtattaacagcatctctacattgtaaatacatccatggagggagaagggaggagctctgtataaacaggaaagtatagaaggggcaatcagggctgagctgcacctgggtcagtaaggtggctgctccctgagtgcagagacacagcctgtcctgccaggagcatgaaacctattcaatcaacatttttgtatgaatgtgcatcagtgatcctcaagatattaataggagtttcaggggacaaaggcattctagcggcccaatgaggaaaccccacagtaaacaggcttaaattcttgtagcatctgtaatgttctgtgggcatccaaaatcccaaatgtgtgttcagggacacttcctcagtgtccctaaacacacattctttggagaggggtcaaaagacttattagtcgctcccaacagaagtgtccaaggaacacaaattcagaaaatagcaattcagctgcacttccttatttgcaggtgaaagccgccatttggtttaatgggaagaggtggttttggagtcagaagactgagactgggatctgcctcctaaggatgatgggtattggaaactcacgcctatgtatccatttgtacatttgaataggggtgtagttgtggcaatgatctgtagcttttactgagcacaaggtagggtgcctagaactcaggaagtgtttaataaatgatagctcttgaaattaccaatggaaaactgagtcctggtgagaaccaactggcccaaggccagccagtaagggaggtacagggcggagctgggtctgggtttcttgcctccccatcaacattctttttactgtactacactaactgagaatagaagttgtacatagttgtatttctcttataaggataacaaatcaaatagatgttgccagatgtttctgtttcacagaagaatgaagttaatggttgtatatcagggctcaaacctaagatttaaagagagattgctgagcaagagcagccataaaagatgtctatgttggtatttcagcattcctgggccgcataaagcaccatttggtcacatctggtctccatcaggcctgaagtgttacataaatacatgcatggtttatagggtaaggaggccctgttgagactggccagatgtgatctgtttaggctctgcagacagggcccaggaaactgcctgatagccctgcacaatgccctcccaagggacagagctctctgctgccatcagtgcatctagggcagagataccatgctagctgctgtcactcatgtccaacatgcttgggtgttcaacctccctctgtaaaagctcttattatagacaaccagtggagttcagttcagaagttagagaacaaaatgctttaatgaccttgtgggctccatccatccatccatccacccatccacccatccactcatccattcatctacccatccacttcacccacccattcatctatctactcattcatttatgcatttctgcaatcatttacccacatgcccattcatccatctacccatctatctccatctatattcatccatctttctatccatctatccatccacctgcctgtctgttcaatctgtccatccacctatccaaccattcattcttatccatgcacccacccatccaccctcccatccagttattcaatgaatatgagctccttgcatgtgcaaagcactagtctaggcgcagggaatcccgcaacaaacaagtcaggcatggagctgacatttgtatcatgttccagagggggagacaacattgagtaattccacaattattcattggctagggtaataaactctcagaagaattacaaaatgctccaagagtgtgtaataggagatgcctcctaactaggaggccagaaaaggcttccctgacgcagtgggagtgccgtggggcagcccggagctctggctacagccctgcacccaccctggctactgcttggttggttttgttttccccaggcctgccgattttacagttaactctttcctccatatcataagcttccaaaacaaggttatcccttgtttaggtaaaaccattaaaattttcctagtatcaagtcccccaagcaatctaactaaaagattgaatcacaaaatagaaaagtcccttctaccacagctaatgctggaggagaattccagggatccctgcacagcagtctcagggcagcatgccttcctccccaggccacccggggctctgaggaaggctgtcagacttcggccccttcctgtatactgagctcctgaccacagtcttgtgccggttttgcttttttaaaagggacaagcaaacaggaatcttccccatgcctaccctcactcgtgcacacaaagtgggcctggctgtcatttcctcctggggtctgatctctgttttatgctcctgcttgttgattctgacccaggtaagccacacagggaaaagccatctccctgctccttgcttcggggcagcagagccatttcacacacacaaacaccctgcaccccagctgcctggtttcagtggctgcttgcttatggccagacagccgaaggccaggcagggcccggcctctgttctcaggtctcagcagtgattatgcatgcgaggtaattacactggtcttgtttccgtgctctaggcctaagcctggatattcaaggaagggagcctctggttttttgctacgttataatttctttgtagggacagggctctaggcgactcccaaatgggctacctgtgccgtggccactcatttcctattgtgcagagtagcaattacacagccagaggctggccatgggtgggtttgttcttctctgtgacatgtattttgtgaaacagaagagaggtcctctgtttctgaaagcaactcttaaaataaatacaccaggctcctccaaggaatatctgcatgagaagaagtaagctactatgtctagtggctctcaaagtgttttggcgggttggtcagtcggtccacacagggagagaggggcaggacaaaggcctcacctcccactcaacacttaatcctggtcttgggaaagttagcgtttgcccacaggtgacatgttctcagggcctgactacctgcgggtggacaccaaggataagctgtgtcttgaatttttttaaagcttaaaaagaaattacttccagctgtgcatcatgagaaga

SEQ ID NO: 1883738 - DNA, 4001 bp, Homo sapiens
tgcacagtgcctggtaagcagagagagttacttgtttaaaatttcactgtgctgaaagagctagtaccaacacaaaaatcacaaaacacaaaccggttaagtacagaatgtctctctctgggcattcactctcagaacaaaacaacattgatggaaatagccaagaaggaagggtgaaatatttgcaagcagacaggcatgagggcttgaagatatatttaggcttcagctccaccttgcctggaaaatttctcagttacagtaaacgagtaggggacacagcacctggatgaccaggttctgagagtcagcaacggctcagtgctgggacatgtgggcagacccactgcccctgtaaactcctgtcttcaccatgagcatctgcaatccagcaagacctggtgaccctcatgcctgcacaccatgttctgtaacctggatttccaaaggagaccatgatttcatttaaatgtttttcccccacatatttttccctacaaccttttacaaattttccctacaaccttttacaaagatggttctggaatcaaaagccaattgataggcttagtagaattctatcctaagattttactgaaccagacagacttttctttaataatgcctgcctagctggcctgagtcctggggataaattgtgaattaagtgtcaccatgtagataaagatgcacagcatcagataacttcagagtagtgctaccggactgtgccttcatctcatagactgaatgttgtatcctcccaaaattcatatgtggaagcttgaacacccagtgtggctgtatttggatgcagggcctttacagaagtaaataaggttaaatgaggttataagggtgaggccctgatccaataggattagtgtccttgtaagagacaccagaaggcttcccccacctcttcctccatacacaaagaagagatcacatgagcatgcagggaggctgtggccacctacaagccaagggcagaaacctcagaatgagatctaccttgctggcaccttgatcttggatgtccagcctctagaactgtgggagatacattgcggtgtctacgccacccagtccatggtattttgtgctggcagcctgagcttactcacacactgcatgagtaagcatacgtctccactaggtgtctgcagtactagtgataactgtaagaacttagattcaccatgcagtaatgacttgctgagtttagatttgccatccagtgatgacttgctgtgtgcctggccctgttaaacactctaatctgtatttgtttctccttttgctgtgggacattttccttccatgttcttgctgagccctggtctgcagtctgtagggaatcttgcacatcaacatgaagacaatgtgctatgctcagacaggctgatgtggcattgctttgttgaagccataacaaaaaactgggctgcagtctcagttttacatgtttcatttccctttggattcatataaatttgacagattgtatttctgtgtcatcccagcactgggggtcatgtgacaatcctttgggtaaaagttgatcatgtaaacttcctgggttcacagcccaaccacaatatctttggaatgaagctgtcccagcagcaagtttataaaatggtcacttatggcatgggacttgtggggacaggggaagaaaaccccatctagagaccttgctcccagtgatttctcttctctctttaaccacttcactcatttgagtctagaaggttctggaagattctgccttgagtaagtgatacctggactcactctctgcttccattcagtggaaagctgagtggtcgctgggaacaagctactgccacatgggccatgggataggtgccttgacaggaccagggcttcgaagagcggggtcagaggtgagggaagaaaggagggcaaccctctaccacctattttggtgggattcagattgggactgaccctcccttcaccttcttggtggcagcccaccatggggccaagggctgtgttcctctctgctcaaatccctccctcgtttcctctttctttgtcctcctatttcagttcacaccagcaaatacactgctcagactgttcatgtggctatgggactgagggctgagggtagagctagagattctgttttgaccccaggtgtgtttgacccatcaggttggccaagccaactttgccaattggcgaggtgaaagccagcacaccgtccccctcctggcagcccaaagtcaaggcatcctttgcagttcaagcaagaaagcagagaatccttcagtcctcagtgtgggaccagtactccccactccacagctgcgaagggacgcagtctgcattgttcaggtagctagacctacagcatcactttttcagggtatcatgcatagcagtcacatctctctacaggaaatgtaaacccacggcccattaggagggtgttctcctgtgtagacacaacactgccaagaattttgccaggcgtggcctgatctacaaagtagcgtcaatctgcaggaaggagctcttaatatttgagcaacaagcagctaatttcccctttcttttctaaacacagtttgagtgagggtgtgatgatttggaagaaacccaggtaagcatgaccttatttaagaagacaagtttgatagtcaaagtcccaaccctgagtgcttcaaaaatgagagaaagatctgtgttccagtccagatctgcgactaacttatatgttaagtttgcttggcaattgaactggtaccttttctcccctcgatttacactagataggccttaaatgtggagtctagaaaatgagaaacaaaagagtgatgccaaaagtcattattaatgacaatagaaattttctgtaggaaatagtcatctccccttcattctcataccatccatcatttttccttgaaaagctattcccccctcccttcctcccaaccactctgcttccttctatcctcctttcttgtctttctttttcacttccaccttttattcagccagtatttctcacgtgtcagtgttgttctttttcacttccaccttttattcagccagtatttctcacgtgtcagtgttgtgctaggcttcagaggaacaaccagaaaggcatgcgtgttctgtccttcagagctctctgtcctcccagagctctctgtcctcccagaggggtcttgatggtgctggtaaactgtgctaaagctgcatggaagctgggctgggagctgagggacacaggcaggggccacctagctcagggtctgtgtgagtatggggcggaggctctcatgggcttcctgaggaggggctgccagatccaattctcaaaggctgacaaggacacagatgggcaaacagcatcaggtgctccaagtctaaggaccagcaagcccagcgacctggcccagagcacggcaggtgtgaaacacggtggctctccgtgaggagctcagggtgcagcgtggtgtgggggaagtggggctgcagatgcaagcagaagccgtgtcaggagggactttgctcttccactaggaagtctggccttggctgtgaaggcactgggcgttgcagaaggactgagaggagagggccatgcccagcaccgtgttcatgcacacatttagagaaactgggctttttcaggaaatttggatggaggcttttgtggcaaccctgacctgatggaagataaagatgtcaatatacacatggtcctgatgggagatattttggagatagaattggtgggcctatttaccaagtagcccaaagggtgggagggggactctgccattgtttgggatctttggtgatttctttttaaggagctgatggctcaggcagaatggttctaagggccttgaacacaggcctctcccacacgtcttccttaatagactcccgactccagacaggagtccaacattaatacttcatatctgggtgaccaaaccctgctggct

SEQ ID NO: 1883739 - DNA, 4001 bp, Homo sapiens
tattcaacaaatatgtattgagcccctctcatatcctggactacttgggaaagatgatggtgcagagagagcttccagtgctttgggaacagccactaggtagttggagaacattctgctatgaagaagggcagggatttgccctgattatagtttcagggtctaacagtcagggtgggctgggttctattgcagcaacaaacaagcccaacatctcatgtctgcacacagaaaaatgcatttttcagtcagttacatgatgtgccttcatgggccagcccatcagtcacccagggaaaggggacggggcttctaccctgaacctgcacgtgtttcttctgctcacatttcatttgccaagcaagtcacacagccacacctaacttcaaagggactagggacatgcccagaatgaaagggagaagcaggtgtttaagaatagctgcaaagacagccacagggacagaaggaagcttgcagtctatacagctgtccccccagtgtttggctgggaatgcgccatagggactagcactaatgcttcagtctggcaccgaacagattccagaccagcaagggcccccaagtggtcgaagtgggcagttaggtgagctaaatgagcgttagtgggaaggagaatagcctgggactgggaccctggggagggacaccagcatgtccacagcaggcagctaaagtgacaaggggcctggagaccccatcccctggggagctggggctgctagactcaactaacagcctaagtagaaagtagtgaaatctactcactgtcccccacctctgagggccagtcctggggcaggaagagctgatggagtcctagggctaggagagcagagctgcgtccccaggaggggtgggggcatggcagagatcagcagtaaggacacaaaaatggggagggctgcttgacgggtgaggagctccccgtcatgcagggcatgcaagtagagcagcagatgcccaacatctagggaagctgtaaaggaacttcctgggatccaagggcccttcctttctcccagagtctacatttctagtgagaatggtgggggacagccaggtcagagagggagcgtgtgtttggagaaagcaggtagtgggaagggcagtaaaactagggccattcgggggaaatgaggaatcatcttagccatctccaccagttctctacctctccccaccagcttgggggccacccctccaactcagtgactgtgggtcacctctgtctgtggccaggccctccgagcttcccatcatgaacaatgcccctgagagaccctaaggcgtgttgcaggaatgagcagaagacaggctgctcacatcatcccttctaacaccatggggcatggcctcagcatgtttcagtcttgccctgagtgccttagggatgtcagcggctctacataaagtcaggccatggtgctatccaagggctgtgatgtgcggccagcagcaggcagtcagtagagcttggtgagttcattatttctctctccagccctcagttcagaacacaggggtacaaccctgaatgccagaaggaggaatcagccagttatccgtggtcagacctggaggttgcagagagataactttggtttgtacaggggtccctggagaaatcagaaaaaacagccgttctgaattcagacccctgagtggcctggctggccatagtattgccactttctactgccccaagggaagccctgtgcttggtggggctggtgttctatctgaaaccaggagagacacaaaaaggctacagccataggggagggagcaggtttctgtggaactaaggaaactccagagagtctattgtacagtgtgtctgggtcacctccatctgtagaccctggaagcacttggcttcattacctcactctcagctctgaatcccacagttcagggctgcagccacagcagaacagctctgcctccacccagctgttcctgctgaagcccccggcgtcaccctcagggcgtcctgagctgtggcacctccacagtggagacccatccatcacagagcccatcaacggcccagcgccacccggaaggggccaacaccgatgtcaactagggccactctgaaagccgccagggcgcggccccaagggcaagatggatgggcggaaccagccactttaaggctgtgtttatgggacacccaaacagctggtcaatcccccgggaccatcactcacccagctaccaggggtccctgacaggcttggagattgcgttgccgtcttaactccagcagcacttagagtcttagcctatcaggctgaggggtcctgtcccagccaccggcacttgacagatgaggcacctgagccccagcaaggagggcacgtggctgccaggatcacccaggctgtgagcagaagatgggcttgaacctggtcccccctccagccagggctcagagggccctctagtctcctgtgcacacacgcaggccttggcttgtctctggcacttttagtaatggaaggcttgtccgcctggatgtacgagctctctctagagacatacctgatttttggtttagtcatgttctcatgttctactcaggggagaccagagaggagctgcacttttacttcctctaggaaatgacctcccctccctccctccatcccttccttccttccttccttccttccttccttccttccttccttccttccctctttccctttcttccctctttcccttctttcccttttccttccttcttccttccctctttccttctttccttccctctttcccttcattccttccttttctcttccttccctcttttcatttccttcctccctccctctttcccttccttctttccttttttcttccttccctcttcccttccttccttccttccttctttcccttccttccttccctccctcccttccttccctatttccttccctccctcccttccttcctttcatccctttttcccttccttccctccttccttccttccttctttccatccctttccttccctccttcctttcttccttctttcccttccttccttttttccccttcactttccttccttccttccctccctctttctcttccttccctccctcccttccctcttttcctccctcccttccttcctcccttccttccttgcttccttccttccctctttccctccctccctcccttccttccttccctctttccctccttcccttcactccttccccctccctccctccttccttttgacagatgagtctgttgatgtaggaaaaagagaacatagaatatctagcccagagtcactacctacacctcaaacagcccaaagaagtcagtagattggggtttctgaggaagaaagaatctggtgagtaaggaggtcaccccacttcatagcaaagctcatttttcctggggaggagggcaggagggttaagggaagaacacaggctcacctcattctgtccctttgattttaccttctcctcagaagtgtccatgtccccacctatgaagtggggtcactaacatgtatagggctgggtgagcggggaatgaaatgatgggtgtgccattgatttccttatgatgagacaccttccaaaaccaacaagtattgttactaataaaaacaacatgagccagacaccacaactgtttctcataaagtgccattttaaggtagtcagctttagaaagaaatttgttacaaagaacaatatacaaacccaccatatgcaaaagttatctcaaagtggatcaaagacctaaatgtaggagataaaactacaaagctcttagaagaaaactagaagtaaatctttgtatacttgcattcttagatatgacaccagaaacataagcaacaaaagaaaaaacagatatattggacttcatcaaaattaaaaacttttgtgcctcaaagaacaccatcaggaaggtaaaaagagaactca

SEQ ID NO: 1883740 - DNA, 4001 bp, Homo sapiens
cagcccagggcgaggaggttcaagcctcatcatttgctgggctactttgcagccacagctggcctggcccttgtttctacaaaggaaagtgagtttagtccgtaggccaaagttggttccttggttttgacacaagcaccagggaaatgtgagatgtgaacagcgagtacctcggtgactcacgcctggcatcccagcactttgggagacaggtgggaggattgcctgagccccggagtttgaggccgcagtgagccatgattgcgccactgcactccagcctgggccacacagcaagaccttatctcaacaaacaaaaacaaccaaaaacactgggggaaactgagcaaggggtccccgcagaggtggaggggctcctgggactgggtctagccctcaggaccctgtaccctctgccacccagagcaggcaggtgcagtagaacgctgggcccttgccagcagccaatctccgagcaggtccacagctttctcaggggttaggagggagacccgttgctacacaggagacacctggaaggaggtgagagaccagcagccactccaccccacgtggtgagtgcttacctgaagctgcaaaaatgggatattgaagaacttatgaaggtactttaggccgaagctgttcttcatggaagactcagcatagcggaagtaggaggaacctggaggtctgctttcagaaaggaaaaaagatgcaagagaaagacccttgccctggtgccaaggatcacccctgggcccacagctgtgggtccgcactgccctccctcctcctgcaggctcctgaggccacaggaccctgctgagccctgctaagcagctaagccgagtgcccttctgcaggtgaccccacagtgccagcacttcaccctggcacacagttccccagcacacagttcccggccctgccatcggggagacccaggcttcagtgagccccactcagcggcgagacccacatccgccgggccccatgctaacgttaacccctccctgggcctctgcctcagcaccctcccccgcacaccggagcaccgggcagggtccctcgggagcagggccaccgcacccacctgtccaggttgtcgatgaagtcacgcacgtcgtccggcaggatgactcggtgctcgcccatgtcccggtagtttcccagcacgcacactggcacgtgggtgggcacttttggaagctcccggagaatgtaattgaaggtcctcggagaacaggtgaggacctggcttagtttcagccctgcgacgccctgtccctccctggaaaggtgctgtgcgcccaggcccgaggatggtggctgcttctcatttccaacatccaacccagcagaagcatgcctcgtgcatgcagagctagagggaagtgcctcgagggccttcgcacccctcagcctgcagcccccgcccgtccctctccctgacggcaggtacttgaccgcaccccacactggaacgcccctgcctgtccctgccttccctcagagcaccccatgtccgcatccctacaaaaccacctctggcttcatctgtgtccaccctcattccgcactgtcctctgtgccccttggtgtcgaccctgtggctggtcctccaggctccctgcccaccggggcagccgaggacaccctggggtgcctctgcggctgccggtgaagcgggctgtttggagagccttgtcttaagcagacatctcctggcacggacggcaagtctccagagtctgcctggcgtggaactgccagtttcccagctgcgtggttttccaaatggcttgtgaagaaataaccagcgcttcaagtgacaaaacttccccacgactgaaagccaacataagggagtaaaaaatgcaacatcctgtttctaacttcattttctttcatttacacgcagtcatttaaacgggcccctcaccaaggccggcccaggggcacctctggcctcctaagcaggtggccttctggtgtctcctgcctctcgtggctgtgaagggcctgcgtggtgcttgaagccgctgtctgagccagtgttttccatccttcctgctgggcaccaggggctccagacagagcattgctaccataggcatcgcctgcccaggctggtgctgccaacagggtctccgggcccacaggtaagcgcctttgccgcgtcttctcaggctggctcaagtctcgctgtcactcccgcccactcctcgcacggcagcccaggcggctgcagctccctccaggccgttcctgtggcagcagtgggaggtgccgtggaggccacactgtgtccacactcaacttcgcttgggaaaagccacttcccacccaccaggctggcctgctgcctagacaggagaggccggagggagaggagcaccactgctcgcccaggtgaggccagcgtgtgcgcccgagctgaactcgtgccctggggtggggccgccagccccgtgtgtggttctcctgccatccgtgtgccacacccccaccgagggctctcctgagggtgcctgcggtcagtccttggtggtggtgctgaaggctgggagggcaggcatggttcccagcattggcaaaggttggcagaggcccagagcatggctggtcaggtgcttcaagccgccctcaggcctgggctgctgatgcgtgctgagtgtgcggccccgtgacaggcggtacgcttaaccctggtgtgggggtcttcccaagtaagagaagctgctgactaggcccccaggccagacccactgctgggaagagcagatgcctggacgtgtcgggcatgctgctcctggtgctccgggcactggctgtggctaggaggggccctgcaccaggacactggtcttcacgcggccctcgttcttctaggagccttgtgccaagtgtgcgtccgcagcacccccccgctggggctccggtgcgtcctgggggacactgcactcctgaggagctgagtggatcccatgcgactccacagtggactctgggggcttgcgcctggtcccccagagatcgtcctgtgtgccactgcccttagctgatttcgctgtcatcttcttgctagaatgaatcttggctgtgggtcctcctaggtcatgaagacggaggtcgcggggagcccccagcacaagcagccacttgcttccgccaagtctcagatgggttttcaggaagaacagtggggctatggaaggtgcgtgccttgccccagatgccttttgcagccggcccacgccatcccgccccataggcacaggcatagtcgttgcccagcccgacatccaggccagtgccccttgtggctgagctgccacagctgcccagcaagagtccctcggtcctgcagaacgatgctgctctaaccattatctgctgcacaaagagggcgcccaaggggctaggggggtgagagtcacaggcagctgcccccgccagctccctcttaccactgcttggtaatgtcgaacatcatgaccaccccgttgcagttcttgtacacgtccaggaactcagcatccagggccatttcagactccgcctggggacaggagggaacaggtgtgagactggcccaggctgggccccacccgtgtggcccacagttttagaaaaggctggatagtcttctaatctgaaaagataacagccatttccatttggaaacgatatgctgaagagatgggatagctaaacataggtttgccccaaagggtctgacggtcaacaccagcctcgctgatggctccctgaacaagcctcctacccaggacctcccactgatcacagcagtgtccgccccaggcctcacggataaccaaaccaccactcgaaaatagaagtgggtgctggactaccagctgccctcagctagatgtgcgttccggaaggttccagtgcccacaaacagggttagctgcagtgctgtgggcagagtcactccaccccatgctctaaagggagtgggaggcaccgca

SEQ ID NO: 1883741 - DNA, 4001 bp, Homo sapiens
atctgatcatacgtggttatctcaattttcatttactgtttttttcctcctctgctgtgaataccaaacttcttcatatcagaagacaagatcaactctatacacttctcttcaggagcaaaattatatgaaaaacaaaaacaggaattacagaagaggtgaaagatatttggttttttccctattatcaattaaagtttaagcaggttaataaaaaatacaattataaacctttagttgacactgatacactccctttgcagctgttagtgtcagtcaccagtcacttacctactaaacagtaagtacagtggaatatcatgtaccccaaagagatgaactcctaaaccaggaaccactgtactctaatgggaatagcctcagttcttgaatgtaaaatattcttaacaaaaacattcccctatcatgctttctgtatttgctaaatgctcacccactataacacagtccttctgcctgtctaccttatccaagcccctaccaaattcttctgtaggggaaatttgttgacaaactttcatgtgacagtattacatctctttatgagaaacatttcaataatcacaaaatgtatttaaaaattattctttcagttatattaacagtaactcaaagataaatcatttcttaggatattttaacagcaacagcagaaaacaaaaatgaaaaaacaaaaatctaccaagtgcctacccagtgcagtacttggtatgttcttgtcctttatctcatttaattaaaaagctgaaagatctgagacactttggcttatctttcagcttaaaacttaagactttttatcttgtatttttacattgatcatgtagcagaaccatatcaacatcaagaccatacaccttgtgacgacaaaattcagagcaaagtgacaaaagacaaaactcaaaacaaagtggcttagagtaccaaatattgcagcatataaacccacaaccttgaaaaaggacaccagagttctgcaagagaaaaaatcttgagtttgaaagagaaaaaatctctttcaaagctacaggttatataggtacccagaagtcaagtcatacatagcaatagctaacttacattttttttattagtgtgttaacgtttcacccacattgatttattaaattttcaacaataatcctacaaagaagatactattatgatctccattttataaaagaggaaactaagaaacagagaaagttaaattatttgcccaagatccctagtggcactgaaatttaagacacagcctgtctgacaccagacagcagaattctaattacctatctacctacctttcacttatcaacaaataagtgatcgatccctcaaacaccagccagacatacaaaccatggatgtccaacttctttctctcttctcacatacaaaggatatgaaaatcctaccaaaaaggaccatatcaattaataatctaagcttcctaacccatcttaatactactgacatttttatataaaacctgagtagaatttgattctagaaaaggttctttaaaatgttcatctttttaaactataagacctatactgaggcgagatgttttctttatagacatactagacaaataatcattttccccagccttccttatacttcaaattcttctgatttatttgtgtcttttttctgtttccaaagtccatgatctctgcccattatgtctaaaatcacccatcaccccatgtcccacaaatgaatacgaatctggctcatattcaactaataaagctggaaaggaccttagagagatcaggtcatctaatcacacttactcagaggcagacacacaactaggacaatgtgcacagtcacccctgaagttgggcctgccccaagccaccaagtcaattactagccaaggtaacaggggatacttgtaacggagagcactagcagtccatagcagtccatagcttagtgttctccattacaagtgtcccctgttccttttgtcttgctggcaggagggatgccaggtaggacaggtaggagacagtccaaacaaagcctgtcttttctactggataaatggaatttcaattctctctcaccttcctttgctcatagaaaggcctttgggttcatggtttacatgacatcacttttgttaattctcttctgttacgctacctacttttcaagtattgaaccaatagcaacaacaataaagccattactagtaccagaagactaataaggaaagtacggctgttgggttttatacacaaatagtacctgaaagtctttacaggctttctcagcaatgctatgcagagtacattacaaaaactactattgtaatcattggatttgtggctctaatatgtcatataccattttgaaaatttactacctactgtaaagttttccaattctaactcttcattccagaagacttttcaaggtatactttgaataaatacatcaaattgaacaagaattttattaaaaggaagacatactttataaatcatatataaatgggagggagcaagaggcagacaaaaggagaataaacaaaattacctaaagaggaagaccatctgtgtttcatgtagaaagagctttcaatgatgctttatgaacgccatttggtcttctcataaatcggcaaacattctaaaaaggtgcctttcaaaattttgaccactataagaaacacacacaccttctctgaaataaaattttcataagccattacttacccatactaattatagttttctgatttttttaatgctagtgatacgttaaatttatttcacagctcactagtgaatcacaacccatgatttgaaaacctctatactagaagaattgcaatgtgttagaatataaaatggcaaagttgcaaaatttgacaattttgattgaataatcacaacccaacagcatttcagggtgattggaaacaaaagtcaaacacacacaaaaaaggtccaagtaacatctgcattaagaataagcttcaagttaagaggaaaggtaagaagcaaagaaggaaaaataaatacttgagttattggaacaaacacattcaactctcatctccatttcataaattatgactataaagcctttaccaaatactggaacaaattttcccaatgtccagtattttatatgctactgtcctaatctgatcttctaccaaaatttcgagattagctatagagagtagggagatctgtggaccactggggatcagtgtcagcaccatgtcctgaccctgactggctttctacccagaacagtacaaacccggcacagcaaatctgctactatgccctcctagcctttgccagcatttaaactagagacatctgtgggcagcccaagggacagaaagaaaagtgttctaagattgccagttatttttagccagatagcttccttgaccattgcctagaaatacggtcaagccaatgtaaggagattattgggactgatcattactaataagtaactgaaaaaaggccaaaattagaaaaaatagtgaagtaaggagataacttcaaagtaatgtttattcttcaaaaacgttatcaaatacttttgaattagtaacaaccctgtcactagaagtgtaaggtttactacagaggttaaaatagataatctgaaaatcccttccactgctgaaaatctgtaattataagtttaaaccccaatatcaaaaaacaccttttaggggaattagatggtcagatgctctcttaggcatccacaaaggataatcctacccattagcaaaaacttgtagtgaatgaagatcacataccccaccccttccaaatcagtggctaaacaatgaagaaaaatattaaatattctctttcaaaatgctactgcctggttttacaggtatacacaaatgttaaaatttatcaaattatacattttacatatgtgtagtatattgttacatcattttgcctcaataaaactgg

SEQ ID NO: 1883742 - DNA, 4001 bp, Homo sapiens
cgtatttcaacaaagaaaggagcatcaccttttctgatctagcttcagaaatcacatagcatcatttctgcactactctattggctgaaacaggcacaaaagccaacctagcttcaaaaagaaaagacaaagaccctacctctcaaagacagaagtagcaaaatcaactgtgagaagagcatgtgggtgaaagataactttacggaaatctttggaaaattcaatttgccccagaatatatcctagttctccctggggcatcaagaactattgaccactcagttcaaattaaattctaaggcaaagctatacactgacatgcccaggctcaatattttccccattcttatttctcccaatactgttttccatcttgtctactacagttgagtataccctattgactttggtcctccaggtgttctgtgttacaaaaaccgaattcagaagttacttaccacaggtcatatagagaaactaatagcaatctcttgatgcacagctgcatcattttcaactccctccagttcaatgtcttctttaagttcaatgcccagaaacctgggttacactctagccctcccaataattattaagaattgcctataattcagagtttcaaatcattctttcattagtttaaagtgaatttcccattataaaacacacagatacacacacacatgcacacacatgtgcaccactttccttagctaaatatgattgatttttggataatttaccaattatggttcatggtatccattcactagttaaaatgcctaggaattactatatttccctttctacttccataaatcatgatgtcacaaatctttattcaaatataccatttctaggacacctcatttactttaagattctctcattctccataaaatgtaatggaaaataaattccacacaataaatattgatggaacactgaatacataccaggccttctgctatgtgtgaggtgacgaaggcaaataagacagtttccttcccctcacatagttaaggcatctaactatgaagacaaatttaccaacaaccatgattattacttacaatatccaaaggagccctcattaagacctaggagactcagttaaaaccacacccggccgggcacggtggctcacgcctgtaatcccagcattttgggaggtcgaggcgggtggatcatgaggtcaggagatcgagaccatcctggctaacaaggtgaaaccccgtctctactaaaaatacaaaaaattagccgggcgcggtggcgggcgcctgcagtcccagctacttgggaggctgaggcaggagaatggcgtgaacccgggaagcggagcttgccgtgagccgagattgcgccactgcagtccgcagtccggcctgggcgacagagcgagactccgtctcaaaaaaaaaaaaaaaaaaaaaaaaaaaaaccgcacccaagaggtcaggcgaggtggctcagacctgtaatcccagcattttgagaagccaaagcaggcagatcacctgagaccaggagttcgagactagcctggccaatatggtgaaacctcgtctctactaaaaatacaaaaattagctgggggtggtgacacacacctgtaatcccagctactggggaggctaaggcaggagattcacttgaacatgggaggcggaggttgcagtaagccaatatggtgccattgcactccagcctgggcaacaagagcgaaactccatctcaaaaaaaaaaaagggggggggggggactaccttttaaggaaaagtaggtaaatatctgacaataataaaacgaagagtactgattgttgacaaagttaaaatgtaagcaaaaattccagagtatacagaatgcctggcttgacagggcaccacaaatgaacctgacttgaagtgtggttccaggtgcctaccttgttagcctcatgaccagccacaaagagccatatttgtgtctgatcatgagactaacaaggtaggcaaatgccagcctgtgatgttccttacatagcactgtaaggagctgaattctacaggtaatagctagccaccaagtatttttaagaggtgaaaaaacttgcagacaacgtgatcttatacagttgcttgtctatatccatgggttccacatctgtggattcaaccaaccacagattgaaatattaggagaaaaaattacatctgtactgaacttttttattgtcattattccctaagcaatacagtataccaactatttatataacatttacaatgtattagttattataagtaatctagagataatgtgtagtatacaggagaatgtgcataggttatatgcaaatactatgctattttatatcagagatttcagaatccatgggtttgggtatccacaggaggtcctggaaccaatcccctgcagatactgaggaatgactgtagacaaacaaccctaacatctccatcaaaaaactgttagaactaataaataaattcagtgaagctgcaggaaacaaaatcaacatcatttttcaaacatcagtagcatctgtatatgctaacaatgagctatctgaaagataaattaagaaaacaatccattcactacagcaaccaaaaagaacagaatgcttaggaaaaaatttaaaccaagaagttgaaagacctgtacaccagaaactataaaagattgatgaaaaaaactgaagacaacacaaataagtggaaagacatactgtgttcacaagtggagaaattaatagtgttaaaatgtccacactacccaaagtgatctacagattccccaatcaaaatttcaatgacattttttacagaaatagaaaaaacaatcctaaaatttgtatggaaccacgaaagaccccaaatatctgaagtaatctcaagcaaaaagaacaaagctagaggcatcacactatctaacttcaaagtatactaccaagctacagtaatcaatacagcatgctgctggtataaaaagagacacacagatcaatggaatggaatagagggcccagaaataaatctacacatatacagtcaattgattttcaacaaaggtgccaagaatgcacaatggggaaagcacagcctcttcaataaatggtgttaggaaaactggacaccacacacataagaatgaaattcgacccttacttcatactaaatataaaaatcaactcaaaatggactaaagattcaaatgtaaaccttgaaaccataaaaatactagaagaaaacatagcagaaattctccatgacattattctgggtgatgattctttggatatgaccccaaaagcacaggcaaccaaaaacaaaaacaaaaaaatagataactgggattacatcaaactaaagagctctgcacagcaaagaaaacaatcaacacactgaaagacaacctgcagcctggaaaaaaatatatgcaaaccatgcatctgataaaagactaatatccaaaatatatgaggaactcaaacaactcaatagcaagaaaataaataacctgattttaaaatgggtgaaggacttgaaaagacatttctcaaaagacgacatacaaataggcaacaggtgtatgaaaaaatgcccaacattactaatcatcagagacatgcaaattaataccacaatgagatatcacttcacacgtgctagaatggctattatcgaaaagatgaagatagatttttgcaaggatatagagagcagagaaaaaggatccactgtatactgttggtgggaatgaaaactagtatagccattatggaaaattttaaggttcctcaaaaattaaattattgacctagcaattccaaaactgtgtatacatccaaaggaaacaaaaccagtatttcaaaaagatatctgtacttccattttcactgcagtactagttacaatagtcaagatatggaatcaacctaagtgtccatgaagagaagaatggacaaagaaaatgtgaaatatatatcccca

SEQ ID NO: 1883743 - DNA, 4001 bp, Homo sapiens
tgagctacaagctgattctaggatacagatgaattttctagtgggaaaagaaaacccacccaacaccctgactccaaagttgtaaatctgttctaataatgaaaaaggaattagtcaatctattgggattgatgtcgtgtttaacgacacttggtgaggaggactctgccgcacagagtgaagggatgggcctcgatcaataattgggagtgagacattttcttcacctacataattaaaacaccacacgtggaaacacacatgtgaaagtaattgaaaacacatggaatttggggcatggagaacaatttgacccttcccaactgctggcaggcccggcacacgtgcgtgcatgacattgtgaagagagaggcttggtcattgatgacatctgaattagaataacacctaattggctgatttttctattgtagacacacacacacacacacacacacacacacacacacaaacaccaccaccatcacatcacaaacatgtatccaatacatagcactatacttaacatgttcatgtccacacactgtagcccagtgccccctacacaaacatgtaaccccacagcctgcacacacactttcacgtgttttctcaataagagaggcacacgcacgggcccatatgatgctcacacatactttcaagcaagacttagtgggaaaaagggaaaaatgtgttctctgcctctccccaacttcccagaaagaaaaaaaaaatcataactgtcagaaatgtgataggactgtcaaagacatatggaagaaacccaaacaaaccatggaagttgtgaaacataaatcccaattctatttgttctacgacagtgtataaaccacacatttttcatcaagatagaaaattaaaaccctcgccaggctcagcattgctggggaagttggatagaaaccctagtgtcctggcagaaggagaagcagctgctggctggcctgggactgaaagatgcttctgaaccgtggactggaccacagagtttagctgcctccctgtctctacattttagtactgctgtgattgtgtccacacacccacaactgtgattagccaaacatcccatgggcatattccctattttgaaagtcccttgataaagcataggttcagcttctggcgagctcccgagcagccttaatgtccacgtggctcctgaactgtgtcttctactctcccaagcccatagcttggagttctttttccccactgaagctcacctgattcacttcagacctccaagtagcctggcagcccctccagagccttacttaattctgatgggcttaactcctttctcacaagaaattctccctaataactaccaaatattaattaaaaccagttaattccagtccctagagaattagataatgctactgttttctattcagagaagagtctattttcccctacttttggcttttctttccctaagccagtgtgttaatcatgaggaaatgtcccaagacttcttgaaaaattctgtgtttttagtggatttcctggggaatgtctccaaagccatttgaagactaaacaataacatcttttggtttattctcattcagacatcattcttcctcaaagcctcgcggatcagggaggcagacttctctttgcagaagccacactccttcctccatagtttggaccttatgaacccgcaagttaccatttttaatagttcccctttggaaaacttctgttgacaggcagtctgctgtattttactttctgcctagtctttgggtagatgctagtgttcactgagacctagctctttggctcagcagaataatgtgcctgggggcttcagacggccctttgagggatgagggtcaccacagggaaggccagctccaaggggcccttggtgtctttgaactctcgcctttgactttcaggcttcataatgaatgcttggtcccttgactatgagtcatttagaaccacacactcattgagattttgagatggaaggactggaagtcatgtggttcaaactcatatctccggccccgttgctcagatggaaagactgagtcctgggtgagggccttctgatataggtatgagagtaaacaagcaaggtgataatagttctctctagggctcgaggccggtggtcttagctggtcccttgtgagtttttgaagcagatctgggtcctctgttatctccacacaagtccctccttctgccatctccctttaattcaacaaatatttattcgataacaattggttgaataaatgaagaaatgtgtctctactctgaccaactgggcaatggagatagaacagaaactgctactcacaatccaatatccagtctctccttttcccggaataacagaatttgtagctggacaaacagggccgctcagagtagagatccccttccccagccttccttgctgacagatgtggccttagtatgtgcttctggtccatgacatacatgcagaagtgccaggtgccagcctcctggaaccttactcagagacagcaggttctctttcctttgtctcctctgtcttgctgtctggaattctgatgctgccatcttgggccttggggctgagggacacagcctcaggagggccacagatgactgagtctggtccgtgtgggcctcctcggccaagttgctgtatcagccatggatcgctggcctccagactctgaatgtgagagaagacaatctgtcctgttttagccactgctgttctggatttttcagtcgttcatagctgatctaattctgactactacaggcagtaaaataaatatttaacatggatttgaaaaaaaatactattctttctagctttgccaagaaaaagttggacttcctcaaaatgaaattttacaaagaaacgagactctgagaatattttaaatgaagagatatgtgtatatacacacatacccgcaatatctctatgtatatgcatatataacatatgcataaattatctctggaagaatacacagcgactagagtcatggagaagagacctgggagcctcggggttggagtggaagtgagacccactgcctactttttttgttctgtttgaattttgttttttttgagacagagtctctcactgtcgcccaggctggagtgcagtggtgtgatctcggctcactgcaacctccacctcctgggttcaagcgattctcctgcctcagcctcctgagtagctgggattacaggtgcccaccaccacacctggctaatttttttgatttttagtggagatggggttccactacattggccaggctggtcttgacgtcctgaccttgtgatctgcccgcactgacctcccaaagtgctgggattacagacgtgaaccaccgcacccggcccctgtttgaattttttaactgggtgtgtgtgtatgatctttttttaaaaacaccaaagtttaataccaaaatgaaaacccactgtacacatagaggcccccagtccagtctctatcagatgagactttttggtgttgccaagtaaacatccagttccggcttgggcttcttagcgacagggtgctcacctcctccccagacagcttgatctgaacccatttcctcatctggggaacatacagacgctccttgcaggacggtggcaaaagcacatcctacctgctcaggaaaggtgctggttaccagtgacacaccactgttcccgtgcggtgcactagagcctgtcattcccaccagacccacagtgtctacctcctgagatactgctcatagactcacagatctgctgtacggctatggatttgctcccccgccccaccacatggggcactccctgagggcagggaccatgcctgttcctctttgtccctggggtccctgtgcctatccgagaccctggcatggaacagatatccaggagtgtttactgtctgaaagaaggagaagacagccagcaattcattctaaaat

SEQ ID NO: 1883744 - DNA, 4001 bp, Homo sapiens
ctgctgacggtagatgcagagggggaatatttcacccggaggggaagggcagtgggaatggtgatgtaacagcctacctctgcctgcagacaatggatgtgctaattgcagatgagctgtatccagtcattaaagcggatctggcaggctcctaatgacaggtttattagccattagtttgggtggtgttattgacttaggaatagtaaccctcaatttcttttcccaaaattacctaatccccacttttaactaattctgactgacctccttctaattgccctggctaaagatctaatctggatttgtagagccaggaagacaatctcagaatccactaaccagggagctgtttactttgctaaccctcctcactccttcctctgaattgaccgcacccacctccctggaatctctggaactatcacactccaatactgtgtttcaattttggaagcgtgtttgaatttcacctgcctggcattttagagcagacactgggactcagtctatatttccatgcacatgtatgacaccagcccccggaaccagcaactgttgagccaacttaatgaaatgacaaagtcagggttctaattaggaaagcagcaaagcagctctaccacactgatggctctgggcctccctgccacgacggggactgctccagagacaggaggaaggcagtatttatggcgcaaggattcccagggcaaagtgggctagctcgtgactttattcattcgttcactcattcatgcattatctgacactaagttctaaacactgtcctgagtgctctaaaggatgcaaagatgataacagtaacaataacaaccaaaacaacagcaactatcctttacacagctcttagcgccaagcattgttctaagcactttgtatgtattatctcatttaagtaccgcagccactccaggagatatcatcaagctttacaatccccagtttgcagataaggtactcagctcttaagaggtgagctggatgcaggctgaggctgacttcagagccagtcactcctgcctcacacacacgattgtttcagtaggtgaatcacagaatacaaaatgcacgctcccctgtgaccagtcagcttctaggacttcacctatggaaacacacagaaaaatacaccaagatatttcatgggaaggaaggaaggcagcaatccttattgctgggataaataaattatgatacttgcctgtggtggaatatttattatacagttttgagaaacaatgaggtagatttgattgtggaaattgtggagcgatctccaagggaaactactaagtgaacaggcaagtgtggaagaacactgtgtacagtataattccatctgtgctagtaaaaagaggataaaatctggaggcggatagaggaattaaaatgttactgaaaatatacagaagacactgttaactttggggagagggattacagatgggagggcttaggttgggagtgggagatttatttttcattttctatttttctgtatggcttgaatatttaaccacatgtgtgtattactttttattccaaattaactttttgagttaaaattaatgttttcttaaaactaaacacagtccgtgcccaaggggctcactcacactctagaagaagagataataatgaaccaagatgtatgaagtgcagttgccccctgcccccactgcagccgctctcaggccagtgtcatggcaggaacttctcgcgttcaaggacagcatcacgatgccagcagcaccttggccaagttgcatactcagagctcatgtccccaccaggcctctcccaggctggcatccagacctctgtggtggcctgccctaccgatctgaaatgcaccatgaacaatcccagcccctgcaatccggctatgagtagccaaaagtgggcacaaagcctgtccctaaatccttcctggcaccaactctggaaggctgggagggacttagggacaggctttttgcccactttcatttgcacatagttccgacgagctcagtggcttggcttcccagcccccagcagattaaaaacagcaaaattggaaggaaagagacttctatggctaggaaactgacattaggaaaagtgacaggtggcaggtgagcagcaaggacagagacaggaaaacaatataatcagacataagaagcccaagccgcgatagtctggggtacttggtggaaggatgagccgcccacttacagacgtgcagagccttcgctactgtatcggcgaggttcagtaatgctggttcccaaagatgaacctttgtcatcagaggacggtgacggtatgtcacttcaacatgatattatgcacctcttatccaagaaactgataggacaaaccagtgtttgacaaacctatgtaatcataattagcatgtggagagagcccaactgtccatctgggtccagagtggctccctggagagcccttgtgcagtgcaaggcaacagaaagacctccaggaggttggttgctgatcgagacccgccacgcccccactcctggttttggtacatgcctatatcaagccatctccaaactggccggtgaacatggaagacaaatccaaagacgcctcatgtttcagaatcacagagtcccggggctggtccgaaacttggcggccaccccatgttctcctgcccagggctggcagtattcccatcacatgtttgcccagcacctcttgcccaccctgggtaggagctgctaattcagaacatacctgtcaaatctaatggttgggaaagtctcccttcctgggagatagattttatgtaaacaagataatggctaaatgaaaaaatagaataaatacatgaaagcacagaaaggatagcattccccagactggccttctggatttggggatgtgaaatctttgtaaagggggccatgtgggatggtaggcagtgtgcgatgggacaagagccacagggctggtggtctccactcagatcctggctccacactcactggccatgtgatctccagcaagtcatttcgcctctctgtgtgtcaggttttgcatttataaaatgaggacgatcctatcttcctcacagtgctgtcacatggattaaattaacaaatacaggtaaggcccctagcacagggcccagcacagagtgaacactcagtaaggccaccattgttaaccgtgcctcctgcgctccacagccaccctcgggccatcccaaaagcaaagccagattgggcttggaaagcacagctctgttcacatcgagctgctgtcagaaatcctcgatggctccccactgcttacacacacagctaagagcatgggctctgagggctcaaatcccagctctgccacttaccagccgtgtgaccttgggcaggtgaccccgccttcctttcctcgtctaagggaggaggaaggggaaccccaacagtccttctctgatggagtggtggcgagggccgagtgagtgagacagctctgggaacaaacataggctggtgcccatggcccactcacactcgctgcacctccctaccacacgctttcatttgtgctaaacctctgccagctccggggtccgaataaaacatgtggtctaaatgcggaagacgagaggcgcagagggaagcaggcctgtgcacaaaggtggaggcctctggagcggttcaccccatgcctgtgtgtgccgccgaatccgccgaatgcatgcgaggtacatgaagaatggtggccagcactgggatctttctatttgccagaaactcttctaaatgccttacttgcgtcacctcatttagtcatcagaacaatcgtatgaggtagaaatgatcactattattattgtccttgttaagaggctcagcctagcggtgaagggcaaaaggtctggagcagattctttggattaaaattactagttgttctataaccttgggcaagattacacctcagtgttctcatttata

SEQ ID NO: 1883745 - DNA, 4001 bp, Homo sapiens
gtcctcgtcagaacaagcgaagatggtgtgagcattgtgagaaaaagggcccatggggctgggccggctgttcgcccctgggcagccctggcggctctgggtgtgtggggcaagagggggccttgcaggaggggcggtgaggaatccaaaataatttttccgcggcaaggcggaggaccggaggggaccccgggaccgtgggccccgggccctgacgcctcggagcacaccccgtcctaagcgggccccaggtgttggaagctcgggagctcaagagcctggggaaggcctggagtctcagcgagagggtggctgcctggagagtccagagccctggcaggggatggaggcctctggcgcctgggctgtctcgcgcatggtctggccgccggcgacatcgggacgctctgggaggtcggcggaaagcacagcgcggcgatggtggtgcttgggcttagagggggagagcagcccggccacaggcaagcggctctggggtgcctgatcccagcctcgcggcccccgggttggtggtgatgcctggaatcaggcaggcgtagctggactgggctcttgggccagccaggcgccactgccattgtctacggccacaccacctggaaaacgagagagacccaagccgcggcccgtgggcacgctcagcgccactgctcctgccacagtgacgggcgcactctacaactttcagggcccacagcaccaagaggacagggaggagcccttgctgcctggctcatgaaagccccctgtgggagagccccaggagcgcagggcatgtggggtgcaggaagcgcctttccccacgccccggtgtaggtgaactcgatagaggagggaggagggtgacacccaccaggggtgctaattagtaaccacagtggcctcaaagaactcaaatgaaaggaagacttgcaagtctctcactttaagtccagagctagaaatgattaagcttagtgaatatgtagaattttcatagctagagagaagtcaacgcttggcttcaaaacttcaaaggatgggctgactctctttgaggaccactgcagctggtgactttaagttacagccagtgctcattgaccactctgaaaatctcagggcccttaagaattatgcaaaatctattctttctgtgctctagaaatggaacatcactgtctgggtgacagcacatctgttaatagcatggtttactgaatattttaatcccactattgagacctactgctcagaaaaaaaaaaaaacgattcttttaaaaagattgttggttggccaggcatagtggctcatacttgtaatccctgcactttgggaggccgaggatcacctgaggtcaggagttcaagaccagcctggccaaaatgatgaaaccccatctctaataaaaatacaaaaaaattagccagggatggtggtagtacctgtaatttcagctacttgggaggctgaggtagaagaatggcttgaaccctggaggcagaggttgcagtgagccaagaccgtaccactgtactccagcctgggcaacaagagcaaaactaagtcaaaaaaaaaaaaaagaaaagaaaagaaaagaaagaaaaagaaaaaataaaaggaaagaaaaggaaaaaagaaaaaaagattgctgcttattgacaattcacctagccacccagaagcttagatggagatttacttggaaattaatgttattttcatggctgctagtacaatatttaccttcagcctgtggatcaaggagtggttttgactttcaagtgtttttattaattaataattgcattttgtaaaggtatagctgtcatagatagtgatttctttgatgaatctggataaactgaattgaaaaccttttggaaaggattccccattaatcttttcatgatatttgaacctcctcccgtgaatcacaaatgtccttaatagcaatccttaaatgccattaaggacatttgtgattgatgggaggaggatgaaatattaacattaacaggagtttggaagaagttgattccagccctcatggatgactttgagggctcaggatgtcagtggaggaagtccctgcagatgtggtagaaatcacaagacaactagaattagaattagggccttaaggtgagatgaaattgctgtaaactcatgatgaaacttgaacaaatagggagttgcttcttatggacgagcaaagaaaatattttcttgagatggaatctaatccaggtggagatgctatcaacattgttgaaatgacaacaaaggatttagaatattccataaacctagttgataaagcagcagcagggtttgagagggtttattccaattttgaaagaagttctactgttgataaaatgctgtcaaacagcatcacatgctacagggaaatctttggtgaaaggaacaaacttcattgttttaaaaaattgacacaggcttccaaccttcagcagcccccacactgattagccagcagtcatcaatatagaggcaagactctcaccagcaaaaagattatgacttggtaaggctcagatattcattagcattttttagcactgacgtattttaacttaaggtatgtacacagttttttagacatgctattaattactaattaataattattaaatactcattagactacaatatagtttaagcataacttttataagcactgggaaataaaatgtttatgcaactaacttgattgtaacatttgccttactgaagtggtctggaacaaaacccacactatctctgaggtgtgcttgtaggtttttgtttgtagcatttgctttactgcagttgtctggaaccaaacccacactatctctgaggtgtgcttctaggtttttggttgttctttgttttgagatggggtttcgctctgtcgcctaggccagagtgcagtgacatgatcatagctcactgcagcctcaaactgctgggtcaagtgatttttctaccacagcctcctgagtagctgggactacaggcatgcagcactatgcctggctatatttttttaatactttttttgtagagacgggatctcactatgttgcccacctggtcttgaactctggggctcaggcaatccagccacttcagcctcccaaaatgcagccattacaggcttgagcaactgcacccagcttgtctgcagttcttaaaacaaaaacggccaggtgcggtgtctgacacctgtaatcccagcactttgggaggccaaggcaggtgaatcacaaggtcaggagttcaagaccagcctggccaagatggtgaacgcagtctctactaaaaatacaaaaattagccaggcgcagtggcgggcacctgtattcccagctactcgggaggccgaggcaggagactcacttgaacccgggaggcggaggttgcagtaagccgagatcgtgccagtgcactcctgccttgcgacagagcaagactccatcaaaaaaaaaaatgtaatttaaaagattaaaagttacgatagatttttacaaatgtatatatctaccattatagtatcatacagaatggttttactgccgtgaagattctctgtgctctgtgtatccatctcttccttccccttggtccatggcaaccactgatctttctactgatcccatagtttcaccgtttccagaacgtcatataattggaatcaaacagtacgtagacttttcggattggcttcttcttttagcaatatgcatttaagtttcctccatgtatttttttgtggcttgatagttcatctcctgttagcagtgaataacatcctgttgccattatacttttgtcaagactcagaacgtacagcgtgaagagtaaacgtgaatgtgcactgtaagctttgaatgataatgaaggatcaaggtaggttcctggttgtcacaggtgtgctcctgtgaggcaggaagctgtagtggggaggctgtgtgtggggaaagggacatat

SEQ ID NO: 1883746 - DNA, 4001 bp, Homo sapiens
ctctccataccaagcctgaggttcactgcaaaagagaggccgccgccctgcccccaccctgcccccaccctgccccaaacccgccccaacctgctcctccagcagagccctgtgttcttcctgtctgaggagtggttccagcaaagcgggctcttccacgtccttcagctcccccagtggcgccggatctaggaaaggttgtgccttttgctgaaactctggggttgacaggagctcatctaacaggctggaggtgagtgcagacgagagccccggctcctggagcggttgggaggtgcccggttggctggcatctgcgcttgacgcggaggcctccggggtcacgagctcgggaggtgaaggtgccccgtcttcgggttcccatgccgccctggcgacctggggctccagccccaccacggactccggtgggacgtgggtggtgcaagcacacctttcccctgtgactcagcttgaggggccccaagctgtcccactgagcacgcgcccagcaggccgtcgcgctgtgggttctggtcttcctgtcatttgttggggttcggaggccaccagggagtctgaggatgggagagccccagtttcggagggaggggccaggacagtgaacacaaagccccgcatgctcgggcaggttgggagagtccttctgcctgtgcagcctggctgggctggagcagggggatgacccttgcttcctggctcacgaaagccccctgtgggagagccccaggagcgcagggcatgtggggtgcaggaagcgacgttccccacgccccggtgtaggtgaacccgatagaggagggaggagggtgacacccaccaggggtgctaattagtaaccacagtggcctcaaagaactcaaatgaaaggaagacttgcaagtctctcactttaagtccagagctagaaatgattaagcttagtgaagatgtagaattttcatagctagagagaagtcaacacttggcttcagaacttcaaaggatgggctgactctctttgaggaccactgcagctggtgactttaggttacagccagtgctcattgaccactctgaaaatctcagggcccttaagaattatgcaaaatctattctttctgtgctctagaaatggaacatcactgtctgggtgacagcacatctgttaatagcatggtttactgaatattttaatcccactattgagacctactgctcagaaaaaaaaaaaaaacgattcttttaaaaagattgttggttggccaggcatagtggctcatacttgtaatccctgcactttgggaggctgaggatcacctgaggtcaggagttcaagaccagcctggccaaaatgatgaaaccccatctctaataaaaatacaaaaaaaattagccaggcatggtggtagtacctgtaatttcagctactcgggaggctgaggcagaagaatggcttgaaccctggaggcagaggttgcagtgagccgagaccgcaccactgtactccagcctgggcaacaagagtgaaactacgtcaaaaaaaaaaaaaaaaaaaaaaaaaaaaaaaaaaaaaaagaaaaagaaaagaaagaaaagaaagaaaaagaaaaaatcaaaggaaagaaaaggaaaaaagaaaaaaagattgctgcttattgacaattcacctagctccccagaagcttagatggagatgtacttggaaattaatgttattttcatggctgctagtacaatatttaccttcagcctgtggatcaaggagtggttttgactttcaagtgtttttattaattaataattgcattttgtaaaggtatagctgtcatagatagtgatttctttgatgaatctggataaactgaattgaaaaccttttggaaaggattcaccattaatcctttcatgatatttgaacctcctcccgtgaatcacaaatgtccttaatagcaatccttaaatgccattaaggacatttgtgattgatgggaggaggatgaaatattaacattaacaggagtttggaagaagttgattccagccctcatggatgactttgagggctcaggatgtcagtggaggaagtccctgcagatgtggtagaaatcacaagacaactagaattagaattagggccttaaggtgagatgaaattgctgtaaactcatgatgaaacttgaacaaatagggagttgcttcttatggacgagcaaagaaaatattttcttgagatggaatataatccaggtggagatgctatcaacattgttgaaatgacaacaaaggatttagaatattccataaacctagttgataaagcagcagcagggtttgagagggtttactccaattttgaaagaagttctactgttgataaaatgctgtcaaacagcatcacatgctacagggaaatcttttgtgaaaggaacaaacttcattgttttaaaaaattgacacaggtttccaaccttcagcagcccccacgctgattagccagcagtcatcaatatagaggcaagactctcaccagcaaaaagattatgacgtggtaagtctcagatattcattagcattttttagctctgacgtattttaacttaaggtatgtacacagttttttagacatgctattaattaataactaataattattaaatactcattagactacaatatagtttaagcataacttttataagcaccgggaaataaaatgtttatgcaactaacttgattgtaacatttgccttattgaagtgttctggaacaaaacttacactatctctgaggtgtgcttgtaggtttttgtttgtaacatttgccttactgcagttgtctggaaccaaacccacaatatctctgagtatgcttctaggtttttggttgttctttgttttgagatggggtttcgctctgtcgcctaggccagagtgcagtggcatgatcatagctcactgcagcctcaaactgctgggtcaagtgatttttctaccacagcctcctgagtagcttggactacaggcatgcagcactatgcctagctatttttttttaaatactttttttgtagagacgggatctcactatgttgcccacctggtcttgaactctggggctcaggcaatccagccacttcagcctcccaaaatgcagacattacaggcttgagcaactgcacccagcttgtctgcagttcttaaaacaaaacggccaggtgcggtgtgtgacgcctgtaatcccagcactttgggaggccaaggcgggtgaatcacaaggtcaggagttcaagaccagcctggccaagatggtgaacgcagtctctactaaaaatacaaaaattagccaggcacagtggcgggcacctgtagttccagctactcgggaggccgaggcaggagactcgcttgaacccgggaggcggaggttgcagtaagccgagatcgtgccactgcactcctgccttgcgacagagcaagactccatcaaaaaaaaatgtaatttaaaagattaaaagttaagatagatttttacaaatgtatatatctaccattatagtatcatacagaatggttttactgccgtgaagattctctgtgctctgtgtatccatctcttccttccccttggtccatggcaaccactgatctttctactgatcccatagtttcaccgtttccagaacgtcatataattggaatcgaacagtacgtagacttttcggattggcttcttcttttagcaatatgcatttaagtttcctccatgtatttttttgtggcttgatagttcatctcctgttagcagtgaataatatcccgttgccattatacttttgtcaagactcagaacgtacaacgtgaagagtaaacgtgaatgtgcactgtaagctttgagtgataatgaaggatcaaggtaggttcctggttgtcacaggtgtgctcctgtgaggcaggaagctgtagtggggaggctgtgtgtggggaaagggacatatgaga

SEQ ID NO: 1883747 - DNA, 4001 bp, Homo sapiens
ccttgatccttcattatcattcaaagcttacagtgcacattcacgtttactcttcacgctgtacgttctgagtcttgacaaaagtataatggcaacaggatgttattcactgctaacaggagatgaactatcaagccacaaaaaaatacatggaggaaacttaaatgcatattgctaaaagaagaagccaatccgaaaagtctacgtactgtttgattccaattatatgacgttctggaaacggtgaaactatgggatcagtagaaagatcagtggttgccatggaccaaggggaaggaagagatggatacacagagcacagagaatcttcacggcagtaaaaccattctgtatgatactataatggtagatatatacatttgtaaaaatctatcgtaacttttaatcttttaaattacatttttttttttgatggagtcttgctctgtcgcaaggcaggagtgcactggcacgatctcggcttactgcaacctccgcctcccgggttcaagtgagtctcctgcctcggcctcccgagtagctgggaatacaggtgcccgccactgcgcctggctaatttttgtatttttagtagagactgcgttcaccatcttggccaggctggtcttgaactcctgaccttgtgattcacctgccttggcctcccaaagtgctgggattacaggtgtcagacaccgcacctggccgtttttgttttaagaactgcagacaagctgggtgcagttgctcaagcctgtaatggctgcattttgggaggctgaagtggctggattgcctgagccccagagttcaagaccaggtgggcaacatagtgagatcccgtctctacaaaaaaagtattaaaaaaatatagccaggcatagtgctgcatgcctgtagtcccagctactcaggaggctgtggtagaaaaatcacttgacccagcagtttgaggctgcagtgagctatgatcatgtcactgcactctggcctaggcgacagagcgaaaccccatctcaaaacaaagaacaaccaaaaacctagaagcacacctcagagatagtgtgggtttggttccagacaactgcagtaaagcaaatgctacaaacaaaaacctacaagcacacctcagagatagtgtgggttttgttccagaccacttcagtaaggcaaatgttacaatcaagttagttgcataaacattttatttcccagtgcttataaaagttatgcttaaactatattgtagtctaatgagtatttaataattattaattagtaattaatagcatgtctaaaaaactgtgtacataccttaagttaaaatacgtcagtgctaaaaaatgctaatgaatatctgagccttaccaagtcataatctttttgctggtgagagtcttgcctctatattgatgactgctggctaatcagtgtgggggctgctgaaggttggaagcctgtgtcaattttttaaaacaatgaagtttgttcctttcaccaaagatttccctgtagcatgtgatgctgtttgacagcattttatcaacagtagaacttctttcaaaattggaataaaccctctcaaaccctgctgctgctttatcaactaggtttatggaatattctaaatcctttgttgtcatttcaacaatgttgatagcatctccacctggattagattccatctcaagaaaatattttctttgctcgtccataagaagcaactccctatttgttcaagtttcatcatgagtttacagcaatttcatctcaccttaaggccctaattctaattctagttgtcttgtgatttctaccacatctgcagggacttcctccactgacatcctgagccctcaaagtcatccatgagggctggaatcaacttcttccaaactcctgttaatgttaatatttcatcctcctcccatcaatcacaaatgtccttaatggcatttaaggattgctattaaggacatttgtgattcacgggaggaggttcaaatatcatgaaaagattaatggggaatcctttccaaaaggttttcaattcagtttatccagattcatcaaagaaatcactatctatgacagctatacctttacaaaatgcaattattaattaataaaaacacttgaaagtcaaaaccactccttgatccacaggctgaaggtaaatattgtactagcagccatgaaaataacattaatttccaagtaaatctccatctaagcttctgggtggctaggtgaattgtcaataagcagcaatctttttttcttttttccttttctttccttttattttttctttttctttcttttcttttcttttcttttttttttttttgacttagttttgctcttgttgcccaggctggagtacagtggtacggtcttggctcactgcaacctctgcctccagggttcaagccattcttctacctcagcctcccaagtagctgaaattacaggtactaccaccatccctggctaatttttttgtatttttattagagatggggtttcatcattttggccaggctggtcttgaactcctgacctcaggtgatcctcggcctcccaaagtgcagggattacaagtatgagccactatgcctggccaaccaacaatctttttaaaagaatcgtttttttttttttctgagcagtaggtctcaatagtgggattaaaatattcagtaaaccatgctattaacagatgtgctgtcacccagacagtgatgttccatttctagagcacagaaagaatagattttgcataattcttaagggccctgagattttcagagtggtcaatgagcactggctgtaacttaaagtcaccagctgcagtggtcctcaaagagagtcagcccatcctttgaagttttgaagccaagcgttgacttctctctagctatgaaaattctacatattcactaagcttaatcatttctagctctggacttaaagtgagagacttgcaagtcttcctttcatttgagttctttgaggccactgtggttactaattagcacccctggtgggtgtcaccctcctccctcctctatcgagttcacctacaccggggcgtggggaaaggcgcttcctgcaccccacatgccctgcgctcctggggctctcccacagggggctttcatgagccaggcagcaagggctcctccctgtcctcttggtgctgtgggccctgaaagttgtagagtgcgcccgtcactgtggcaggagcagtggcgctgagcgtgcccacgggccgcggcttgggtctctctcgttttccaggtggtgtggccgtagacaatggcagtggcgcctggctggcccaagagcccagtccagctacgcctgcctgattccaggcatcaccaccaacccgggggccgcgaggctgggatcaggcaccccagagccgcttgcctgtggccgggctgctctccccctctaagcccaagcaccaccatcgccgcgctgtgctttccgccgacctcccagagcgtcccgatgtcgccggcggccagaccatgcgcgagacagcccaggcgccagaggcctccatcccctgccagggctctggactctccaggcagccaccctctcgctgagactccaggccttccccaggctcttgagctcccgagcttccaacacctggggcccgcttaggacggggtgtgctccgaggcgtcagggcccggggcccacggtcccggggtcccctccggtcctccgccttgccgcggaaaaattattttggattcctcaccgcccctcctgcaaggccccctcttgccccacacacccagagccgccagggctgcccaggggcgaacagccggcccagccccatgggccctttttctcacaatgctcacaccatcttcgcttgttctgacgaggacccgccatggccaaaggggcaagaaggctctgctttgccccgccctggcactagagccccggcagcctcatcccgggaaaga

SEQ ID NO: 1883748 - DNA, 4001 bp, Homo sapiens
cctaccttgatccttcattatcactcaaagcttacagtgcacattcacgtttactcttcacgttgtacgttctgagtcttgacaaaagtataatggcaacgggatattattcactgctaacaggagatgaactatcaagccacaaaaaaatacatggaggaaacttaaatgcatattgctaaaagaagaagccaatccgaaaagtctacgtactgttcgattccaattatatgacgttctggaaacggtgaaactatgggatcagtagaaagatcagtggttgccatggaccaaggggaaggaagagatggatacacagagcacagagaatcttcacggcagtaaaaccattctgtatgatactataatggtagatatatacatttgtaaaaatctatcttaacttttaatcttttaaattacatttttttttgatggagtcttgctctgtcgcaaggcaggagtgcagtggcacgatctcggcttactgcaacctccgcctcccgggttcaagcgagtctcctgcctcggcctcccgagtagctggaactacaggtgcccgccactgtgcctggctaatttttgtatttttagtagagactgcgttcaccatcttggccaggctggtcttgaactcctgaccttgtgattcacccgccttggcctcccaaagtgctgggattacaggcgtcacacaccgcacctggccgttttgttttaagaactgcagacaagctgggtgcagttgctcaagcctgtaatgtctgcattttgggaggctgaagtggctggattgcctgagccccagagttcaagaccaggtgggcaacatagtgagatcccgtctctacaaaaaaagtatttaaaaaaaaatagctaggcatagtgctgcatgcctgtagtccaagctactcaggaggctgtggtagaaaaatcacttgacccagcagtttgaggctgcagtgagctatgatcatgccactgcactctggcctaggcgacagagcgaaaccccatctcaaaacaaagaacaaccaaaaacctagaagcatactcagagatattgtgggtttggttccagacaactgcagtaaggcaaatgttacaaacaaaaacctacaagcacacctcagagatagtgtaagttttgttccagaacacttcaataaggcaaatgttacaatcaagttagttgcataaacattttatttcccggtgcttataaaagttatgcttaaactatattgtagtctaatgagtatttaataattattagttattaattaatagcatgtctaaaaaactgtgtacataccttaagttaaaatacgtcagagctaaaaaatgctaatgaatatctgagacttaccacgtcataatctttttgctggtgagagtcttgcctctatattgatgactgctggctaatcagcgtgggggctgctgaaggttggaaacctgtgtcaattttttaaaacaatgaagtttgttcctttcacaaaagatttccctgtagcatgtgatgctgtttgacagcattttatcaacagtagaacttctttcaaaattggagtaaaccctctcaaaccctgctgctgctttatcaactaggtttatggaatattctaaatcctttgttgtcatttcaacaatgttgatagcatctccacctggattatattccatctcaagaaaatattttctttgctcgtccataagaagcaactccctatttgttcaagtttcatcatgagtttacagcaatttcatctcaccttaaggccctaattctaattctagttgtcttgtgatttctaccacatctgcagggacttcctccactgacatcctgagccctcaaagtcatccatgagggctggaatcaacttcttccaaactcctgttaatgttaatatttcatcctcctcccatcaatcacaaatgtccttaatggcatttaaggattgctattaaggacatttgtgattcacgggaggaggttcaaatatcatgaaaggattaatggtgaatcctttccaaaaggttttcaattcagtttatccagattcatcaaagaaatcactatctatgacagctatacctttacaaaatgcaattattaattaataaaaacacttgaaagtcaaaaccactccttgatccacaggctgaaggtaaatattgtactagcagccatgaaaataacattaatttccaagtacatctccatctaagcttctggggagctaggtgaattgtcaataagcagcaatctttttttcttttttccttttctttcctttgattttttctttttctttcttttctttcttttctttttctttttttttttttttttttttttttttttttttttttttgacgtagtttcactcttgttgcccaggctggagtacagtggtgcggtctcggctcactgcaacctctgcctccagggttcaagccattcttctgcctcagcctcccgagtagctgaaattacaggtactaccaccatgcctggctaattttttttgtatttttattagagatggggtttcatcattttggccaggctggtcttgaactcctgacctcaggtgatcctcagcctcccaaagtgcagggattacaagtatgagccactatgcctggccaaccaacaatctttttaaaagaatcgttttttttttttttctgagcagtaggtctcaatagtgggattaaaatattcagtaaaccatgctattaacagatgtgctgtcacccagacagtgatgttccatttctagagcacagaaagaatagattttgcataattcttaagggccctgagattttcagagtggtcaatgagcactggctgtaacctaaagtcaccagctgcagtggtcctcaaagagagtcagcccatcctttgaagttctgaagccaagtgttgacttctctctagctatgaaaattctacatcttcactaagcttaatcatttctagctctggacttaaagtgagagacttgcaagtcttcctttcatttgagttctttgaggccactgtggttactaattagcacccctggtgggtgtcaccctcctccctcctctatcgggttcacctacaccggggcgtggggaacgtcgcttcctgcaccccacatgccctgcgctcctggggctctcccacagggggctttcgtgagccaggaagcaagggtcatccccctgctccagcccagccaggctgcacaggcagaaggactctcccaacctgcccgagcatgcggggctttgtgttcactgtcctggcccctccctccgaaactggggctctcccatcctcagactccctggtggcctccgaaccccaacaaatgacaggaagaccagaacccacagcgcgacggcctgctgggcgcgtgctcagtgggacagcttggggcccctcaagctgagtcacaggggaaaggtgtgcttgcaccacccacgtcccaccggagtccgtggtggggctggagccccaggtcgccagggcggcatgggaacccgaagacggggcaccttcacctcccgagctcgtgaccccggaggcctccgcgtcaagcgcagatgccagccaaccgggcacctcccaaccgctccaggagccggggctctcgtctgcactcacctccagcctgttagatgagctcctgtcaaccccagagtttcagcaaaaggcacaacctttcctagatccggcgccactgggggagctgaaggacgtggaagagcccgctttgctggaaccactcctcagacaggaagaacacagggctctgctggaggagcaggttggggcgggtttggggcagggtgggggcagggtgggggcagggcggcggcctctcttttgcagtgaacctcaggcttggtatggagaggcgtgtcttcccttccagctgacctccctaggatccctgagttccaggtccagcgagagactccacacagagtagggctgt

SEQ ID NO: 1883749 - DNA, 4001 bp, Homo sapiens
ccaatgtcaggctctctctgcctctgcaagaaatgtcagggagaagatgaccaagtggtattggacagaatggcagtgatgctgaggaagaaaccaaaggtgagggccctctccctttgtattaaacgaaactttccaggcttaggccctgcagcctgtacggtgtcaaaaaacaattgtcataagttgtcgacacttggaaacatttaaacttatgaggtttcacattaaaatctgtattactgccttcctttacaaatctggaagaaggaatgcatctgtataggtgggtaagagcaggggctctggagtcagactacctgggttccaatcctaactctgccactagcttgctgtgtgtccttggctgagttacttaacctctctgtgctctgcttccttcgtctgcataacggggataataacagcactttcaccaagattgtcatggagattaaataagaaagtgcctatacagcacttctttagaacagcaccaggcacaaaagaagcatgcaaaatgttagctggtgttatttgtaactttttttttttttttgagacagggtctttctctgtcacccagactggagtgcagtggcacaatcatggctcactgcagccttgacctcctgagctcaagtgatcctcctgcctcagcctcccaagtagctggaactacaggcttgagccaccgtgcctggccgtttgtatcattatttacagtgtttagtattaggcagtgctgcccctggattctgtcccaggcagagctgagtaatagctgcccctttagatgaagtgtgacctcttccattgtccacagcccacaaccccagggaccaaggctgaggtcctaaaaaagccaacactgtgtaggggcctgactcctggctgctatgtgactttggacagtcactccctctgtctgggccagtgtcctcacttataaaccagaggcacagggccctgaaaacattatgctaagtgaaagaagccagacacggaaggccacataatgtctaattccattcctaccaaatgcccagaatacgaaaatccatggagacgaacagtgaattagtggttgcagaggctgacggaatggggagtgacatctcatggccacagggtttcttgtggggtcacaaaaatgttctggagcgccatagtggaaccggttgcacaaccttatgaacacagtcatgcgttacttaatgatggggatacgaccgggcacagtggctcatgcctgtaatcccagcactttggaaggccgaggtgggcggatcacctgaggtcagtagttcgagatgagcctggccaacatagcgaaaccccatctctactaaaaatacaaaaattagctgggtgtggtggcacgtgattgtaatcccagctgctcaggaagctgaggcagaagaattgtttgaacccgggaggcggaggttgcagtgagccgagatcgtgccactgcactccagcctggacgacagagtgagactccatctcaaaaaaaaaaaaaaaaaaaagatggggatacattctgagaaatgtgtcaccgggcaattttggtgggcaaacttacatgaacctagatggtgtagcctactgcacaactaggccacatggcatagcctattgctcctacactataaacctgtacagcatggtactgtgctgaatactgtcagcaattgtaatgcaatgctaagtatgtgtgtatctaaatatatctggatggtttccctgcaggtaacagctggctctgatgtcctaaggagaccccagcgccatgacaaacccagggatctctgattgctcccagcctgagtcgcttcatatcctacatgggaggctgaatccacaatccctcctgcagacgtaccctctcctctcccttgtccctgcagaggccagggctgcaggggatgaggctcgcccctagtactgcatgaccctgtctacaggtttggaggctcctcagctcagcctcggcccctgggctcttgtcttgctaagcccagagacccagctcccactgggcttggtggctgcttgaagtggatcatgccttgcacctccccctcctctccagaatcttctatgtgtgccgagactcccagaacaggagacatttggctacatcacccaagatggtgcccactttccattgccatgggtctaagaaaaggtgaagttccctcccccagcccttccctgcctgctgagggataggacatgtgtccccatttgcagtggatgcagggagggctggagaaatgctctgtgctctgagtaaggcatgttcccctgtaagtgtgcccatgacagcttgtgtatgcatatgtgcatgtatggatatgcatgtttgttggcagggatctgtgcacatttgtaggtctgcctttctacccgtcttgtgttctggactgtgcacatatctgccttgacagacttatcaatgttcacacactggctacacctgtaccttgtctatatgtgtggctgcgtgcgtgagtctgctggagctcagcacttgtgtggctgagctgtttacacctgtctgaatatgaggggtgtgttcacgtgtcccctgaacgcacactagtgcatgtgtcccttctgtgtgtgtcaaggcaggccgcacggccatgaggaccatagcccaggccttggaagttttccacgagcttagactccagcacccactgcacatggcaaatggcaccagtgacctgccgtggaaggcacagatgccagagggcaccactactccagcaggagcaacaccaacaaggccagcaccagccccacccatggcctccagagatcctggagcctggagggcccagacgagctggcagctccaggctccaggctcctcaaggtcccacagacaggccaaaatccagacagcgggaagggacagcacaagccggagcctggggaccagaggcagtttgggggtgctccatggggccacaccccaagcctgctctacatattcttctagggctccagaagtggggaaaaccacaggtggggaaggctgccccacaggtgtacaggtacaggtgtgaggctgacataggtgggtgaaggatcagaatcaagaagaggagatacttcctgcctgatgagtctctagctgtcccctccagggcgcaaagccccagcacctccttctctcctgtctttggggcacccagccatggccccagccccttgggctccagcagcagcagcagatacaggaggctgaggctcaagtgagagtggctagagggcaagtgagctgagcaggtggaggccagaccaccctttcccatcccagctggcccgggccacaggtgccactcgatgaggcctcagctaagcaccgagacagttgccctcagacagcccacgccagccagctccctgcaccaaccggaagctcctgcggcacctggcaccacccgaggcccgcctgggaaagagagggcctgagagccaactcagcctggcacccgggaggcgatggtctggtgagacttgggaagctgaaggtcctgccccaggtggaactcagaaagataaagaaatggcagctcagagataggaggggacttgcataggctgcctgtccaggcagcggccaagctcttgtgactgtagagtcctttattaccctttcccactcccaagccaaaatgctggtaccaggacccaactgagtcagatccatcttcagtttcccctagacacccacccagtgggctccaagaggccaaatcccggggactggacccctaggacaagtcggtgacccagggttgcctgcccttctttgccccaataccaggactgccctgggcctataacatgctttcctgaattctggataggtctccctaccatagctcagagagggttgcccacttgcccaagatcacacagccggggagctggcaccggacaactggcccgtgggtgttctcctgtgtcactgtcctcgg

SEQ ID NO: 1883750 - DNA, 4001 bp, Homo sapiens
gaacatggtttggtggcatcggtgactctcaaaaggacaagctgtattgttacacaagtcaaacactgcccaaaccatgacatcaaatcagatatgggtgcaacctggccgctgcaggggtcacctagtcgccgcaaacgcttgggttcaacccaggcctcgcccttctcacaagcagactccaagatgccccaaatgctggagattcaaacctcaattcatgtctccaccaacagcacacaactgcttcatacaatactggactccacgtaagagttcactgggtggcacccgattctttttgagatggagtctcgctctgtcacccaggctggagtgcagtggcgcgatctcggctcactgcaagctccgcctcccgggttcacgccattctcctgcctcagcctccggagtagctgggactacaggcgtcaatggcacctgattctaacccacttctataaaagctcatctgagtaatattcaggaacactgatctgcatgcagccatgaatatgaggccctccaaatactagaagttaactttaaaactgtaatttcatggccgggcgcggtggctcatgcctgtaatcctagcactttgggaggccgaggcgggtggatcacctaaggtcaagagtttgaaaccagcctggccaacatgatgaaaccctatctctactaaaaatacaaaaaattagccgggcgtggtggtgcacgcctgtaatcccagctgctcgggaggctgaggcagaaaaatcgcttgaacccaggaggcggaggctgcagtgagccgagatcgagccactgcactccagcctgggcaacaagaccaaaactatctcaaaaaataaataaataaaattacaattttatatgtaaccccatctttttcaggctcaaaataataccaaatagaagcttgataacaacctaaactcttaacaactgtttatacaaaagtatcagaagcaagcgtggtagaagaggagatcttgaaccttacaagtgtccacccattaatacattcagttcctcttattaaaaactagggctattaacagggagagagactgagttacagggcagtaattccgtcccttcaaaatcatgtggccacagagcagggtccgttctcagtcctagtttcccttgacttgacccagaccagactccctcctcctccgagccccgtcttcaccggctgccagacaccccaccccctgtcggccctacaccgagtggaggcttggtgctcttctgcactgaccctcagccctcggggcctcaaaatgacaactccaaaatacccagctctggccctgaccgttcccctgaccccaggctgcccatctggccgcctcccgagaggccatgggcgctgtgactccttcatcttggcctaggaagcaccagccttcagctgctcacgccagattcttgcagacattgcaactcctctttttctcggctctaccttccacaaacatcccctgctactgccaggaccaggccccggccccgatcccggcccggtccaccgcagcccatccccgcactggctccttgctgcccccgaccctcccagcagccagagggacttttcacccaggctcagcctgggtctccccagccactgggcaggaaggcagcagagtcggctccgcccccagcctcactggtcttccccgacccctggctggggggcgctggcaaactcaggggtcggaggcgcccctgaccctcccgagcacgcagccggctgagggtgcggggcttcggggacacgaggggcccacagctgagcgtggaggggcgacagggtgcgggggagcgacggacccgggacggggcagggccgggtgggccgcccacgggcctcaggcggtactgggagccgcgaccccgcgcaaaaccccggaccgtgccctggcgctgctccgagcacggccgcgcgcgttcccgaactttcccgcgccagccacgctcggacttggtttccggcccagcggctcagagaaatcccctcgggctggccccgcccccgccccgcggcctctcccgcccccgctcccgctccggcccggagtctccctgagaggtgcccgcgcctgcgcccgaccccgcgcccgaccccgcacccgaccccgcgcccgcgcccgaccccgcacccgaccccgcgctcgcctcacccaacggtcgcagcgcgcccggaactaagggcccgcccagctaccgcccccaacgccgccgccgccgccgccgctccgccgcgtgcgcctgacggacggacatgggagccaaccagccagccctcaggaagctgtagcgagagccattggccagatacgccccgctccgagcgcgcctgacggactgacgccggagccaaccagcgagcccgcaggagccgcagcgtgcgccgattggtcggcgctgagacggcgtgggtacctaagtcgccctctgctttttcctcaaagagcgcgccggggcgttggtgcggggagctggtgaggtgctgcgctgtggggtccgcgctaattgggtcccttccccaggtgcggcgagacagcgaggcccttgcttcccctcccgtggccccggggcggagacccctgccgcacacccgagaggtgagccgggagcccaagccgggcgacaccggttcccacgaggcgcgcgtcgcgcgcgggacgcggggccctggcggggcggccgcacctacccgacacctgcgggtccctccgcctcccccggtgccgggcgcagagcggcgcctcaatttgggtaacatttatgagaaacaggactaaaagaatactgcacacttaagtaaggtattaaggctatggggtctccttttggggtgaggtaatgctctgcaaccggacagtggtgacggccgcccgacatggccggtgtgctaatctactgggttgtgcactttatttatttttttttttgagacggaggctcactctgtcgcccaggctggagttcagtggcgcgatctcgactcactgcaacctccgcctcccgggttcaagcgattctcctgcctcagcctcccgagtagctgggactacaggcgcccgccatcacgcccggctaatgtttgtatttttgatagagacgaggtttcaccatgttggccaggctggtcttgaactcccgacctcaagtgaaaacacaacctatggcctccagacactcaaatgaaaacagtggccttggcggccaaaacaggggctgccctaggagtcctgtgggctgcatgggggaggcggcactgtcatctgcccaggagaacgggagctgcagcaggttctctctggcggtgcacgggctagcactggacacaccaccccctctccatccagcctttggtgaaatggagacctttcaccccgctttgcagagaaggaaacgttcacggaggtaagtctcctccaagcattcagaccctgagaccacgggactcctcaaggatggaatacactgcaaaacagggcaggctttgaagttgcataatttacacaggccacgctgtccccaggcgccaatgccacatttcatatatgttacttggtttgcagttggaattcccctccgccccaaacccacattcctgggacagcaaggccttgagatggaactcaggaagccatcggattccatcaacgtcatcacccctgagtttgctgcaagcagccatggaaacgtcccaagtccgcacctgcaggctcagtgaggttgctcaagcccaggaactaactgagctctcaaacgtaagaaggcgtctcctcctggctgcacctgggaggctcaaagctgtcctgagtctgcagcagccagctcgggatgagaaagggttcacgtggcagttcatgcctataatcccagcactttgggaggctgaggcaggaggaccgcttgagcccatgagttcgaaaccagcatgggcagcatgggggaaccccatctctaccaaaaaaagg

SEQ ID NO: 1883751 - DNA, 4001 bp, Homo sapiens
tgcatcccgattctccacaagggggagcctggtcaattctcccgcccgcagcaatgaacttcgcaggcagcagtccggccttcctatttcagaagtccccagcaccgcgttctggggtgggaatagatgcgcccctgagaggtcctcatgctgcttcagatcctgtggttggcagatcatgttctctccaaaagatgttccacacagcccaacagcagcgatttgagaggctggcacgtggatccatcatgctatgacccccaataaacaaaccaaaaagaagatggaaaggaaaagcaacataggaaagagaagccacccctggctgggggcgtttggtctgaagcaggtaggtgggcggctttgggttcagccctgcccaggtttgcgtgcctgtttcccgtcttggcccacaggttctttaaggtggctccttacatgttcactgggcatctgccctgtgccagtctgtatgctgggagcaggtggtcctccaatgcggcagaaactcaggctcatgagctcccacctactctcagggtctctttcgcctctccatttatctgaaggttaaaaaggcccaataagatgcccttaaaacagaccaagggggcaggcagggcaggcacgcagggaagggcaggttgttcattgcaccagagtcaccggctgactggacaagtggggactgaggtccagcctgctctacagccaccaaaccctaagtcctggcgtggggcttcatctgctcaagagaaggaaggaacaaggtgctgagaaacagcctggggacagcccaggggaaactttaagacaaaccctattgcatgatctctccctcctgcggtagctgcttcacactgctgtcacagatcaggagaaaaacgtaaggataagtccaatggatcttcaaagacagacccgcctgggttctttttttcaatctgtatttattttattcttttattttttagaaacagggtctcactctgtcgcccaggctggagtgcagtggcaccagcatagctcactgcagcctcaaactcctggtctcacacgagcctcccgcctcggcctccccgagtgctgggattacaggtgtgagccactgtgcctggcctcaacttacatttatttagtgtcagtgatgtgccgggtactatgaggggcacaaatcatctgtcaggtgatgtcatcatgcctttcaccaatgcagaagccgaggcccagcacagttcaggaacatgctctagggcacattgccaggcagaggcaggctccagctctcaggcccctgtgttttctcttgttaaaagggctctagaaccagtgagcctactaggctctatcttggtactatcacttgggcaagttactctgtgcaagccgatgcctccacttcctactctgtgaaatgggataacatcaacagcagcctaatgggagcattgcaaaaaacacgcaggtcggggaatgaaaggcaattagtgcaggactggcatatagaagtgcacagtaggggccgggcgcagtggctcacgcctccaatcccagtactttgggaggctaaggtgggcggatcaggaggtcaggagctcaagaccagcctggccaacatggtgaaaccccgtctctactaaaaatacaaaaattagctgggcatggtggcatgtgcctgtagtcccagctactcgggaggctgaggtagaagaattgcttgaacccacgaggcagaggttgcagtgagccgagattgcaccgctacattccagcctgggcatcagagcgagactctgtctccccccgcccccccaataaaagtgcttagtaggtgtcagctactgctacaaagcaagcccttttcctcacaggagccctgggaaaaagaccataaaagtgcaggctgaggtacagagacagaaaggtgacttccctctaaggctggtaaacctacaggcaggactaaggccaaaggtgccaagtcctggtccatgcagcttctcagcctccctaattctccactagagcctgaggagttccaggagtggacctggacagagacggtccaggtatgggggagggcgaggagcaatgtgttaagtcaggactggaagacaacgagtggggagcagggcaggacttgaacttgatccttgtggatgtgcaggtgggaaaaggttgtccagagtcctcatggggccactgtcagaacccaccagctgtgagggtccccgtgccccagccggaccctgagtcaggggaccccaactccaccctcacctgcccccatcggcccaggccagctaaggctggtgggcctgagcgtgggccagcctcccccctcagcccaccggcctgcctgcctcctccggcctggccagcatggtggcaggccctgcctgctcccctgggagcctgccgccagggctgatggcgctgacggagggagggaggccgccaagctgtcagtctagaggtgcccctcggagcccctcctggctggagtgaggagggtgggccggcgccggagccgggctgtcagggccttcacagagacgaggccagagaggcgctgcctgacagctcgcccaccgaattaggaccatttgcatgctaatttccagcactctaacgggctggcaggcgggctggggtgtggagagtgtgcagagagaggcaccgcggccttcccgcccgcgaaggaacaatgcttgactgatctagctgcgttaacgagcaaattatggtaattttgttattacaaatgcatagaaatttccaaagcaggcagccattcagggcagctccctgctcctccccactcctaaatacagagccccctatttggaaacacaggccaggcacccacttcagagaccaagatttccaggtgcttccctcagttctcccagggaggcccagggtgagcccggccagagcatccatcgagtcagcaaccctcagcttctgagctccccacaccttgccctcttgtcccccagtagtctctgcctagcccctgggcctagcaatcctgcagaacctccacatgcaagctggtttctttccatctgagcaggtagcatgggcgattctcctaggtcttgagaaattcattcagtcatttctgtgcccattctttgaactaggcccagcacccaggagggactcagggattgtctgatgaatgaataagtgagtcaaggaagaagggaggaagggaagagaggagggaaggcagcgggagaggctggggagagagggagagaaggaagaaatggaggaagaccagaacatattccgcaaatgaagataatcaggagaccccacacggccagctcactggtggtataattaatccaagacttcactagcggagtttatttgccaactagtaacccctcccagtatttataattgtccactgtcaaaatcacaatttgccccagtttttctggtagtcttcttttgattaaaagtatgtttttggaagcctgctctggtatgcatccagacaggagctgtttccaaaaaagtgagctcccacctcctagcagtgaagcgtgggtcgctccagagcagggctgggcacaaaggacggctcagtggtgccacgctgtgaaaagcaagtctgcccatcctcgggcaggtggggtggatctgcatccactcctgccccaccgggaaccactggcagtcctcctgttttatgacagggatttcaggttggggctgatgttattgaaaggtcaggaaggtgcctcaaatccattttggaagtcagtggggaataaatcatcaattatggaggaaaccagcggctaggaaggtctgctcctggtggctgaagaagcgcgggcgggccgggcctcaccagggagcgttcgaggcagaggcctaaatagaagccaagacttcagaacctcagttggggtcgtggtcagatttttctatctgtctgactttctaactgggtcacagcttccagagggaaactgaac

SEQ ID NO: 1883752 - DNA, 4001 bp, Homo sapiens
cagagccggatgacaccaagacgatgtggagactgagtgttccctgagatgggagcagagtcacctggtctagccaaggtcccccggtcacagcagacccacagacacaaataccttagacagaagcccccagacacagaactgcactggagagccactgatgcccacagggagacaggagctaccccagaggggtccagagcccatggaagccccagccccagccaggccccagtcacgccgtgtgccagcagcaggtcctgtggccagacaaccccacatgcggcccccacactcaaagcagggggagaagcagaagatgccaggcagcaggtggccagggcagcgtggccgtgggaggtggggttccccgctagagtctgcgtaatagacacggaaaatctttaccggcatacccatcttgcccctcttgccaggaacgccaggcaggccctgcaggggagagacaggggagaggtcagggcaggatgccagcagggacagccaggcttgccccaaaccagcccagagccacccacggcaggaagtcacagagggcctggaatgtgtgccacttgcgtggcggccccagtgacatgcacatcagacggatggcagggtcggggtctgtggtgacctaagagacagagaaatgccagttcctgtaatcagcaggtgcttcataaatgctcaggctccagctgtcctaaggttctctatacccagcttatggaggttacaagtgagttcccatagatacgggctcaggttgggagggggcggggaggaagatcccgaggccaccaccccaggggcttctaatggacctccaggctgggccaggggtctgtgagaagctcccacaccatcttttggactcctctgacttagatacttggtctggaaggacagggtgtcttaggaaatcttagcacccactgcccaccaccaaaccagtcccaccaccttccccagacagccgctccccctggctgctggaactcctgccacctgctcttgctgtccccacccccaaccaacacattttactcaagtaaaccaactgatctgtctaaaagaggaatcagcagatggtttctggaaaggggcagatagtgaatatctttggctctgtgggccatacggtctctgtcacacctactcaactctgccattgtagtgagaaagcggcattgacaatatgtaaccaaatgagcaaggctgagttcaataaaactgtttgcaaaaacagacaactggctggatttggcccatgggccaccgtttgcagacccctgatctatattataaagtgggcccggtgttcattggttgcaagtcctcaagaggctccgcataccctcagaacagagttccttttctaaccttagtcctgggcacctaagacattgccccagggtcctctccagcctcaactcccaccactctcaccctctcacgcagcactttggcagtgttgagtgttaaactcgccaagttaccgtaaatccctgacttcgcacatgctgttccctatgcctggaatgcatctgccttgacttgtccccttatcagactcctactcgactcaagtgcacctcctccaggaggaattccttgacttccccaggctggtgcctggcaggttctgctctgtttgggcaggggtggctgtggatggtgaataaccaaagaagcaaacttactcgttctccatcagaccctggcaggccgaagagccctgggagcccaatgtagccctaggaaagagaagaaagggggtcagagcggtcaagcagtgaggtgtggctggcccaacctgccgcagcccacccaccactgccatcccacatcccggctcctcctcttcctccctggtggcagtggcagctccggtggctcctcgatgacataggccttgaggcaagtgtatatgcccatggactgcatggtgctggcttccacgatgtagtccaaaggcacataccctcacgccagggaagggcgcaggcgctcgccggcaggaggcccgccccacgccagggctccaggacctgcagaaggaagctcgcggctgggttagatgctagcacggcaccaagccctgcccacccccagggatgctggtaggtgcccgtggctcctgccatggctcctcctaggccttcaaggtcctggatgtagggcttacatccacctctggccgcctgagtgctggcattaactaacagcggctgcgaacccggagtgccaacattgtgccaggcacatgcatgctaccacattagactctcacaaggaccccccagattgtcaccacccacactggacagacaaagaaactgaggctctgtagataaagcaacacgactagtcagtagtggagctgtgaattctcttcgggaattcctaatcagttcaagggtcacccagggccagctgactccacagctggggctcgtcaccattctggggctcttccctaggatgcatctcatttcctccctcccagcctttcctcactctgtcccctccaccaggcatgtccttcccatccctcatgacttctgagccaaatccttcaaagcccagctctcataagcgctctccttgggcaagcatccctgataccccaagccggaagcaatctctcccccccatccccagtgccatttttgcacctcggtagcatccttctccactttctcccttgtatcttcattatttgtgttcatgcttcacgtcctcattagcctgggaacttctaaagggcagtaacctcgcccggggcttctaccactatctgcgtgccactcttggtggaatgatttaataataactctaacaaaagctaatgtttattgagcacgaatgataggccaggcctgctgccagtgctttgcatatattaaagcatttattccatccttatcacaccccgaggaagtattatattttattatttttttatttatatatattttttgagacggagtcttgctctgtcatccaggctggagtgcagtggtgcgatcgtggcttactgcaacctctgcttaccgggttcaagcgattctcctgcctcagtctcctgaatagctgatcacaggtgatcacaggtgtgcaccaccacgcccagctaatttttgtagttactttagtagagacggggtttcgctatgttgaccaggctggtctcgaactcctggcctcaggtgatccacccgccttggcctcccaaaatgctgggattacaggcacgagccaccgcgcccagccctgaggaagtattattactcagccccctgtagaggtaagaccatttaggcccagaggggtgaagcaacttgcctaggaccaaacagctgaaatgtggtagaactggtattcaaattcaagtcttctgactcctgggcctgggctcctaaccactctgcatactgcctctcctcaaacaagcaaccaatggaggctcacaaccatctctccttccctggaaggccaagaagccactgagcctcctcgttggcatccagcatgattaatatccataatctgaaagagtgccatttactgccattccaaatagtgcttatctcccagatttacaggtgagaaaataattggctcagagaggcccagtgacttgcccaagctcccacagctagctaatggcagggcaggtctcaaagcctgtcatcctgattccaaagcctgccctctgcctacttcagaaatatgaggctggtggtggcagggttggaagggcagcttgagtgactcactgctcatccaggcttcccacccagggctgtgtggcctgtaagagacaggagtgctggggccagaccagtcctctcctgctatgtgactttgagatgccaccagcctggcaggcaagtcgagcaaccccagatgtcattaacatgcctgtccttctggcaggtcaggagatcaggactggggctggactgagaagacctttctccttgggtttaggg

SEQ ID NO: 1883753 - DNA, 4001 bp, Homo sapiens
gaatgtctagtcagacacacgttttggttgccaggtgctgaagtaagactgatccctgcatttttctttctgtgagctgaggttctgtggactcttcagagtccacagactcttctctgaggggagagaaccctgtaaatgcgttatatattacaaatgtctgatgagaggagacctcgaatactagataaaaggtatgtgtggaggacagtgtgaataccctaacagagcgttcccgcttcactattttacttaagagtgatacttaacttactggacaaaaacagctttgaggttaaaaaaaaattttatcactgctttaaagttcacattaatgagaagtaaacaattgcaagagtcagagtatcctaatcatttagttatacacattttacttttaaaatgcatgatttctgtaattttgtttttgtgtttaggtaattctaggttttaacgagggttctgtgtacctagaaaaaataatatgtgcgtctttcaaatagaacatgaggaaatagtagtatttgctttatggaaccatgaattcctacctcccaactaattttaagtaacatgtaaaccaatgtgaatgatgagtccactttttagtcattaaacagtaattgtaaaatgtagtgagattatcagcccatgcaaacaactgtttaatgctgtacaactcagacatgaactattttgactgttttcagtcccaagaatttgtttaaatgaggttccattctctttattcttaacagatctcaagaatcgggagggtggaaatttgtaactgaaaacatggaattagttccaaaatatgaattgatgttaagagctggggttctaaaaatcacttccttttcttctgcatgtgaacgtatggtcgagtccttaaactttctttctaaacttctcaaaattctggttatatatagaagacccgcagtcacaagggagaaagggtgggaacagaatgtaaattttatagtagagaagatttacattttgcgctttctcactattcatttgccattaacaaaggttatctagcaactttaattttagtttggggggctaacacgggtcttgcaaaagaagtttcctcttgaagcacttgctttaaaaaaagccttttggccaccttcccaggcggtagcgaattaagctgcgcaggcgccttgcttccccctccatcaacatgttcgattggcctacgattgattacatcattggtccgcgcaaccctagcaggcttctgggcctgtagctgagccgaagctcttccttttgcgtagcggggcggggcacgatggtggcggggggggaggggggaattgttctactacgcatgcgcaccggggatggcgacagggcctctttctttgcttctctccacagctcttcccagccggggggctgagtgccctcccccttctctccctgcccctcccctttctcccccctcaccgcccagcggggcttctaactgacagttgtcgccgggccccgtccgtgcaccgcctccttctgcccgtgtcccccgcaggtagaggggggcgggagggggtgtgagggagaggaggagccggagccgccgctgcggccccctccggggaggggagaggagaacccccttcctcctcgccccctcccagccccccgctggcccgggagggggtggggcgccgaggccgcggcgacccggcagggcctggccggtgaagagcaggcgggcggggtgcggaggggtgaggccggcgagggccgtgcgcgcgccgccgccgggggggaggggagaggagggcacctaggctctcctcttctctcccccctcctcgcgcgccatgtaaccccgccccgccggcggtgagctcaagacccccgcgcgcaccgagccgagccggcggctgaggagagccaggcccgatgtggcgggggctacgcgccgcggccgagccgtgaggaagcggctcgcgctcacgcgtcccccagcacctcgagcggctgttccacaccgcccagcctaggcctgccggggcatgagtgtgcccgggacgccgggagcgatggagccggctggggaggaagagcggccgccaccggcggccgaaggagaggacgacgaggaggaggtggcagcggcggcccagacctcagggccggcccacggaaggagtgcctcctcgctggaggacgcggacgatcaggaggaagagatggaggcgatggtgatcggaggcggttgctgcaaggagcaggagctgacctacgagctacagcagggctaccgcatcctgggcgagttcctgcaggagaagcaccggggcctcaccgccccctttctgcagcccttggggggcgttgccaccgcggaggaggaggtggcggaagggccgcgcagcgggggccggggcggtcgcgccttcccgcagcagcccggacagggcatgtgtctgctgcagatggaagagaagttcgccagcggccagtacgggggcatcaccgagttcgtggcggacttcaggttgatgctggagacgtgctaccgcctgcacggagtggaccactggatctccaaacagggccagaagctggagatgatgctggagcagaagttagcgcttctctctcggtaagcgagcccggtccccggtgggactgacagactgacacaaacacacactcacacgtgcccgaggatgggctgggccaggggcctgggggcggcgctgataggtgctgagtcggtgctggagaagcccgggaggaggagcggcgctgggcggggaccggaggggtgtggtgggtgtgggccgaacccggcttgcgcgtagactgagaaggaaacccgagtctgcagcgctgaagagctgggtatagtttgcagatgtaaaatggaatgggtcccgtaggaagaattgcacgtgtaggcagaggaacagtttttgtgggatggaagttggacctgcaacttttagacagttttagcatgacatttaaaacagcgtttaggatgaaatatctctagaaaaataattttggcttatgtaaaaaggtgtcttaaaccattaaaaaataattttatcatttactacccatgtcggtcatcgaagatttatggagtgttactaaatggttaatggttacttttgcatactactgatcttttctctccgtttcatctgaggacacccaatttttgcaataatagggaatgcatcaacacacattttttaaagtttatacatttatgtttattctaccagaaatcataggcaagtcagatgatactgtgctcttggtatccgccacccatatatccaattatttaacacaagaggaggatactaaaatgaatgtattgttttataataattgtatagtctgtgtcagccaagttaatttctaaagtttaaatttttcgggagtggaaaaattcaatgtttttggtattggtagttgaagtggaatagtagtttgactgtttactattagagtgaatttaagttgagcaagtcacttaacctttttggcctcagtttcctcatctatcaagcggggataataatagtacttctctcatagagttgctttgaggatttaatgagttaataaatgtgaaatcaacagtgctgctcccatagttagccaagtataagtgttagccattttaatgtaagtagtagcagtcgttgaataatatgagtgtatacttcatatctgaaacggcattatacttgtgctcttacagaatagctcctagaaattgtgttaattttttggttcttgatttgtcactgtaatttaaaagtaacctttgtcattggcttcccatatgccattttcaagactaacggtgatttttttcaccaaaaacagttaacatagtgcctgtcttcgttaagtgagctctctttaaggaacctcttcttgaatcctttcatagagtaggattatttagtaatagaataattattcacatatttgctttgtaaattact

SEQ ID NO: 1883754 - DNA, 4001 bp, Homo sapiens
ccccccaagaacttcccatggtagaatggggtgggggaggagggcgcacgggctgagcggataggggcggcccggagccagccaggcagttttattgaaatctttttaaataattgcacgtgttagtctcatgtgtcagcaatgctgtgtctggttcagtgatccccacgggaacgcgagccggggggtcgactggaagtgctctgtcccttgagtccatgctggggctcccctacacggggagaagagccggtcagcccatctggaactggcactgtccagcaagtgtgctctgttcttacagggtgtcctgaaggccaaagttggaggcctgagaccacgggctccactgctaagagcgtgccccaggcagctgcaggctgggtgtgggtggcttggcgtggtgccctcggtggcagaggagactgcccgcctcacagttcaggttgcggtagcgggcaacagctggtgtggggcgggggcacatggacaggaagccaaagctgaaggggccgaggcagcagccaggacagggcagcccctcatcgggctcccggggagctgaagggggtggcgagggttctgtccgctccagggctgccgcccggggcaggctatgctgggcccggttccagggctccccagcccagccttgtggggagttcaccaccacagctgggggattgttattgaggacgggtcctgatctaggggaccagggttgggaggccgaggaacaggtgctgatgaagttgtctgtggccacagccagaggcagctggggcgctggccctggaggttccggctcagggctgctgccctcgcactccatcttctcttcagccgaggggcccacagcgggagggccaggacctggcagtgctgtctccatacggcgggggagctcgggggatgagggtagtgagcggcagcggcgggcaggtgtcccaggctggaccagggtctccggagtggtcaccaagggcagctgagtggatgggaatggtgatggtggcacaagaggcaggactggcttgctgggtgtgtctaagagcttgatcttgccacccctgaggtcttcccgtagtgagaaggggttgactcgagtcagattgtccccccagttggggggtgattctggtgatgggggcaggaagaggtctgaccggcttcgggaaagccggggatctggcctgggaagcgtggcagagggaccccctcttgcaacagagcctgtagatagagaagtctggaatcactgtcctcagcatttgatcacagctccttgagggcctcactattctccaggaggctggtgggactagagcttgaaaaagggagtcccacctggtgctttggaaaggggtgatgtcatctccaggccccttttacttctttcccctcctctccctcaagctttagcattaggaaactgtcttcttggagatgtcctcccaccctaccccagcccgacccccagccttttcaactaataaatatacttagcctcccccatgtcacctctgaattctagggaggacaaaggccaaaggactcaagctggatcaaggtcaggctcccttaccctgattgtgtgtcagggcggtcctggtgagtggggctggctcaggcagctgctccaggatccattccaggtgctgggtaatttcggtgaagggggcacgggtgctgggttccagctgatgggtagagacaggaacggcttcactcagtgctccgaaagagggtctctgagtttcctcccatcacctgggtcccacagggcagccatggcagcttacggatgggggcagggtggggcaggaaggagtgtgaggctcttacgttgcagcagtggatggccaggagcaagaaaggcagtgggcagtcatcccccaccagagttcggaaagcaggcacatccaggccaaagtcctgtggggacagaaggagggacctccaagtcagcttttcttgggttctccttctgctccccagtcagaacctcaacctctagggaatcctccttggttatgagccagctagtctggaattctttctttgcaaacctagaaacattcacctcagtgcgtggtaggtagtcagggtctgcaggtactcgggcgatgagctcacagaggacaatcccgaaggcaaagacatcagcctgggggtcagagataatagtgtcggggaagaattaacagttttcatttcagaattttgacagaatatagcagaatttggttgagggtgggggatcttgacagttttcatgtgttagaagggtgcctgtgaggggcaaagggatcttggggactcctgaagatctggtagggttgttttggggatggatggggctttatgagaatacctcaagggtctcggaaggccttggggatctgaagggttgatgtctcaccttctcatcatacagctcaccccgtaacacctctggagccatccagtatggggagcccaccacggccaatggctccttccttgccccctccctgcaggggcaggggcagagtggtcagaagcatcctattcaggcatcccccccaggcaaaaggggatgaggtgaactccctccgttccccaagggaaacatccctggggctctggggacatcagataggggcactctgggagatttggggggaacagggacattcatctcacctatacacaggaatcttttcggccagcccgaagtcacccacgacagcggtgaagcctcgatcttcccgtcggactagacagttctgacacacacacacatagtatccccacgcactcatcaccttctgctgtctggcctcccaatgtataacccaaagccctgtcactccagcataactccaaccctctctgctctcccagtttttcaaggcacttcaatattgcaacatcatccaacactccaaacacagggtgctactcagtccctccgagcactcccctcaccctggtcccccaatattctccaatgccttgccactccaacatcctaatatatctgttatccatattccaacatccacaggccagttacaacctaatagcctcaaaccctctttcatgtctccacccaccctgctagcctaccttggatgtgaggtcgcggtgaaatacacctttggagtgcaggtaccgcaggcctcgggcaatgtccagggccaggtggagcctgaccggccaggacaggggttcaggggagctgagcagctgttccaatgtccccccattcatatactggtgcataggaggagaatgggaatagatgtcagacttcagtctgtattctaggtcccccacttacacgctaggggacactcccgaggatcacagaggtcataggggtaagactgtgctgtaggaccccccccatccatgttctaggattgccccgttcaactcaatagccattagccatgtgcaacaatttaaataatttaaaaaattttttaatcaagttgacccacaaaaaataatctaaacaatgaaaataatttaaatttaaccacatgtggctagtggctactgtattggacagcacagatagagaacatttccgtcactgaagaaaattctattggacagcactgttctaggggatacagagaataagaccagttgaggccttttatatgtggtttgcctaaaggaaagttcaggaaagcctcccctgagaggagatcctgttgcctctcactagtcctccgtagatccaccaggcctgttgactccctttatccttgggggtgaaggggggtggggatccctccttcctggcctatcctcacctctgtaagagcgtgcagctgtccctggtgcacacagactcccatgaacctgcaagaggatggggaagatagaaggataggctattaaaggcctcagctcctcctcagttccacttttcccgcgggatctttccctttctctcccgcccagcaagctgcccagagactggggccgctcaccttaggatgttg

SEQ ID NO: 1883755 - DNA, 4001 bp, Homo sapiens
attaattttaagagtaaactcatcctgtcccctcttaatactctactgcaatttattgatggctagaatatttactgacttaaaaaaggtattaaatacttgtatcatgaaattacattcttattaacaataagacatactgtgtaagaaaatagctcatgtgtgaaatgtgtctgaaatgcattttttccttacaactatcaaaacatccactcacactaaaatgaaaccactcccaaccccccctgaaaaaatgttaagggaagacggggtgggctgggggaggagcaaggaaggaaaagatttagctatactaattacagcacagtgattaacaatggttcaagacagaaccaacaagagttggtcaaaaagatgccttcaatacatggctacaattaaaaaccaaactcagccgcttttggttcattgcagtgagaccaaaaaaattatctctcacagattcatataaatactagactccagctcttatatcatttttttttaagtttttctgtttgtttctgcaaggcctagctatcttattacaatttatatttgctctgcaacaactacaagaggtaggcataaagcatgaaaaagtttctcagttagtacctcgccatgtgttgttcactgcacaaaaccattcactttggacatgaatagtcattccttctattatcttctaaactctaaagcaaagctgctgccacccgtaaatgttctaaaagagtgtactcacaagtaagaaactttctctactgaaggatactgtcacagagtttgttgcagagcatctatatatatatttatttatttattttaaaaaaataaacaacaatgatgaacgaacccaggttcctagaaccaattctcttgattctctacttccacaaaataaagtgtatcatttggccaagactacagatgtgttttttttttttttcacagatgcaagtgccatgcaaaaataaattaaagaacagataccaaaacatacatgtgataaaactacagaaggtagatttttaaaagcatttatataaacataatttataatacttctcttttttcctttatatacagtcacaaagctgtagttatacatctaggatttcctctgctgtacccccacagcgtaatctgtagcgaccagttctccagcttatagttgggtcccataatgcagacaaaaaaatgtatattgtcatggattcgcggatgaaccaggcgactgcataatcaagttttgaaaaacacagtgtgccaccctaggaatggaaaaaaaaattttttaatttcactcactgtcaaactaaagacaaggttaaaaaattaaattcttggatttcacttttctaagtatactatgtaaaatcaagtctgcttccttatgtaatttaactgccatgttataccgttcaagaaaatgctaattgttaatgaagcattaaaataactgctatcttaatgtcttattagtttcaatactcactgatttaattaacttcatgtttttggaaacttaataaaagcgattatataaccaatagaaagttgcaaatcgacttaagttttgcatcaacattccactagagaaagtcatgttcaaacccgagactaacctacaatgggaagctgaagaatggctcagatacatttccttcaactttttctaaattgaaatagttctagttccaccaagggactgccaaccttttcatgcctatccacatacctggacacccctgagttgaatgtagtcaaatataaaccatgccaggcaatgacacatgaaaaataccataatatcccatctgaacacatggtgggctgcccatccaataattaaactggcaacaaagcattctgaaattggctcacaaattattgtagcaggaagcatgttaattcgtagtttggtccacctggaaaaacaaaaaggattttctttaaaacaatatcctggctacaagacaaatccttttttttttccctcaaataatcaatttttttaccctgtgatagaaagaccattctctttaaactttttttgttttgtttttttttttttacttgagacggggttctgctctgtcacccaggctggagtgcagtggcactcactgtagcttcaatctcccaggctcaagcgatcttcccacctcatcccaccaagtagctgggaccacaggtgtacacgccaccacacctggctaatttttgcattttttgtagagacagggtttcaccattttgcccaggctggtctcaaactcctgggctcaagcagtcctctcgccttggcctcccaaagcgctgggattacaggtgtgagccaccacacacaacctaaaaattttttttaatgactctcttttctatttttgtctaggatgtcaaagaaaaatgtctttaaattcatttgtatggcctacgctctgatgaatacagataataaaatttaatcagcacagaaagttagaaaataaagatcagcatattaaaaaattcagtctcaacatttctctaatgagtgctttcagtgttatacagcaaataaaatacatttagacattaaatttatcttaaacacagacgttaaactctattttctgcaactaaacaaaaatcttcaacctttaggtacattcatttaactacattaaacctgtaaaaattaccacccccctccccactttccttttaacgaagtataaaaagaaaacagttgatttacctgatcattctggattgaaactgagaaattgaatatgagccagagttttgcattgcaacttgagtggacattgcaaacctccaacctctgaaaattaagataattagaaaataagttatgatgatgaacacatgcaagcgtaactggttatgcattcagtaatcattataaagaccaggcaactgccggtattcagggtgagcccagctttcatgattagcacatgacttaaggtctaccatacgtatggatgttttagcaattatgctggcccgtgacagcaccatctaagaactagaagaaactgtacccaccttactttacaatttaagaaacttaaaatgcagtcattttgaaaaaaaatggagagggctccatatttaatagattagtctctgatgactactaaccaaacaacaagacatgtaaacagaaagtggcattatggatctcatgggagacactaggaaaccatgaaccacatgaacacaatcatgacagaatttgtatttaaaacacacttcagtttttaaaaaatttaaaagaattctcacacaaggcagtgatctcctttaaaaacaagtattttaggctggatgcagtggctcatgcctgtaatcccagcactttgggaggctgaggcgggcggatcacgaggtcaggagttcaagactagcctggccaacatggtgaaaccccgcctctactaacatacaaaaaaaagtagctgagtgtggcggcgggtgcctataatcccagctacttgggaggctgaggcaggagaatcgtttgaacccaggaggcggagactgcagtgagccgagattgcgccactgcactccagcctggatgtcagggcgagactgtctcaaaaaaaaaaaaaaaaaccaaaacaaaacaagtattttgtgatagagaaatgctaagtcagtcatatgaatctttcagtggcttcttagcaaagtatcatataattcactgacaaatttcaaattttgaaatgatagtctttaaattttcacctactagtttatgactgcactgatagttttaattcttctaaaacacagaaatttgtatctatatagtaaaaattctaaacacagagaaacttacttttaatcgctttaaaacacattaatttgaaaaatgtagaggaatcagaacatttaccttcttcattagtacatatctacaattctataattagaatatgaattactctataaaattattgatctgctgggtgtggtggctc

SEQ ID NO: 1883756 - DNA, 4001 bp, Homo sapiens
ggcccagccctgagagacggccctgagagagcccctctcagcactctgccccagcgcggtcagcactagctaaggtctgagctcaactcctccagacagggctctaccagcaggtgaggccagctgcatccctggacccagcccccagcccaggccgggcaacctggccacgcactcccatacgcctgcctcttcaaagcctctgcagctccaagatctccctccccagggtccccctctccagggcctccctcaaccctcccagcccatgtctgtccttcctcaaatcagtgcccaccgcaggctctgacagcagcaactggggctcagagaaggaaaaccccttgtccgggtcacagagctggcctgaggccccaccgggttcagactcagtctctgactgggccctgcacctcctgcccgctggggccacatttccccagtacagtgaggggcaccccctgaaccctcagctgctgggaggggttcccgggggctctgctgtctctactgcagattgacagggggggatccggccatgggtagaaggtgccgtctgcctgcagctcaaagccccttacctcaggacgggcagccctggattctggaggaggcctttcctctggcctcagacctcggccagacccaggtgccggggaactggaaaggtgcttcatgaggctcggtggccagctgcactccccacctggcccaggagctgggacaagccacagccaggtgtcgtggggcagcaataggagggccaaggcctggccacagaggcagccacagagagcagggaccccatggcactaggtcaccaacccttcccaagtccagtccctggacaccccaaccatcacaccgaggggcccgtcctgtctacctcccagcctgcagcctcctcccagggggggccgcccacctgacaggcggcatctgctccttgcaaccactgggtcatgggaggctcctcacttctcatggccaccccagcccctatccgaccccaggcgaagtccccagccctgatctggcccctggctcctgacccaggttctccaggagaacccgggcaggaccccaccctacccctgcccccaggccaagccacgggcaggccagcctcagcacgccagctcacagtgccccggccacccccactcccatcctgggatcggcgtgactcacggggccggcacgccacctccggcctacaccgcggggggccacccccaacacacgcacctgccctgacttgccgctggtggacggtggcagtgccaaggccacacttggccctcaggcggcacgactgaccacgacaacagaggggctgcaggggagagggcaggaagattgtgctcaggcagggggcacagaaaagggagcccctgctgggcttcagtccctaatcctgaagctccgacagccccgaggcctccaccaacccccaggggagcaggctgggaggccagagtctcagacccagagaccagcaggcctccaggctctgccatactggagagggggctggagccgccaaggccagatcccagggccactgcccctcccacacaaggccccagggttggagctggggaagactgagctccatccttaggggcagctgggcccaggtccctacagaccacaggcacagaggggctgagctggacccacgaacccgcccaggctgggcctcaggttttctcatccgcatactggggctgtcctgctacctcccaggaccgcagggtggggtcagagaggggctggagcaggagggtgagaccctgcggctgtcagggagcacaggagcatcacccaaggcctggagcaagccccccatgaggccgagccaccaagaccctgggccacggccactggcagtgcctgccacagacggtcagtgatgggcagcgactcggtcctgggggccctcctccacttcccggacacagacacagatgcctggatggccaggaagtgaagggaggccccatctcagggtgccccagaagcagctcaccacaggacagccagcctcccctcccactgtctgtcacggagcccccagccctccttcatccccaccccatgcacagggcatctgtgccctcggcaacagctgttgctgatggggcaggcccgagccccgccctcagggagcccacagggatcaggaaaggcccagttaagcacggacaagcaggtccaaccgagaacagcataattccgggtcctgctgtgcagaggaggtgtggtggggaggagctataaggctggaggagccgggtggccccacaggctgggctgcatcccaggagctcagctggcaggcaagtgacccagcaggagctgcatttgctgactgacaaatgggtggcggctgaggtccacccccaccctcaaggagggaaggcaagagacgtgtgttcccacccgaggacagcagcaggacctctcttccgggcacaggatgaagcaggacaatctgacttgaggaaacaaaacaaagtcacagccaaggatggtctggctcctgccctccaggctccagaggccgctcctgaagctgccgggactcctgcaggcacccctacaaggctggggtgcttcacagcctggggtctgcgggggcagcctccctcggcaaaccccaactccaggctgcctttgggagcaaccggacggcacgcgctgcccagggtcagagctccctacccacccctcctgtgactctgagcggccgacccagcctaatggccacagtcctgaggctggcaggggcagggagggccaccacttcggtaccttccccaggtactgctccttggggacaggtgacaggggccacagcctattccctcggcacccaggaccctgcctctaagcaaataaaccaacaagcatccacatttgcctccaggccacaggacccttcgggaccaggccagctctgttcaccagctgcgttctggaggcagatggccacagccctcttgggtggcaagggttaaaccacacagtggtaaggaccccgcacacaggcgctggccggcacacacgccttcaggtggcggcagcaaggcagcaacaccagcaccggcctggctccccagcgctgacccagcagacagagaactcgcctctctgcctaggatgacagcatccagccagggactcatctcccaggaagcagccggggtggcctggcacttccagagctctgtgccttgcctgtgccctctgccccggccctgcccagaaccctgggtggctgccagcttcctgccgagctagctcctcgtcgccagccacagtcatcgtgaaacctgctcgccacccagggcaccactgtgcccccatggccaccactccaggaggacagcacaggggccaggcctgggtgtggccgacgctgagctgcacataacctgccccagctcggcccttccgcacacacctggattctcacagcccctccaaggggggcagagcaggagggtccccactcagcaccccatcagctcacgcaacgtcccccatactggttctgatggaggtgggtgtggaggggggcagcgagatggcttcctggggacagaagctggtctgcagagcacgagggtatgacagatcaaaacgcacacacagacggtggaaatcgggcagcagctggaagtcagaataaaaatgttacatctctgcaagagtagagtgctcctccctgacccccacatccaaactgacctctgttttcataaaggccaacaagagacagaagtggtcccggagagggaagttgggaaaacggatatctccgaggggtcgcgggagctgggggtgtgggtgtgctggctgcagggcacacacacacggagacttcacccagctgtgcaggaaggacacgcatgccttcccgagcggtgatgccagcacacgcagggctgagttctaaggagggcccagccccacaactgtgctggacactgggg

SEQ ID NO: 1883757 - DNA, 4001 bp, Homo sapiens
cagcctgaggtggttccttcaggaggtatttcagaagaaggcattcttatcatgagtgttattacccatgaagaccttccagtgggacaagatatggagggggaagacagtgatattgatgatccagacccaatgaaggcctaggctaatgcgtgtttgtctcagtttttaacaaaaatgtttgaaaagttaaaaaataaaaatagaaaaaagcttacaaaattacgctataaagaaagaaaatatttttgtacaactgtacaatgtatttgtgttttaagccaagtgttattaagaaggaatttttttaaattcttgaaacaaatgaagatgaaaacacagcacaccaaaacctatgggatacagcaaaagcagtactaagagggaagtttacagcaataaacacctacatcaacaagtagaaaaacttcatataaacaacctaataatacatcgtaaagaactagaaaagcaacagcaaaccaaacccaaaattagtggaaaaaaagaaataataaagatcagaatagaaaccaaaaaaactatagaaaagaggaatgaaatgaaaagttttctgaaacgattaaaaaaatcaagaagcctttagacaaagaaaaaaaagaggaatgctattacaaaagagtcaaaattttttaaaaaataaaaagtatataaagttaaattacagtaagctaaggttaattcattattgaagaaataaaaaaacttttttataaatttagtagactcttagtgtacagtgtttataaaatttacagtagtgtatagtaatgtcctaggccttcacactcactcactgactcaccggagtgacttccagtcttccaagctccattcatggtaagtaccctagatagtgtaccattttttaaattattttagaccatattcttaccatacctttcctatgtgtagatatgtttattatttatttatttatttatttagagacagggtctggctctgccacccaggctggagtgcagtggcaccatctcagctcactgcaacctccgcttcctgggctcgagccaatctcacacctcagcctcccgagtagctgggactacagacccgtgccaccatgcccagctgatttttatattttttttgtagagacaggatttcactatgttgcccaggcaggtctcaaactcctgagctcaagtgattcacccacctcagcctcacaaagtgctaggattacaggcatgagcccccacacctggctttagatatgtttagatacacaaataccattctgttccagttgcctacagttttcagtacagtcatgggctgtacaggtttgtagcctaggagcaataggctctaccatatagcctaggtgtatagtaggttgtcccatctaggttcgtgtaagtacactttatgatgtatgacaacaaaatcatgtaacatcacatttctcagaatgtatccttgtcgctaagtgacatatgactgtaatttgttgatatccagattcttagaagtctgcttcacaacctaagacaagctgtgggaaattccaagggtatctaaactgaaaaccatgagcatgagctcagggtaatgaatgccttcctcaagccacagtgtctaccacccaaatgtttaggaaatgcagggtgatcagtgctaagtcttggcaaatattgtgattgtttcttagtagaaacctacaatggtagtagcaaacatatggctgccatcctgggtccttggcctaagtacagatgtcactaactgacctattttttacattctgcatacagtatatcacctgaaggccaagaaaatgagcatggttttgtggagatcaccttccctgtattgccataacaacattcctactagtttgacaactagtaaccagagtggctccatgaagtagaatgatactctaggaagcgaccatgatgtaacttcagacttttggagagtctgtgaagttacatcatggtcgcttcctagagaatcattcagccattacaccagtattatgacaaaacttatcaaatctgactcccagccaacatggagtaatagggactacgtataccttcccacctgaaacaacttaaaaatagagcaacatatatctgaagcattttccaaacattaaacaaagagcagtccaggccagtgatccctgaaaggggatgcaaatcaaatgcccggagagacctgtgattgacctgcttactccctcaagggagttgcagtgaggggaacacaggcagagtccagcagtctccataagttgaaaagatacagctggaaatctgaggacaccaaagagactagtgttcctagggcagagtacagagaggtgagagctagcccagaggaacccttccagagatgtgaagtcttccactgagtactggatagcacatgtatgtaagtaaactattaatacttgagactgggaaaagaactaacctaaaggacaaaggggaaaacaaagcaaaacaaaacaaaaaaaacaggtctctggagcttaaaaaagaccaggaagagtttgtgttccaccagtcagagtggaaaaccttacaattcacagggcatctggtagagtactcagaagagcattagctcagtagaggaaaataattagccctaggctaaaggctgctgtgatcccatttaataaagcttaaaagcaagcctttctgaaagaattaaactgcgtacaataacttgacagtgtctcagataacccaacaaatgttttaggatccaatgtaaatttaccaggtacacaaagaaacaggaaaagttgacccataatgggaaaaatcagtttattgaaaccagttcagaaatgacagtgctgatatactaataaagtaggtgtttaaaaatcattatacctatattctatatgttcaagaagtgagaagaaggattaaccatgtaatgtagaaacatagaagatatttttaaaaacccaaatcaaacttttaaagatgaaaactacaatgtgagagagaaaaaatacatgacaagggatgaatagcagattagacattaccaaaaataattggtaaacttgttttcaaaaactgcaaaaagaaatagacaaatccacaattgtcatccaaaatttcaacacttcaatcctaaatattagtttcaaaaatagtagacagattacaaattaaaatgagatgcctctacatacctaccaaatgtctaaaacccaaaacactgacaacacccagtgctggtgagtgtgtggagcaactgtaagtctcattcggtgctggtgggaatgcaaaatggtacagccactttggaagacactttggcagtttcttttaaaacttaacatactgttgccatacaacccagcaatcgtgccccttggtatttacccaaataagatgaaaatctatgtccacacaaaaacctgcacgcagatatgtataggagctttattcataattgccaaaacttagaagcaaccaacatgttcttcaataggtgaatggaaaaaaaactatggtatattcagacaatggaatattattcaacaccaaaaagaaatgagccatcaagccatgaaaatacatggaagaaccttaaatgcatataatatataactaaatgaaataagccaacctgagatggcatatgtatgatttcaactctatgacattctagaaagggcaaaactatgcaagctataaaagaatagtgaatttggggcggagagggatgaataggtggaacacagaggattcttagggcagtgaaactcttctgatacagtatagtcagccctttatatcacaggttctgcatctgtggattcaaccaaccatgagcgaaaaatgtagtttggcctatgtagcttttgtgctgaacatatgcagacttttttttcttgtcattgtcccctaaatgatacagtataacaactacttacatagcctatacagtgtattaggtgtaagtaatctagagattat

SEQ ID NO: 1883758 - DNA, 4001 bp, Homo sapiens
tccaggccccggcaagggccaggcatggaacatatgctcagagcgatgggggtcagggccaaggccacagagcaagatgcagaggagcccaggctgggaccggttctgcctgaacatgagcccctcggagcaggggccccgccactcagcgccgggtcctcaggccaggcatgccctgtgcgaggaagggccccgggcctcccaccagagctagaggaggggtggctggcaaagggaggctgaggaggaacggagggttgaggggctggggacttgcggccaggtaggcacaagcacatgaatcaactccaactggaagcagagaaaaagcagtaaaaccaaatgtccttagaaattcctttagtgctcagctgtccatgaaaacaggataagcggcttcctccgtctgtgctcagcagggcagggtggaggcgctgcgctcaggccaggaggacctcgaatcaggacggggtggggcggggctctgagctggggaagcggctccagcgttgctactttagggcgtccaggtgggtgcagacctgggagaagacactgtccacggagccctcagcgttgacctgtggggagatgggccgtgagggctgagtcaccaggtggagtggggtgggcctcaccatggcaggccccagagaccaggcctgcctccccgagcccaacctaattgacagcagcccctcattgaaccagtggggaaaccaaggcccagagagaggggctggcctgaggccacacagtgagctgaggcggagccacataggaacccgttcttcccggagctgcccctgggcccgcggggcccaccttgcgcacaatgccacgtttctcatagaaggcgatgacaggttctgtggccttgtaataggtctccagccgctttttgatggtctcctcattgtcgtccacacgcccgctggtctctccacgtttcaagagccgctgggtcatggtctcagggcctgcgtccacatacagcagcagtgtgggctgtccaatctgcaggcgggcaccatgtcacagggaccccattcctgccccctagggccatctcctccccatcttcccatctatgaagccccagtagataccccctcagaccttcaatcccttccccaaggcagcctgaaagaccttcctaaaaccaatctttcctgccactcccctgctcaaacctacaccatggctccccagtgccctcaggagaaagtccacactacttgccagactgagagagcctgactctctctgctctaggctctcatcaacctccttccatgccagacctgtgctcatgctgttccctctgctaggagccctctcccccgagcctgatcctaactcgccttcacctcaataccaagcatcaggtttcagtgcgaagctcacttcctcagggcagtctctctgatgccaccccccgccccccagtactccccgcctcctggaacaggctcttccagcgcctttatctttccttaagcaggtctcccaagggcccctgagggcagggaggcacttgtctcacaattctggggtcctttgacaaaggaacaagggatgagggaaggggtgaggggctgctgagtcctggggggttctgagcaatgtccgtgtcattggaacagcatgtcatccatgtcatccatgggacgccttggaaaggcaagaggaataaggttctgcagcccctgcctcgctcaatccagctaccacagctgcctggttgggagggcagagccaccccagagtcacccatgactgccacagctttaggaatgggattgggaccttcaaaccctgtctcctgcttccaactgcctgggccagcccccaagggtttctgcgcagctttggccctggacccctgtcaaggccttggggcactgcctctcaggtcaggctgtttcgtgcctctgtccagctgtgtaaccaagaggcttgtccaaggccacacagctggacagaggcgagaagcagcctgacctccggcgtcagactgacctggacccaggctcacccctgcctctgttcagctgtgtgacctggggcaagccctttgtcctcgcctgcgatacccatcctagcgctcatccctagctcctccgtagttaaggattcagggtgacagcgtcagctgccttcagggagatgactccgtaccacccagcggctgcttctaccttacagattaccatgggggcaaaggctgggcctggatgcagcagtctgacctcaacttcaaggtcacccaccccccatcatcatccatcagctgctgagctcctccagggcacagactcacagtctctggttcatctgggtctccaggaccaagcacagtaggctctttacacacacccagcagaggtggtaaatctgggagagccagctcagcctctgggcttgagattctggctgtggggcctcagtctccctgtcaggacaatggacatctagcccggggagtccacaacgggcactgccagtctccagaaaagctttgggtgtgagccggccacacttccaggctgaccctccctccttcggtgaagccctggcgccccctggtgtccagagccaagaagaccagctgcccggacacctggaggccacagcagggatgggaccagggctgagcctgcggccctcagcggcacctacaacagccctggaagggtggggactttttttttttttttttttgagacggagtctcattctgttgttcaggcttgagtgcaatggcgtgatcttggctcactgcaacctccgtccagccaggttcaaatgattctcgtgtctcagcctcctgagtagctgggattacaggcgcccgccaccatgcctggctaatttttgtatttttagtacatgagttttcaccatgttggccaggctggttttgaccctgacctcaagtgatctgccctctttggcctcccaaagtgctaggatctcaggcgtgagccactgcacccggccgactttcattaactctattttctagatgtggccctgagggtcacaggtggtaccacacagctggtatgtgtgagccaggccaggacatctttcagaactgtggcacctaacacagggtcaggggtctgaggtctgaaggaatccagctaacccccatttcagatagggaaggtgaggggcagagtggggtagacactttcctgaggtcttgcagccactcatgcagccactcagaggtcagaaaatatggcctcctatccccagatgaggctggaagctacggaagcccagaaggccctacggagacggggcatgggaatggggcatgggaatggggcatggggatgggagtcttatcctgccccagcccaccaggatgctggttaggctccccctagcccttgccgacctctccctcctaggcccttgcagtcccgtttatttctcccatacagccttgtgacaccgaggtaaaagtgtatgtgtgtgcacagggccatgtgtgcgagcacgtgtgcattcctgcatatgtgtgctgcgtccgtgacatgcatgtgcaggagtgcagtatccactgccgtgtgtgtgcatgtgtgcacatgcccctggccttgtgtgtatgaacttgtggggcttgtgcatgtgtatgtgcaagcgtccacgtgtgtgcgtgtgtggggtgccccatcctggggaaggtgtatctgcaggatgctcgtgctaggaagctcagggccatcattttccaggcctgctctttccagccaggctcctcatgacccctggaaggagactgatgtccctttatggcatttgcagcctccagccaggctggaacctcccttgttgtcctgcccacatattctgttctccccacactggccttgcctttccagccctgccagtgctgttccctgcccctctgtgtgtttatagggagccaaggcccacactggaagggcacatcctctccagtccccacactgtcccttaaggca

SEQ ID NO: 1883759 - DNA, 4001 bp, Homo sapiens
ggctgtgggcccagaaggcatggaggctggggaaagcggaagcaacccacagatgttcccggggctgcccctccaaggctgcccagcctcgactcggtttcccgccctggccccggccgacgcaccgggcatgcagatgcactggaactccccaatctggtccaggcaggtggcgtcgttctggcacgggttcgagacgcactcgttgacgtcgatctcgcatcgggggcccgtgtagccctgcagacactggcactcgaaggagcccagcgtgttgatgcacttgcccgcatgctcgcaggggttggcacctggcgagggcacacgggtgagaggctgctccaggcaccctggcccctgcaacacctcactgcacaccacccccatcggactggcagggtcccatcccccatctaactgggcaccccctgaagccagaatcgacttctcatcggttctggggccaggctgccacccccacctggccgcaccccctgtgctggcacctacccagcgagcactcatccacgtcctggctgcaggccgggcccgtgtaccccgaggggcaggtgcagatggccttgccattgacagggttggtgtcgcagttggagccctcgttacaggggttgctgatgcatgcgtcgttgaggtggcacagcagacctgggcaggcagcggcggtcagtgggcacggcccctgggccaggcatggcacaccacccacggctggggtccaaccccactgacaccccaggaggagctgcccgccgtgaccccgtcgggcatcccgtgacacttgggacgttccgggggactcacagcgaccaccggcctccctgaccagaaaggccctttcaggttatcctgggtgcaggagggccacagtccctgggtgaggtcacacagctcaggcctggcccatgtgagccccctgcgcccacctgggcctcaaggcactcacctgtgcggccatggggacactcgcagtagaaggaggccacacggtcatggcaggtggcgccgtggaagcaggcggcgctggcacagtcatcaatgttctcgctgcagtcctcaccagtccagccgttgacacacacgcagttgtagccaccgtgggtgttgtggcaggtcccgccgttctggcaggcatttggcatcagctggcactcgtccacatcctcggtacagtactgacctgcagggaacaggagctgtcggccccgggcagctgccactccctgagctccctgtcccctaagacgcagggtggcaatgccgccccctccaggaagccttcctgggctgactcctccacccaccgccagcctaaatcactccttcctctgcaggcccagcaccatggagtcttgcctcctctttgtgctctgtggacactgctgcgtcggggtgcacctttgcccgtcaccccaccagagggtaattcccgaacacagggcctgtctgttcatccaggcatccctgtgactggcccaggaagcgtggcctgagtggggtgctgaaggccctcaatgccaggacaccccactgggcacaggggctgcctggagccaggttgcaaacggcccacacagaccaaccagggccctgtctgtgctgacccccgaggtgaggggcaccagaccctggccacgggaagtggggcccccatcatgttgtccttctcggccaaccctagtctgcctggcctgggacagggtctcggctgctccccgctatgcctgtgagtgcagtttagtaagtgggtagcagccccgccccggctaccccgccctgcggcgacccgtatacgcgcctgtccactctggcgggcagcggcagttgtaggtgttcacgccgtccacacaggcacccccgttcttgcagttgtttcctggacaatcgtcgatattttcctcacagttctggccggtgaagcctgccgcaagaggggccgggtcagcctcttccctgaggtccagtccggctcctgcctggacccccgacacactgctctggacacaagagcctggcctccacggccctgccctggggcccccggggtctgtgcccgtcccctgcctcactccagtgcccagagggacacgccctgcttgaaagaatcattttggacaggactggctaaacagggactcaggaacacagggttccagaagattctgtcacaaaaacccttgggtctcttttaagaggttccggcagctcctgcacctgggtgccgcctgcatgctcagagctccctacaatgtctccacaggggggccgcacaccccatcttcaggggctgacactggggcctgggctctgagcagcagggggacatggggccagcaggctgctggctggggcagggtgggcccctcgcagccccagggaagctgcagagattcagatggcccatcctccctggggcagagctctggtgcccacctcctcctccccctcctcctccacaggctgccagggccccctcccccgaggtatggccccacccaggcctccaaggcagccagttagctattaatccactcaactcccgctggttcaatgatcaacccagaaaggcgcgttcggcaacagccaaacctgcagccggttactaattgccgccctcccgagatgcctttgaacccccgttgcccttggagctcccacctgctcggcccctccctctgagacattgccccaccgccaccaccccgtccgttctgtctgtctgctggaccggagcaaaagcaggcagccagagacaaccaaaatccaaaatgcaaatcagcttggggagcacccaaaaccagaccccagccctggcgcggtggctcacgcctggaatcccggcactttgggaggctgaagtgggtggatcgcttgcgcccaggagttcaagaccagcctggacaacatggcgaaaccccgtctctacaaaaaaaaatacaagaagtagcaaagcgtggtggcgccggcctgtggtcccaagctacttgaggggctgaggcagaaggatcgctttagcctgggaggtcaaggctgcagtgagctgagggcacgtcactgtactccagcctgagtgacagagacctgtctcaaaaaaaaaaaaaaaattcagagcctggagcctgagtcccggtcccactcatgtgtggggccctgcaccccggctccgaggcagatggggcccctggctgggcctgcgaccccagggctgccctgcaaagcactggctgaggcacacagtgggggagagggcgggaagccagcgagagccccgtggaccccagctggaccctctgcgacgtagcctcggccagcgaccccacgaggagacagtgctgacgtgccaggcaggctgtgcgaccccaaatcccagccagttcccgggcctgcagagctcagggccgcccccatctcggttccccgtgactccacacacagctgtctcctgggctcctgaccacccagaggtggctgagggcccttcagggggcctgggtgcaggggccgccggggacagtctgaagctggggtctggcaggcctgagtcatttggggaggcccccggatggtcatctcaccctgaaacggccagactccacagcaggcagtgagcacacccctcaccggacgggtgacccagcccccagcaccccagcctctgagatctacccacactcaagtgagtgaaccccaccagcccctccccttccctccctgcccactccccagggccctgagctgcccctgcacgggcagtggctctgagccggcccagcacccctggcatctctgccgctgggcctcaccaggaggtcctcacccaccctgcccaaggcgggtgggcatcagctctgcacacaggtggccttggacaaggccgcacacaccccacctgccctagcctgaaccacggccccccaagagcttggcccctcaatccgtgtgactggaggtagggtcccgtgctgctaggaaggcatctgagc

SEQ ID NO: 1883760 - DNA, 4001 bp, Homo sapiens
gggtccgcaggaagcccctccatgaaaccaaaggggcgtcaacattctgcccagagttctgtagtcagaaatggggggaaggggagcagcagggaacacgtcctgcttgaagcagggtggggtggcctgatgtgccgcctggacgcagtgggggaaaagcagagacaaagtgggctactctccaaagcgttgccccccaccctggaggctcactgaggagtctggcagggcagggccccccatccagccgccgagattgcctctgttcaaacccgttctgcaagggggcagagctggacggggggagggggggtggccacactcagctcccgcccgtgggaaaatgcgacagctgctcgcccgctaccccgcccgccaacaaagcgccggcctccgcctcagaatcagagcggcccattgtggagtcggggccgcctccaggggcaccgggacagcaccctggggacgcggccccgcctccgccgacacccaatacctgcctccgcgggcgcgcatctccagggcagcccccatacacccacaggagggggatgaaggtcccccattcggaaggaattcgaccccatctcgagaagggatcaattactcaagcccctccctccccatcttaccggggctgagaaacgggggaggggggtgtgacacagagccgcactttctggaagaggacagataattctcgcctccaactctcggagaaagagtggattaatcactcgattccccagagaccccgctcgctgtgcggcggggagaaatgtaagagccccccacccgcgtcccgctctccgcccccaagctttccaaacttcaactccgcaaagcaaaaggaaagttcagtccccccgggcgcggcggcttcttacgcaacccctcccccaaactgagagccgggctggggggcaccggcgggcggggcgaccgggagcccggggacccagcccggccgcgcgggtcagtgaaggcgaacgcggcgccgcagagcccacactccgcgccccaacatccgccccggcgtgggccagaggcgaagaagaaagaagataaatggcccggagaagcaacaggaaaccaaaaccgactctattcaaatcgaaaaatagtaggcagcccgcccgcccggccgaccggcggcaagccccacgcgcggcgggtgaagggcgggcccggagtagggcctccggggccccagcaccccacaccggcctcctaactcggctccaggcacgggcggcgcgagtccgcctccacggggggatcgagggggaaggtcggtcctccctgatcccgggactccagaaccccacgccccgggccgcccgcttttccctctccatgctggcctccccgccgcccgctcccagccgtggggcgcgcgcgccgggcgccgccaaagtttccaaagggcgcggaaagtgggggctcgcgggtgggtgggcgcctacctcgtgcggcgagcgcgggcagcagcgccaggcagagcaggggcgccaggagcggcggcatgcctccccaccggctgccctctgcgcccgggcggcggcctcctgcgctggccggcggggctgggacgcacacgcgcggcgtacggtcccggggcggcggcggacggtcccgccctctcttccccggctggctggcggcgctgtgctctcgcaggcccccgggcccggctccgcgcccggctcgttccttcgctgcgctcgcgcccgcgcccgcgccccgcgccccgcgcccttgcgctccctcccgcggccgaggcactagtgaggctcagagtcgaggtgcgctccgcccccgccggccccgccccgcccggccccacccccgccggtccccccgccccctccgcggccacctcctcccgcacgccccgtccgcctttgcgcctccccgagctgagccgcgcgtcccgagcccagcctctccggggaggagggacccggcggcgcggcgtgggtcgggagcgggcgcctgggactacttctcgtttgaaagttttcagaggccaaaagtttgagccggggctgcggaaggatccggctctggcggttgccgcgctcggcgacaactggcgactgaaatttgcatgtgaataagcggaggagcccggggcggaatggggagggcgaggccgcggacagccgtgtgcaccgtgcgctgggccgggcggggagcagctgaggccacgttgggggaccccgggcccggggcagggctctgggagagtggcctagccgtgtgtgcgcccctagcccagcggcttcactccctcccgagggccccgtggccgcggctttaggcgtccagaggatcgatcgccgccagacatccctggccgtgattgcccgagcacttgaccgcgagggatgggggcgccgcggcctctgggcaggggactccgggcgccccgagggagcagccgggaccagtgcctcgcggacggattgtgccccgctcccccaagggggacccgcgtcgacacgctcctcggtcaccgtcctcctcctgcccgggcgccgcctgcctaaggtggccccagaaagcacaaacgggtcgggcggatctgccgctggcgccggcgcagcccttcccacgtgctccttccggctgatttatttctccaccacgatgccaggcacgggcaccctgtgccaagcctggttaagcgccaggagtccaaaatgcctgccatagtccctgcgcaaagttcacggcctcgtgccagggacagacagcgccccctccccaccccaacacagggtggtgagtgcgatggcagaaggcgcgtgtcccggcgcccctcctggagtaggagggctaagcctgccctgcggggagaccgaaaggctgggagggacctaggactgtgggggcctggggggagggctgcagaaaccccagagcatggtggcagaggcaggcacagaaagcaggacaaatctcacacctgaccccagcaagcctttcctggcacacctcttgccaaatgctgagcactctggaaacagccagtgcaggcggcctgtcccgcccctgtagctgctgctgggagcctccctcgcctgcgtcctcccagaatctggcctcacttctgcaggcctggggtaacatcttggggtcagcgccccaggagaggaggcgcctggaggcagcagagatgtttatgtaacagcagccaggcagcctggaggagcagattttccatagaaggaagcgcggggctgtgcagctcccaggctgaggactctgcccaccacgacgtcctctgctcctggtgggtgggggtggggtggggcatagggaggcccgaaggcctcaggcctggtgctgatcgggtgcgggtgcgactgcctgtgtgcctccattggcatctctgcctgtgggccccaggccagaagtaatggcccatgtagcccaggcccgggggccagtcctcagcattttgcggaggggcggcctgggaggggaggaggggatccctggatagggggtctcccctggtctgccccagctgtgccgacagcacctccaccttgggcctccatcctctaccagcagagaagagagtggcccattcggtgtccacccgtcaggccacccagcagccaggcacgctcataagcccgcgttacggatggtgcggccgggtgcacaggcccgagggaagcacaggcctcggcctcccagctcccaacccctgcaccacccacagccgggagtaccccatggacagctgtggccgaggagaagccagggatgagggggatgggcctcacctccccaccagcctgggaagggggtaggcccctggcaagtaggtgagaagctttttcattcacaagttgtccgggctccccattcctctttgtcaggccagcgggtgtgggcagtcgggggaggctggggtcctgacacaacaggagtacatctgctggcctagggcctggagaccttctcctacaggtcgggaggcagcc

SEQ ID NO: 1883761 - DNA, 4001 bp, Homo sapiens
cctctccagcccttccctccatgtctcattcctagagggttttaataaatttaaaacttttttattgctatatattaaaaaggcaaacaaataaacaaaaaaggcaatgaagttctcacagttcaaaagcatttctactgtgatctgaactatcagggaaacaagacaggtgcatatgtgatccagctagtagcaatcttatctgaagagaattaaagcataaagttaaacacagacctgatttgtagattggtgaatcttttctgaaaaaccattttcctttaggactgcagcaataagatgacccacagccttaaaaagaaataaaattaatgaacacagtcccttagaagttctttccaaatatcaatactagttgatatgagtatgccaggcagtcaattaggattaagtaaaattcccattaactaagtgtgtgctatgtagaaggcattgaattaggcactccacatgcacaatttctaatcttcagaatagccctcaaggtaggcatatctatcccaggttaccaataagcaactatagtgcatagaggttaagaaaactgccagatttttggttcaaattgctgtcagtatcagaagataacttgagattgcttactccattaaaacatgaatgagaaagcccatagtttttaaaatcatctttgcactgaaacgaaatccaccatgcttcatcacactgttaacgaatatgaagaatatgtcttagagccaataggctagcaacaatcattgccattctgtgtacgggttggaaactacttcactattgctacaactgtccatcctgcacttgggaccaaattacggtatagctgtgaataactgtcagtcctgcaaagtctccagaacagctcaaataaaaacacagcacccactccttcctcatttttctctttgtatttcacacattggaactgatttaagaccgtggtgcttgtggtctagttttgtgatataagtcactcatttacatgaatattaagtttagtccaacttactgtctcttatctcctagtaaaaggaatagtaataagaactgagcacccatggataggttgagctcctgttttacaaaacataccatatttcattgaatggaactgaccaggaattgcaagttgcaccattatactgtgtgccactaagaaagaaaaaaggctgccaattagtctatgatatacagtgcttcttataagtcggaattttggttttatagtcacacaagagttcttttagactcgtgtagaaaatcatgcccaagttcacaaatgtgcaggcaataccaactgtatctcaactgctgccatcaattactagaggcaatccaatttcaaagatgttaaaatctgaaaaaaaacgtgtgtgaatcaaagaaatatggtgctaacatcgagcagtggttacagaagaacaataagaaatatttgcaaaggacaggacacaatcacaagaacctaataaaactaatatgaaacacaatagggacaaagaaaaagctatagttcatatctagaaaaagaaataaaagaagagaagcttaattccccattccccaccaggttgaatttatctaatatacttttcacttcatcttctaacaaatcagagatactagcctaaactgattttttaaaatacaaaacccaaggataaatcagcctacattgctacttaagtgttctataacagaattcaaatagccatcctacactaaacaatataaatatatatatatatttttttcacctaatttaacagtaacacgtatgggcatttcttgattatctatgttaacaaagagactccaggcacagaaaaataaaactgtgaatagtatcctccaagccttcatcttcttcttcatggtaaggacctgcaggatatgactccaacccagccaggtagaagggaatcttgcataaggagtgttctactcctcatggaagggttccccactacccagctaagtcaattcccacagcagacatctccgaagttaattgttgaaagtatccaaggtgctgtatgttgttaagtcttcaagatggcttctgctggtctgttagctttactctcacaagaaaagacaataagctattatgataccttgattaaccagaatgtttctagttagctaaaggctacccagaaagccatctttgttttaactatttaattattgaaaagctctttaaagttatcacaatcttctatcttagtagatatatcaaattttctaatccaggatattttacttattaaatatcattattataaaaatctatataaggggtaggatatgtcttcttaaatattaatccctcatactcttcagacatataactgtttacctctgttcccaataatcataggccaaaaaaaaccaaacaaacatattcaggggcctactagttaatcaaggttttattatctctaggaagaaaagtatgatatataaacagaagctgagattgatcaatttcaaatatttgctttccatgtcaaatatatattttcaaattaaatgtatatttaaagttgtttcacaaaatataaatctctacatgtagaataaaatatttaatattaaatatataaagttcagttaaaaatccacagaacaggtttatttgttaccatgagcaaaaataaacaaacaaaattacctgtgattggataagagaatttggaaattcaaaccttttcctgatatcatctgacatttttgcttctcttacatgtatgtgtgcagcttctgtaaccaaaacaaaagaatatttgttagtcttccaactggtctgaattggggctccaattaattattcctcaaataatgtgaatgtaatccattccaaagataacaatggaaataaagcacagggctctgcagagtaatccttggcaaaacttcattgtcatccagcactcaaatgtcatgattgataaataaactaaaaatgcccaacagctcttggtttttcccatgagagctaatcctgaaaaagatgaatttgcactacggaaatgaaaaaaacatccaaaagttcaaccacacatttgaaatagaaattaattcttttgtggatcaaaacttataagggagaaagagtcaaacggtcataaaattacttcatctatgcctcactttggcacaagctttcatctaagcactaatccaactgctagtgacaagtgtgaagcctaggtgaacttttttcaagaagtatagaaaagacctagaagttcacacattaaaacagactgtttcctaaaggaggaacaagcaaacaattagcaccaacttttaatatttatatctcacttatcattcctactgggctcacaagaaaagaaaagtgaaagagagaaagagagaggaaggaaggaaggaaggaaggaaggaaggaaggaaggaaggaaggaaggaaggaaggaaggaaggcaggcaggcaggcaggcaggcaggcaggcaagcatgcaaaaggatggggaaggcaggtggtaaagcaggaccatggaactaataagaggatttcctaaggatcccaatttatcccatttccatgaagcactgaacctaccaattacattattttgaaaaacagggccctctaggtcacctacttttacaatataattaaaattaaaatttatgtcaataaacagccctagattaacttataacaagcagaaaaaccaagttcccttgatctcaaaaaacaaagcatattgtaatgaactagcagccttttctaactgcaggttgagcaaccctaatctgaaaatacaaaattcaaaatgttacaaaatctgaaactttttgagcactgacgtgacactcaaaggaaatgctcattggagcactttggattttcagattggattttcaaccggtttaaagtatatgcaaatagtccaaaaaaaaattttttttttaaatccaaatccaaaacacttctggtcccgagcatt

SEQ ID NO: 1883762 - DNA, 4001 bp, Homo sapiens
ggttgcagtaagccaagattgcaccattgcactccagcctgggcaacagagtgagactgtctcaaaacaaaaaacaaaaaacaaaaaaaaaaaacggcagaaacactgaggcatgaaggtgcaatttgcctgactctgcccagagacacatgctcagctgcatgcatcaacaccttcctgggaagcaagctccctaggcacacaggaggccagtgatcatgaagccctccagcaccacacagcctctcttcctgctacaaaaaggagtagcactcgagccctgcccctcccgactcccagtcctctgaaggttctgggtgctggctctcccactaggataaacctggcccaccaagaagcacaccatattcaagaagggcaggtttttagggctgagacatcacagtacacaccagctggccagtgcacacgcatttcttcattcattcaagcactccttcattccttcaagcatccatggagccttgatccctggtgctgaatttgggctaaatgaaaaatgcaggggccccaatgaagcttcagtcagctccactcctccagctgccatccaggtgacatgcagcttgccctccactcgtgggcacagggggtcccaatagaaacagggaaacctcctcctaacccacagctgtgcagagtatcatgctggactgaggtcagcttcccaggacagcccccactccatgcggcctgcctcatatgccactagacccagcacacagaagaggaagagccagcttaaccagagaggccaagagcagtggagccgggagggcagttcgcccatgaggacagaccgtgggtaagccagcaactgggaaatgccccatcctgctggtggccacagacataagaattcaaagactagttatcaaacctgaaagagtacagtatcaccagtgcctgtgagacaggagtaaaactaacattaacacaacccttataaatttgcccactcagggattatagagaaaatggattaacatcaggatgttgactttttgtttcatgaaatccacctcaggaaatccaggtctagcatcctcagggaagttccatcaagaggaaggcatctctggttacgcacatatttacctgcaaaccaggtatgtatacacacatatgcccagtgggcgcatgcacagccgcactcatccttgttcacagaagatgcaaatctcggtctgtgtataaagtgtgtctgcacatgcagagaggagccatgcacaacgctcagacatatgtgcaggcattccagacacagctttgggccaatgagtggtcacacaatgaagacaactaggaaatatcttctgtgactccaaatcctaaatttcttcaggtttacattatattttcataaattccttaccgtcattcctaaagtagattcaactgaaagcggctcctcatattgtagcgtcaggcttccctactctctacctccaggtgaagagtatctgtaagtatctgagcatccacagataatcacacagcatccctaagtatctaagtacatataagtaatcatttagtgtctataattacccaagtatctgttagtaataatttggcatcagtaggtacccaagtatgtgtaagtaattatttagtatctataaatacctgaatagttatgactaatcatttctcatctgtatttgggtacctgcaagtaatcatttagcatctgtaagtacccctttaaagataagcacccaaatgcctgttagtaattatttagcatctataagtacccaagtatctgtaagtattcctttagtatttgtaagtacctgagtacctgctggtgattggcatctgtaagtacctaagtaactataagtattcctttaaagcctgtgcaggaagaatctccattcttcaaatgaagatacataattccttcagaatgatattaggctggtgcaaaagtaactgccattaaaaccaatagcaaaaaccgcaattacttttgtaccaacctaataacatcttcagactggaacttaggctggtctgtgtcctcagccggtgtggactaaggctggtgtccactgggctctcctcagcggtcctatcttctgtcaaacccccatgtaccttgcaatccacatgttttaggcacaaggtcccaatgtgctctcccactcatgctgtcactgggagcagtgactgggagcttagctgccaatcagcaggagggcagtgccagaggaagctcagttcacacagcctgtggggtcctctgcaggtgtccacaagctgggatccccacttgcagtagacccttggggtgaggaagtacacccgatgacagctgtgacacgccctgctgctctgggaagtggtggctgctcctggtgccatgggaggcccatccctgacccaagagtcaggaacctatcagcctgaagaggctgggaacaggagccgccccgacctggaatgttcccaaagcaggggaggggctgactgggcggggcccttttcaactgaaaactcttacatgcaggctcatggtcaatggcctgtccacccacaggggccctcgggtagctctggccaacacaggcagataggctgcagactaagctaatgtgcattgtgcattaatggagggggggggggtcacatgagaagagggggtgtgccggaagggcagatatctccggaagggtgaggtgtcctcacccaccacagctccttcagggaggcctggggccaattgctgtgcagcagagagagctacccaagccccagtgtctataaaacccacagtccataaaatctgtaaaacaggaggccaggcaatatgacctctaaaccctgatggtcttactcccttgcttactttatatctgattataaaagtattaagctcttggaaaacaaattggaatgtacagaaaagtacaaaagtggtaggaaaaacgtaatcttaacctttaacatgttggcatattccctcctagaccgtcttccattttaattggttgacaccagccatcacattatgtgtgtagtgtttcatttaatatcatcataaagatatccccatagcattaaagccttgctgtaaacatcactgctgacgactgcataatttccgatttacaagaggacactgtcatttgcctagtcatcccaacttcatcattcaacagtgtagaattcttgataaattaaataaatatctaaaatattcattctttatatacttttaaatttgttatggtggatttttaacagatattacagataaagggcatggtctctttaaaaaatccaaagcaggttttggagcatactccagtggtttctaaggaaaccaattgtatgcagatgtagagcaaatatctcctttgggaagttctgggaattacagccttcaatctggataaaagcctcagagacacaagacaaatttgaccagagagcaaatgtagtccgaggtcatattaacagaaataggaactctagactaagggaggtgagggccctgtcctcagcccccaccataccctggagggtaattaatgacctggcaggtgccttgggtccagggggtgcagccctcaggggtcagctttggaatagaaaatggaaataaaggaggccctcccaacaactccagggaagggggtgctgccatgtcccgtcctgctggaacagtttagcatctgttcttagtcctttttttttctttttttttttttttttttttttttttggcataaaggacaagaaaagcaaagattaggatgtggaaacctggatgggcaaaagcagcttgaggccctccctccaaggacctctggatgtgccctgccctagacttcttgagggtacagctgcagggcctggggcctggattaggacagagctgtggtcctccagttggagagggagtctggggctatgaggctgggatggtaccagctagggcctctctagcaatacttctaacaacagcc

SEQ ID NO: 1883763 - DNA, 4001 bp, Homo sapiens
cctcctgagtagcttggattataggtacccgccaccacgcctggctaatttttgtatttttagtagagacagggtttcaccatgttggccaggctggtctcgaactcctgacctcaagccatctacctgccttggcctcccaaattgctaggattacagaagtgagctactgcgccaggccactttactttgtctataaatttgttctgaccccgggagtctctctgaatctgttgattctagaggctgcctgattcatgaattctctttttctttcttttttttttttttttttgctcgattaaatttaatctaattgaacttgtcttaagctttcttttaacaagctccatgatgggcatctcagattggccaggcctggtccacctgctgtggcctggggctggtactgtgattgtgaggaccatcagcactgaaagaattgaggatgggcggttcacctgttcagaaggcgagggggagatgtcacacagccaaatgcagcagatgtcctccaccacgtgcatcctgtcagcacgcccgcctatggagggctcagccctttcatgctcagacaggccggtcaggaagccccgtcacagggaggctccagggtggtgtatggaaggtagtggtctgaatagtgtctgttgagcaaatgacaaaaatcaaccccagagaagcagaaaacatctaggtggcccagcctggtaagtggcaggagatggtagtagagctgtctctgcctgtcaccttcagcctcttcttgcaagcccctggtggtcccatattgaggtaacaatgcccattcttcttccagacagtgtagaaacagtgacaatgtggttatggccccctggaaagtgagcagttgatgagctctgcttatggctgctctcctccatggcagaatgcattcctgcaggatgaggtcatggagccaaggaaggtcagggtgtgggggggcttcctgggtcagagctccagagcagtgctgctccccctgccctcctccttaggtctcccatcactggtggtctcagaaatctctgaagatttcagaaatcttgaatcccttccctggtgtgaatgcaaagggaagagtctgttcctgtaaagtagtttgcagattggtggaactgagagaacccagacccttccccgtttccctcgacctttccatctctggaccccatgcagactatgcttgggtggtgacacagaagaatttagtgtttggtggacccgtttctggaagtgatggatgctgacagctggcacttaacagttatcaaaaataacattaactggagtaggctctgtgccacttagagcttaatgactcactgacttcaccccaaatccccatgaactagcattattattagccctatgttgcaggtgaggagactaaggctcatccagttagaacatgatggctgaaacctacattcaaactctggtctgtttgaatctagaactcttagcttccccccagcgactgtgttagaacagaggaatcatcagttcaattttcacctccctcctaagccttcgtggctctagacgtatggttataaaggttgttcactgctcaagggcccaggagggtttggggctggtggataggggccaaaatacagcccaggggtgccatttttctaattctcaccaaggccctatactgactagcagcggctctacccgataccatccagggccttttcagaattctgaaggcacccacggtgctggctactcacacacctggccccccttaaccatggctgccttgcactgtgacccaattggttcccatgacaaaacctgttattcccataactcacccaacacttttttgcccctaggctcttgctcctttggttccctctgcctggaatggccttctctcccgagccgcctcgcctggttctattaggttgatgcaaaagtcatcgcggttttaatggtaaaaaccgtgatgacttttgcaccgacctagtatttcacaaaacctacatttcctttaaaacccaacctgatgcctactccttcaaaatgcctttcatatcccacagttcgacttcatctcactctgcctcctctcacagggctttgtgttcgtgctggatggagcccatcatactcagcctcgcaataaaggccacctatctagtgagtgagcatttactaggcgcaggactctgggctaaacgctgtccatacttcatctccttgattcttcacgtcacagatgtcattatgcccatttcacagaggaagaaactgaggcttggaggacttaaagccttgtttcagcaggaaacggaataaggcgttctgattttcaagctgtctcctattagggctggtttcccctagatgtcatgagtaggtgtgaagtgtgagctacttgaaggcagaagccaggggggtcccccgcaatcccggaggcgggcttctgaaaatgtttagcccaggaaggagggctgccctggcccgcagctttccgccccttcccaggtgagctgcaactccaaagctcccaagcaggcccttcacccacgcgggccccagcagctccttgggaaacaggatcgctgctctgaggccgcccacagagagaccctcggagggcgccacgcaagcgaagggcagaaacgactcggggggcaggggcagggcgctccaaccacacccaggcgccgccagcttgtttacgcctctccgccgcgtccccccgcccgccagtcacgtgaccgcccgccccgccccctcgggctctcgcgtggctcctcccgccgcgccggcccttctttttgcctccttcgcggagtcacaagatctcttcgcagcctcctttcggatccttccgcccggccccgcccccctccataaaaaccctccttactttttttctcgtccaacccacatcgtcagttatgagtggaagagcctcttccttccggcggggctgccgagcgcggccgtctatccttcctttcgagaaggaggggaggtccggagggggactctttttcgtggcggaggccgccgtcggccttggccctttcacgacgggggaggtgctgtacgtccaagatggcggcgccctgtaggctggagggactgtgaggtaaacagctgagggggaggagacggtgggtgagtatgggggtgtctccccctcctttttatgggggcttcctggggcagccccggcaccatgactccagccggggaggctcggaggggctggagcaagagactcacttgcttggtagggatcccggggaaggggggttcggagagctctcccctccctcttattacacgctatctccggctggcccggccgggactggcgggtccctggggaggagaggcgagccggacggagcacttcgcccctccttggcccccgaggggacggctgcaccctgggcctcggtccctcgggcaggggcgaggtgggccccttcgtcagtccctcacttggtggggtgacaggttcacgctaggtgcggagggcagggtagagacgcttggcgggaggggaagggtcgcgagggtggggctggtcccagaacttaaagagaggggtcggggtataggggcgtggagaatgaatggaggtcgcctgtggggatcaaggactcgcctggattcggtgtctccgctgaaatttgcatgactcgctctgggtgtacttgtgggtgtttaattggtggtgaaagacagttaccttaaagtgggcaaaggggattcctaagagacagctatttgcagagcccctcctaggcgttcattcattcatttgaggaactggaggatgaagagcctgcaatcggagggaccttgtagaattaaagctctttctttgtgtttcctgttaaagagttttgctttgtgtgttttggatgtgtggtgaggacttgggaggggacgcggtcctcctaagaacaacagctaacgttaatggagtgctctctgtgtgccag

SEQ ID NO: 1883764 - DNA, 4001 bp, Homo sapiens
ggtgctgcctggaggacttgtggcagcagggtccctttggatgaaggccaggtatctctgggcgaggcactgatgaccatccacatgtgcaggctgctgcttcagtcacgctgaaggtttaaagttcagagtcctacatgtaataattgcctcagaggggaagggcagtccatggtggtcacggtttccagtgtttttaaacataatacacaaagttattgccaaggattttgcactgcaaattatactatttacacttgcgtattcagaaaaacacagtaaatagatacatgatagatattttaaatagatttctaaaaaccaacttggtcttcagtagacccgagtgagctacagccaggagtcccatgccatgtgtgtaaccgtgcggtagggaaaggtttctatccacgactacgctcagcctcctcctgcctcccccacccttgggcctgacgaagggctaaggctgagcaggcctaccttagtccttagtgtgagggcttcaggtctagactggctgcacctcccaccttcccagacagagttctgcttggagccgctgagaagcaagtcctacaggctccactcctgcaggaccactacacggcgggtaaaccaggacacacaggcatggggctgcagggctaacggtatgatgaacctggccctaggccagccccttccccagcaccccctgccaaagtacccttgggaacaggcccatcagcctcactgttcctggaagtacgattgccctaatttatggttacctcaggaaaccttcttttgaagaagtggctgggaccaaccaaccacttagaccaaaggctcagcacaacaggccagacagatgggtccaggatgaaaggcctgagtccaaggatgctttggggaaaacgggataaacactgctaggagctaaaaagtatatggtgtctgcccaaggaaaggacaacagtagggagttcccacgtggaccagctttcattttgcctccataagccctggtatgctggaaaggacgtccacctggaggctggagacagctcctcagagagccagagctacccttggttcctgggagatggagagagcgaggccctctggtcggaggcctacaatttggctccccagtaacatttctaaaaatgagccctcctccctcggaaaggtagtaagtagtagcaaagcatctcccacagccatggtaggtcccatccctgagaagctgccacatgaagtgagctaagggaaaagcagtgctcagtaccccatctaagaaatgggggtgcgcagtgaacagaacctgcttgtgcaaggccggcctgaccatgaaaagtgatcgggggtaagtagagggatgcgtctaatggcagcggcctctggcccgctgtcggaatagaagaggtattttttgcaaccagggcttgcctggctacttccaaatcaaacctcatgcaccagctgccatcactaccttgggggtcagggctgcagcctgagggagccagtgaagtgatatccacacacaaggaggcttggtaagtgacatggaagtgcctcggaaatgcgtgtgtctggatcgagtgtcttgccacggacccaccacaccaaaatccctaaagggtggagagcacgagatacccagaacagaggaaagaggctggaaacctaagacacgacttgtaaattacaggtggagacggaacttctcaccacctccctagctatctaaaactcctactccttgatccatttccatgaacaaggaaaagaaaaagagtctgactcgcaaaagcggcagaaatatttaggttagagtcaagcaactttctgaccatcttggttccctaagcaggaaaacgggacagatggcaaagcacctgtgcctgtaggcaggggcagggctggcctgagcaaggctcttgtctgtaagtaactccactgcctgacagacaagagccttcctatgaagctggagccacagcacgtgacttgctgtcacaggaaaggccacacctggcactgcagccagggacaggctgcattctctttacccagtgtccatctgtgccggctccagtttgtcagtttcccttccataaacccagaaacttcactagacaatgcaagaagtgttccttcttagagctgtaccataagagcctgagagctactccatgtccataagagagaagaccaggcagcaaaatccgagaggcacttctgtaccagagggagcccgacaagtctaaagacagcagccacccaggggcaactcttccttctgtatccctgacctgattatcagagattagcaaaacacaacttcaccgagaggaagcagcacccagtttctgaagtttgcagtggcttcctgcctctccagggcctgccaggctgctcagagcacagcacacctccctcccgcctttccccacacctggcccgactgtgctggggcagcaacgtagccctcgcctcctgactcagtcccggaaggccagagacaaggctgggccccgtgaaagggagtcacagtgcagcgctgccggcctgtggctggtcccgcctcgtcagcatcctgggacagccctgtgtgcagctggccaccacctcccagctcaggcagaggggcaagtgcctcctcttctccgagctgcatgtgatcctcgcctgccccgcggggctgctggggcttcgctgaatcagcgcctgtggaggcgcttctatcaggccatctttctccagccctagccgccccttcgcagcggacactgtgctcctatcaacgcacggcagcgccagctattcccaccttctgttcacgtcagactggcagcagctcacgtccctggcacctctccgatgctctgaacggcagctcccttcaacgtgcctagaaacccctctgagaggaaagaccatgctcagcagaaagcgctacaaacaccccaactacactgagcattcctcaatgcagccaccacgtctgattcacctcagtcccctacgcctgacgtcgggcccggcccagagcagtccacccccaggggtagttgcttccacctcccttagtagctggcagcctctggagacgagaggccagcacctctgcttctctgaggcctgctgaacacgggcctagggcatgtacaaaggaagcaatctgctccatagagcgttcccgccatgtgacttgattctgaagcaaggggcagtcagtccgtccccgcccctttaccttcatattctgaggccccaagccgaacttagattggagacagaatgtttcatttatcctgccctcgtacgtgaatctttaggatagcaggaaagaaaacgcctgaagaaggaagattctgtaaagctctgtcatgtcaaaataaaggtggggtgctcactgactataagccaatggtcagaaaacctgtccaactctctgggcctctcttccccactctaataccaaaagtaccttgaccaggaagtccagactaaacggaaaggcgtaacttacaaccacagacatggtcctccatagccagtgacatttctaataagcatttgtgatcacatgaccctcctgagcacagctgtccagtggctccctacagcccagagaatccagtccacacccctgagcctggccctcctggtcctttacgagcagacctcatgcgcctgtgtgactatgcaggcctcctcattgtttgacacaatctcatccgttatctggtcctgcttcccttcctggagaactgcagcctcctcgtctaaacccgactccggagctgcctgccttcagggctttcctgattcaccctcagcccttctctttgagattctatcacctgggacttccctgagccctgttctgtatgatgctctttagccacctgctctcctcttccaatgtcccacgtgtcactcaaaacctaagttccatatgggcaggaactacatcgtcctgtgcattgagccagtgctcacacgga

SEQ ID NO: 1883765 - DNA, 4001 bp, Homo sapiens
ccttctctttgagattctatcacctgggacttccctgagccctgttctgtatgatgctctttagccacctgctctcctcttccaatgtcccacgtgtcactcaaaacctaagttccatatgggcaggaactacatcgtcctgtgcattgagccagtgctcacacggaggagatgctcaggaagcctttgtggggaggtggatggatccaggcagtggatgggaaggaagtttccagtcatgattaagccaaagggtaagtcatctctatagtctaaggggttggtgaaatacagccaagtttggcaaaatactccctactttgcaggggttggcaaactacagccctgtgtatttgtaagtgaagcttcatcagaacacagccatgctatctatttacgcactgtctctggctgcttttgtgctacagtggcagagctgagcagttgtggcagagaccacatggtccataaagcctgaaatgctatctggccctttacagaaaggatttgtggacacagggctaaggcagcgcttcccatatattttcacatttcacctctttagaggtgagatttgtgtagcctgttgattaacagtgaaggctgcttgcagctaagagacacctggccttggagctctggccacccaaaggctgacaggatccgtgtccacagctgccacctgagccacagtccccagcagagctgtaggaaacaggtgcagaaacccatgctggccttcagctctccccgtccatttcaaagcaaaagtggcagcactgggacagacacaaaactgacacccaaaaccaatcctccggtcacctcacaagttcatggtcctttccgtccttcaagaacttgggaaagaatgtccacgtcttcccatgggctacagactgtgttccacagatgctgaatccaacaagctccaacccttgcttaggttaaaaatgaacacaaatggattaactttttgccaagcaaaaggcctcagcatgaacaaccacccggtacctgtgactcctggctggagagcccagcccggcggaaactcagaaagggtgaagatgctgataggtcacaagcccctccccactgccaatggagatgccagagtgctccagcacaatggagtgtggcccaccaaagccccatttcctagcccggtggagatggccctcgctccattctacctcctctgtaccctgtcagtatcttcctccattcccctgccttcccccgtcctggtcagaaacaccattgttccctctattgcccactgagcagtggtccaggagaagtactccagcaggtcccccgcccccggatgggtgctattgttccttggcccagggttgggggccatcatcttcccgtccctacccaatccggcagaggagcctggcctgtgaggagatgccattcctgcctctccatccctctgctgctgcgctccatcagcctccctcacgcctcgcctggccaatggcaacagcctcttgctcatcagccttgcctcctgactctggtccttggctatccaactgtcccaatcgaccctctggaactcactattgtggacaatggtcatcattgaaggacacaccacccagggccttttaagaagtgactgcagactgtgtgtcccacctgccacttgactctgctcatcctctcgggtcccacagcaaggcccttcacactccccaagtgggcacactctctctgtgcatgcatgccaggcccgcctctgactcccctcctggggatcccgtctggctcagtgggaagcctatcgctcttggtaaattactcagtaagcacttctctcctgaggcctggctcctctcctgccctcggcgggagacctgggaacgggcctgccagcgcccagcccagggctggcaaggaggatccctagcagggagggggagacccactgaagcctttctccctgcacagaggaggactctcattctgttcaaatcctctgcacctctttcttcccctccctgtactctccatctgggtcaatgatttcaccttctactcagttgtctaagctgcagattctgacattttctccaactgctccttctcccccatcacagagcctggtaagaagcagtaggtgacagtgaatggtttttctcaataaatctacgtgcccaagaagggagacatggtcttggcagcatcaccagtcaacatcagagttcgtccaaactgacattccacagcatttcctctttgccgtccacacaaccggcttcttgcttgaacatgctggttacagggagctcatgtcgcacctcagctgctctctcaaggctgcgtctgtcatcgcgggaggtgtattttagctcaaattgccccactggcttcccataattgtctttcaccctttggaaccacatacaacaaataaatataatcccttaaaaatacctggcaggagtgcccacgttctctccaggtctcctcttcaccagccttaaccttctggtccttccatctcatttcaaggtgctttcagctttcctgagttccccaggtgccaatttccataggttttttacctcccagatgatggctaccatattcctttaacgtagcctctgcaggaatgagggatttttagaaagctgagacttccgagaagtctcatgatggaagaatccaaggggatcccaacaccagattgctctggaaaatgtgttactgtgacggtgatcccatgggttagagcacatgtttgaaggccgagccaggaacggaggatgtggccaaaaaccaaagtgtggatgaggcggaacataaaacacatacttccaacagcacatcccctgtcctccttcccacccctgaggagctctccaagtagcaattactgaatttgcactttattatagggttcagttacagtataaaatgatggtctgtagaaattaaccccaactgtgtagctggcaaaaaagaaaacaaaacaaaaaaacaggctgcctggcccagggctgaccagttggtcaccttgcccagtagcacactaacaaaggaacagaaaaagaacgagcccagaaagtctggattttaggaggctaaggaaggatcagggagatgtgggttggtttttgcttggtttcaaggcgcacaggggatagcccagaagcctacaggaaaggtgagccgaacacatcacagagagagaagccactgctgccaagtgggcttggaagacagaacggacattggtgcctactagcgacgcaaaccacctgcacacagcatagcctcagacggggtgagcgccgccactcaccgcactataatttggggcaagtcaccttatctaagcatctatttcctcatctgtaaaaggagaaaatttctaattccagttgtggtgaaattcaaaactaattcctcagaaagggctgctgttacctctaaaaacagtcttaagaaatgttatttcttctggtggttaaaaactcattaggggccacaatgctttgccacaaataagcagtgtggtttggagagatctctgggctctactctccctgtctgcaaggtgggaacaacgatctatgcactgctgcttctccaagggccaccagtacagcaagtcatgaaatggcaaacgggaaagggcctgagagaggactgtgttctatgaatgccaggcgctcattctccctgacacagtcatgctctagaacacgacagcctgggattcaaaggttcctttttcctgctcccctccaggattacagcagggtgcacagaaacattgccaagtgcccagaaagaggatgacttggggtggatgaggaatactttgtcctgaaaaggatcccgcagccatccccgcacccacccacgcctgagcagagacccagctgtcattcattagcccaggagctggtaaagtggttacagcagcagaagaatccaacacgctcaacagggtggttcacaggcagcaatttagagac

SEQ ID NO: 1883766 - DNA, 4001 bp, Homo sapiens
agagtctcactctgttgcacaggctggagtgtggtggtgtgatctcagctcacggcagcctccgcctcctgggttcaagtgattctcatgcctcagcctcccgagtagctggaattacaggggtgcgccaccacactcggctaatttttgtatttttagtagagacggggtttcgccatgttgcccaggctggtctcgaacccctgacctcaggtgatccgctcgccttggcctcccaaagtgctgggattatttaatgtgcaattggaagtgagagttggggcaagaagtcaggaggaatgaatctctcctctccacttcaaagatcctgcatccccttctgctgccccagtcttctaagtttcccaagcactttgatattcccagtggagatgaagatctgtgattcaagaaaacccaggccagattaaagggccaggcaccaagtccgtgtgcccaacacggaaccaccacctgacaaaggcccattaggatcgggcccctgctgccagcctggcttctcacatctcccaatacaatgccgacagattggtggagccggtttcttccccctcccccgaacaatattttatgaggagtctgttttattaaaatattttccgctggatgcttcctgtgtttcaagaagttggtcctgccagctggagctgatgacagttgagaaaaacacatccaagtgctgttgtgacatggcatttggaaggggcggagcacagtgggggggtggggaagcagcatgggaagaggcgtagaaaaacacccgggttgcactagaaataccactggtattatgggagaacaacttccccttcctcgttaaacaaacgtgaacagaaacccttggaatgatgtcctgaaacgtacccctctgtctccttgtgggcccgagccactgtgacgtacgctcacagaaaacctgtcatttgttttctatcactggtagtttgccaaccaccaaactggctcccatgctcccactggtttatttcaaccccaaatattttccaacagaagtagaaaacagggcatattaaacaaacaacaaaccaaccaaccaacaaaactaaaagtgatactgacacagttcaggtgataagcaggaaaatgggattatcagacaccggctctttggcacacactgcgaagtcagcccctctgcccagtctggaaaagcaacggcgtaagtcaatgtgatgaagaggtccagcctctcgtcgggaacttggccgcaaaatgggtaatgcttttctgtaggatgtggagtgtagctggtgttgcaatggtgtttctgtgtaatgcaagaatattctgggtttacatctcaatatcaacaggcctgtgaccctgtatcctggtacagtgtctaaaaggtttagtccagttttaaagaggggacttcaaagaaatgtgacaaatttcatccccttaaggaggaatctttagtccgaggcactcaggtgccatgcagcgttctctccataagggggcaatcataatccatccctcatgttcccaccaggctattgtgcagagcaaaagttaaacttaacccagcttcaggagtcctctcttccaaatgtctaataactgagcatccttgtgtgcaagcgcacacgtgcacacacacacacacacacacgcacgcacacatataattctggaactttctgggcaaagtctgagggctgtctgggtgggctggttccttaaagaccgtaccctcgctatcaaccagaaaatcctggagagctgaagtgaactgcaacttgggttaggccccagcttgacagctcgaaatcattttttttccttcttgctccaactctgactgggacctgccatgtcccttaccttctttcccattttctgagagccagacagacatgggggcctccccctttccacccaaaggacttcaggatccctggggtagtttttctgactcctccaacaatcctagaccaagacgaactcatgcactttttcaaggcatcacaggaagtcagcgtgtagccgctgagttgtctggatagagactgagggctgtgctccttttgcggacaaagggaagcagtgctaccttctgcagatggctctggtctggactcggggctatctgcagccttctgcctcaccccaccacaggcaggtccacttcagtccactgcttgtctttctgcccccctcattcacttcatctaccccacgcctcctgagcaggtgactctaggccagtcctacgggaggtgctgggcataacacccagggagctccgcgtctcagggagatgggtaagaaaaaccacagtaacataaatcctccggcacaggtgggcaaagggtcctggtgggtctggggcagtggatgagggcagtcctgtatataggttctcggccatggaggcctaggaaggtgggtggatccagttcaacacttggcctccttcaccaggttctaaccctcacctactgactcggcatcttcagcacaagaggcctaggaccttcttctgaacccagcaaagtatgctttggaccccacccctcgaaatccagcccaagtgcccggctccctggcctctggggcctcccactggtgtgacaaccagaccgagtaaaagatcaagtcctgttccctgaatgacccctttgtgaaacacccgctgggagccccggggaagcctcacaaaggccggggctacacgcttgggcttcgcaaagtgctggctccgcagacacagggttcttacagacagaggggagaggcacaatactcactgctcagggctcggcacagacgtcctccggccttccactgcgatgttgctctttggtctcttaacaacatgtggacgaggtgggcgcacctagaggaggtacagggggagagccccaagaaggagtgagttggaaaagccatacaggtacattctgaacatttggataaacggcccccccaaaaaacgtttagggattttcaaagctacaggctacaaaagcccagcctatcacagaaacatcaccatctaataggcagcagacagacacattaactggaattctgtggcctattcaaatcagaagggtgctcctggaaagctcggtttcttcatctgcaagatgaggatagttccattggcctccttgcagggctgtggtgagggtccaatgagatgatgtctacataggacccggaacaaagaggcccttatcaatgacaattccctctcatcttcctctgatgcccagaagctggttttgtagaaagaaaaggttgcgcttacacttgtttttagggtgaacatgcttagtttgctctttttacaacagaatcacagggtgcttattttcctctctaaataagagaggcatgagagagtgccactacaaatcgtctttctgcttcccagagcatccctgtgctagtcctcccagcagggttcagcctggatgctgcccatcttgtgtagctacatgcactgagcagacctagtgggagggtctgcagtgggcacatcaggaaggacccaacttcctaaccccacagctgctgcagcagcgggatgggtttttctgacccgctgtctctgaaagcgaacatgagggcccacagagaaagacaccctcatcccctgccagagttcgtgatggatgttaggctgagaatttctaggtgcccttagaaggatactcatttggtccagtcgacattacatggctttaaatttggcatggccatctctgtacactcccagtgcccgagagggatgggttgagagctaagctgagaaagtctatctctgaatttcattgctgataaaaacaaccgagcctgccggggcagggggcttgctttctccacggatgggatgccacaactgctgagtttccaggacaagacagggaagggaagcaggcacacactccacctcctgcccaccctttgagtttccaggacaagacagggaagggaagcaggca

SEQ ID NO: 1883767 - DNA, 4001 bp, Homo sapiens
gcaccactgcactccagcctgggagacagagcaagattccgtctcaaaaaaaagaaagaaatcaagaaatgaggctggagcaagtgggtttcctagggaaaaaaatctctcttgacctctacctcactccactcacaaaaatgaatttaagatgaatcatgcacctaaacgtaaaatccaaaactgtaaaagccttagagagaaacaggagaatatattcctaaattcgagaagatattttcctgtttttccctctaaagcattatagcaaaaataccttaggacagagaaagtactaatcgaaaaagcagggccaggcacggtggctgaagcctgtaatcccagcactttgggaggctgaggtggacaaatcgcctgaggccgggaattcgagaccagcctgaccaacatggagaaaccctgtgtctactaaaaatacaaaattagccgggcatggtggcgcatgcctgtaatcccagctactcgggaggctgagggaggagaatcgcttgaaccggggaggcagaggttgcagtgagctgagattgcaccattgcactccagcctgggcgacaagagcaaactccgtctcaaaaaaaaaaaaaaaaagtaaaagtaaaaaaggataaattggacttcgtcaaatttgactagaaacacttaggattcatgaagacatgaagcaacgagaactcccatgtgtgagtggcatggacagacgatgctgccagccgcagagacacagggggctccccacaggaatcagcaagtccctttcttaggaattcgccctcgactgacaaaaacatgcacacaagaagacctgtacaagaatgctgatagctgctttattgacagtagcccccaactggagataacccaagcatggacgcacaggagaacagataaatgcaaaagccgctgagcagaagctaggccaaaaaaagtaacccactgcatggttcctgttatagaaactcctagaacaggcgaaactaatttacagtgaaagaaatcagatgggtgatgtgtcttgtgggcagggccagagaggggaggaagagagaatgttggctgggggatggaaacagcctctctcctgataaggggtgggtcccatggcaaaggcatttgtcagaatgcactgagctgcactcgatccatgcattctgacaaatgccaattatgcctcaacaaaaagcctaaaaaatttatattgtcatttcacaccatacaccaaataaattccacctggattcaagagcgaaacctaaaaacaaagaactaggacaagcactggagcatattttttttataatttggggatgcagaaggtctttctaaatgtattacacaatcagaagtcacaagacagatttctgccacataacaaatttaaattcagtatagatataaaactacaatatataaagagctcacaaaaatcaataagaaaaatataggcagcacaacagaatttttgcacaaaggcaattcacacaggaggacaggctagtctgtaataaatataagaagaagagatgctcaattttatcaacaatgaaactgcaaaataacactgcagtgagagtcaccctctggacaattagaaaagcaggaagtgcaacgggggggggcctcagtgagagctgggggagacgtacatcagtgaaggcaaaactggctggcgtcttctgtgtgatgttttggtaagcgatctcaaaaggcaccattcgtgccctctgaccccttccctaagaaggcaattgcacaaatggataaagatgaggtacgggattctccttcgcagcgtcattgcacttcgcgaaagaaatatcatacatacgtcacaaaggtttcacctggtccagacgcgcgttgcgtccgacgctcctgccaaagccaggggggctctgctctcccttgcctgacaggagacgcactcggcccgagtgaacacagcgggccgcagctgtcgcccgtgtcaggcgggggtgagaagggggatttctggagtgtttcacgttcctcttccaggtctcgtgcgttgagtttttggtaataagtaggtgtgactttcacaaaaacaagtgcaacctcgagttacctgggtggcctctgctcacaacccatccgtttcggtggctgcccttctgtggggagggcctcagtccacccagcctcaaaagaccctgagggggtgtgcacagctggggaccccagggccctattcagccccctcggaacgcactgacccaggaaggccccagctcacactcccaggactgacggagcctggccggaggctgagccctgttccctgccctgggggaactacgttcccgagtcaccatgggtcaggggaggagctaaaaaaggggccctgggtccctcaagcctgcatgtggggggcgggggtgccaggagccagcaagcacaaggacccactgtgtgtgggcactgctgccatctccttggccttcccggctggggccccctgggctccacagtgtcacacccaagtccactcactgagtgcctcagcaggccgacccccacccagtgagctcagaggggcctcccctccagccccacaagcctgttttctctcacagactacagcctgggccaggacaagggtgcaggctgctctctgcccaagtgggctaagaacctgctaggagctttgcccacgtgaggggttctggctgctgcaggaccagagggccaacctgcatgggttttccatttttatttatccaaagaggagaaagagggaggggagggggagggggagggggaggcctcctgccctgccccggcccacctggtccctgtgagactcacctgcctgttccccgcacctgccgcaggtcccctcagcccccttcccaggcctgcactccccggagcacgtgcagctgctgccccacagcgcaaaggccctgtaaggtctcttcctcccaagccgagtctggtttagggacaaggcggtcacggcagagctgtccaggaccatgtgaggtgggctctgtgttgggtgctcattttaaacggctggaactttctgtgacagggcccagttgtggggccaccctggtgggccttcgtgacacccaaaaagtttgctgttggcttaattcaaccaatacctgtttgtacacccagcagctgacccagggcacggagcagaacaggtggacactcaagccacaaaaattaattagagtcatctgccagctacgggctgtcccaggggaaggggttgtaccagctgctcctctggcagggctgctccccctgcagggctggtggagccggcagagcctgaggttcaagctccagtgggccctcagtcacctcctgccactgcctctgggatgaggtgacctgcgacccctacaccctcctgagcccgggcttggcgggaacccagcccaccccacacagcccctcctcacggacgcagacgtgaaaggccgtaggctgtctgggctcctggaggaatgcggcctcccctgtggccctgtgcagaggggtcacaggtgggccatatccatcctgggtccgcctgcccagtccttcatgcagttgcgcaatgtctggtgacaggcactcgtacctcaggctggacgaccgcgcaccctgctggggccgtctattcacaaagtgcagggcagttatgactgtgctggaaaagcatcaaaaacacctgcgtgaattctgtgtattaaaccgtggagtgtctgagcgtgttactgaggttacacgaaaagccctcctgtggtgagtgaggccagtcagcatggagaacatagcaggctggaggctttgggtctaggggtccccgtagaggagtgggggtcatggctggcaggaagtaggacgggctctggctctcccttgtccggcctcgctgttcaagtgcagctctgcctctggttgtgggactcacctgatgtgccctgtcggcttccagaatgacgcccagagctgggcac

SEQ ID NO: 1883768 - DNA, 4001 bp, Homo sapiens
tactgtgtttatgttctaaatatcataccctgccatccacacaaaattccaccattacacgcagagcaggcctgggaacgtgcttccgcaagctgactccgtgcgagcggcctgaacacaaggggtaaagctcacatcctatctgtgctgtgaggttctcacagcctgaagtccagacagatccacctctcacatcctggtgtgccacagttctagagagcaaagatggtgtacatgaaagccaccagaaggcagaaaagccacctggaaagctatgttgagagctgtggcagagtgagccctgtatttcagggcatttaaggtatactttaaatgggaatatggctaagtttacaattgtaaaaagagacggcaatgttcaaagaaagttgtgtggtttctggtgtggatttcagaacagaaatccaatacaaaagtatgtaaactactgactgagctgtaaagaacccagaagcaccaattaaagtccaatgcattaattccactcgagaagcctttggacacacaatgaatatgagatgctgctggtttcctggctataccggaagaagagcatcagggcactgctatttagaccccagagaatgtgtaaatctccatctccatctttctgagaaaatctatacagactggagagcgccctatggagcaaacacagaggccctcacatcttcagaggtcggtaacagtgggcccactgctgaaccctgtgcaaacagcagacggcagggacactctgcaaccagtggcttttctaataaagtctggctgaacctgtagctaaaagccacctattaaatgccctctctctttaaacagataaatgctaagctgaccatttaagaaaaattagccagattatgctgtccatggcttgcttcttctttactttcatttgctataaattcacagtaaacaaaacacaatcttcaggaacaacacaggaaattatttatctaaaaaagaaagttctttgtgattttagatcagctttttaaaaaaaaaatccctttatcacagtataacaggggagatgctgttgcaggctttccacaggaaagttccagaggcactgaattgaataacagaaagaaaaccctaagaaggatgtactgagagacagaccgtcctgactttgaaagaatgttctgaaacatcgattaaatgtttcataaaccaaataagacaaagaaaaaatgcacaaataaaaccagagaactctattctttctcctatcataaaaagcagatggtgtaaaaagatatgtctaaagtaactaaagacaattaccccaatcccttttttcaatctatacccaccttttaaactctagaaaaggaataatgctctgtcaaagggacagccatgaccctcacaagcatggtctcagctttctaaaaacctgaagtcacactattcacaggccatgttctaaagttcagactcatcggtatctggcctcttgatctgtaacctaaggttgatggcatcaatgggccagtaagccagacccctgtacctgcaatcatactgtgagaaacggcctaatgctgagcttctgtgggttgccaggtggaggtggcaagtgtcaacttgcccttttgggatcccggggggacctggttccttgtattttaccctataaaagcatttcactaattgcacacactactctgacactccacaatggtgttctttttcatgttcaatctgaaaacctgccttgtagggctctgttccacaatggtgtctcctgacaatgctggatgatgacgtggtgagccagctggcttagtaatgaggccctggattcgcctgcaccaagggcagccagcaggagaaggggaggagaggaaaagggggcctgggtgggccccctggacatcaccaagatggtgccggcgccttggccggcactgctcctattcataagcctcggtgtcctacggggcagaggccctggtgccagcaccgtggtgggagaggcagagctgggtgctgccctcacacaccacgatgacaggacctgacgtcagcatagccagagtttctgcctttattacgcttagactctggatcaaggcagacaagaggaaggacttctaagttcagcacactacatattaataaatctaaagcatcgagcatcctgaaacagcaacagagcccaaagagattatatctaacctttcctctaagccactctgtaacaaaacaaaatagaaatgtcttacttatttgtagccagaatactatgaaaaagcaaccagggaagaaaaagaagctccaacagcagggaaaagaccctcctgaacatttcacatctccaagccctccaaagcagaagacgaaagtcatctctaatggaaagagttctagcactgaaaggaacgaacagaaccacaactatggatcaattttagaatctggagatgtaacaaccatcaaaccttcattctttgcccctttggtaagttcctctagagttctattaatcattaagtgcttgagtcacagaactatgcttttggcccaaatgaaattcataaatgagcattaaagctgtcacatgattgtgttgctggactcacaacttccacctttggactgcaaataaatgctatggtgctttcttcccaagtaaacaatgtattagtaacagcatattaagataaataccagcttgtggacccgccccctgaccaatggcttgtgtacgatgcatcaaaagaggtagacgaggccaggcgcggtggctcacgcctgtaatcccagcactttgggaagccaaggcaggtggatcatgaggtcaggagttcgagaacagcctggccaagatggtgaaaccccgtctctattaaaatacaaaaaattggctgggcgtggtggtgggcacctgtaatccagctactcgggaggctgaggcagaactgcttgaacctgggagttggaggttgcagtgagccaagatcgtgccactgcactccagcctgggagacacagcgagactccgtctcaaacatacaaacaaaaaagaggtagaggagacctagacccattacacagggtctgcagggcctcttcagctactgcccgtgctacgggacaggcctgtgacgctggtcgttttttccatttccaatcaacctggagtttcctttctatcctggaaggcagccggatgagtgctgaaacaggtatgcccttacaatctgtttcctcacattcacttgctcctactagtttagtttgcaattctacatgaaagagtggagcctcccaaggttacattctttggcactttgggagagtatagctgtcttagggtggcctctaaatgttgttagcaagctttttctagctactcccctctgtgctgacaccttactaagttgagattttttttttttttgaaactgccttttgtcaattagctgtagtcagtcagcaggaagagccgctcacgtgcacacgagcacctggggccaggcatgagggccagaccctgaagggagacctccagtgaagcagcaccccggagaagacacagtcacaacacacgatacccacactttcttgctccaatccaatctcggagtcctcttcctttcaatcaacactatttcccccacacagtgaagggaagaacgggtgctaccaaattctcccagaaaactaatgttcttattaagcatatcaaccaaactcaaagcagggcacgctgcagcatgggcctttcggattcgtggccaccagcaaaacaacacagggggagcccatcccctgaggcatggccccagtctgaaagcgctcagtggagtctgcagagatctgaaagcgctcagtggagtctgcggagatctaaaagcgctcagtggagtctgcggagatctgaaagcgctcagtggagcctgcagagatgctgctgcctgaaggtcagtcatggacttcctgggggaaagaggtcagaaaggcaaggt

SEQ ID NO: 1883769 - DNA, 4001 bp, Homo sapiens
ctcaccacacagctccccatgtggccccaagcggcccactcaccacacagctccccacatggcccccgagcggcccactcaccacacagctccccacgcggcccccaagcggcccacgcaccacacagctcccaacgtgggccccgagtggcccacgcaccacacagctccctacgtgggccccgcacagcacacttactgtacagctccacggtgttgaagggctcgtccccgaactccagctgagtgaagatgatggcatagtctctgaagttggtggccagcacccagagctccagcacgcctattgctaggaaacaaaaccccccgcctcaggggagggcagctgctgtatccatccaggggccgctgagctgatgctggccacagggacagaggggccaattcaagtgagagcccccctccccaggagacccctccaagcacacccagagcccccaagctttgtcccccacccccgaccccacctggtgccagcatcaaggggctttcagacactgacggacagacagacaagcactgccccagcctgtcccaggtgtgaacgaggagcggctgggtcacaccagcccagccctgtacctgtagacagccactaaacaggcccctcgccctctgcacctatggggaccttggctggacctcactggtgtctgagcctgctgggaacaaggttccaatcctctgtccaggggcttctcttcaccctcaggatgggcagcaatcccaagaccagaacctgtagcctcctggctctcgggagcggagtcagccctccgtccctgcccgcagggggcctggggatgctgcagggaagaacggcctgggtgaggccgtggccgtcagactcacagggattctcaaacacccatccggagtttcgctttatcaggtccatgacactctggtcacaccctcccagcctggaaaagaaggggcctgtcacccactcagggtcaagaccccggggcccggtgagaggagacggagctcaggagtccaggccaggccagccagcagtgaggccagagcttccatcttctgccagatgccccgatgcccggaaacctgttctcggagagtggacggcgtgggagtcctgagaggggcggacactcccattcacttcctgagagatcctcagtgccagatctccaccaggaacgctgaatgctgctgaggacacaacaggagactcgacagacgggaggttcgcccgcgactcgggggaaagatggggtggggtgggggttcgcccgtgactcaggggaaggatggggcggggtgggggttcgcccgcaactcaggggaaggatggggcggggtgggggttcgcccgtgactcaggggaaggatggggtggggtgggggttcgcctgcgactcaggggaaggatggggcggggtgggggtttgcctgcgactcgggggaaggggccggcgctccctaagtggtcagtccccagagtgagcaaaacccagcaaaggtgcaatggtgtttgccaaggaaggaaactgaggctgagtccatgcgggaggaacagcaagaagaactaggaaagccacgtgggagctgccacctcagcctggagccccttggtcccagctcgccctgaggccaggcctggcccggggggtgcagtggggcccctgcccataccctgcaggcgcaggtgcagggggaaggcacgctggtgaggagggcaggttcttctctctgggccccgtacctggctcagtggttcaggcctgggctctgtcgccagcctgccagggggtagacacccaccacgccacccagcaggccactcttctgtgaagggaggcgggcaccgactcctgccccagcacggctacccccacagcccggctgccctgtaggtgtcccctgtgtagcacggccgccccacagcctggcccacccgacccctgcacgccgccaccagccatgcatgtggtcgggtgcgcctgcctgaggccacaaggccagtctggccaacagcgtccatgaccatattgtttggggatttatgttatgaaagaaccagtggttcttaggtccgaatgcattatcctcctttaaacagaattcccgaaaaaggcctgctgagaggacaggcttccccagctctgaccacagcctgcagcccagatgacccaggacagggatgcatgaaggagcatagtcagagcagtgcccgccgcggtattgaaggtgggagtgccacctggaggccccagggacacagatgtgagtagctgggcagagggctggtggctctgcacagagcccagtgggaaaagtgacgggggtgcagaggggccgtgggaagcccccaggccgcggtgcccgggagcagatgtgcaaagtacatgatgtggctgagccacagtcctgcctgcgggaaggcctggcaggacccgcccactcacccgtgctgagaggacagcgtccgcaggttgttttctggagtgagggtcaccaccacccccacgacgttcttcatgtccttctccatggcaaagcccttttcccgggaggccaccgcaagcacgtaccagggcccaagaagctgcattgaggcggctcccgttagggccgccagccctccagcctccagcctccagcctccaaccctccagcctcagcctccagcctccaaacctccagcctcagcctccaccctccaaccatccagccctccagcctccagcctccaaccctccagcctccagccttccagccctgcagcctccagcctccaccctccaaccatccagccctccagcctccagtctccaaccctcccgccctccagcctccaaccttccagccttgcagcctctagccttcagttctccagccctccagcctccagcttccaaccccccagacctccaaccctccagcctccagccttccagccctacagcctctaggctccagccctccagccttccaacctccagcctgcagccctgcagcctctagtctccagctctccagccctccagcctccagttctgcagccctccagcctccagccctccagcctccagttctacagccctccagcctccagcccagcagcctccagcctccagttctccagccctacagcctccagccctccagcctccagttctccaaccctacaccctccagccctgcaacctccagtctccagcctccaattctccagccctccagcctccaaccctccagcatccacccctcctgccctgaggctcctgcctgtgggactccccaagggctggcccaactaattccccactgctcatgctggtctgggctagccctggggggcccagaagctgtgtggccttaaaggaggggctggcccccgaggaccagctctccccacccccaggaggactgtacctgctcagggtccagtcttcccaaccacacggcctgggccctgggcaccgagaccaaagccagaaaagcagccagcagcaggccgcccatcctcccaggtctacactgcgccgcaggcccaggatgtgcagtccctccaggccctggagacccgtttatatggctctgaatttctccgtgtgggtggcactaactgccaggaaccctcctggcctcctgcaaaattacccaggggagcactgagcagtggcagcctctgagcccagatcagaccagctgcacagccaggagagggtctggagtgtgtggatcaaccatactatactgatcccctgctttcttccaccagaaggttccagaatgggcatcctaaagccagccgcaccacctcccccgttcctggggacccacgctctccctcgcccagcctgggaagcagggagactgctgtccgctgccaggcccggcaggaggccaaggtcaagcccaaggagaggaaccagggcgagaacaagtggttctcaggaactgcggttttggatatcttttgtttcaatcattaaatataaaaagtccct

SEQ ID NO: 1883770 - DNA, 4001 bp, Homo sapiens
cccagaaccccgggagtactctgtggcctacagccctattacccagcgtggtacccacaggggtgtcttcttccacgccctgacatccctggtgccccccttccctggggacatatctgcctgcaccagcctaaccttaaggacatccgtgtgcgtggcagtggcacggcactgcagaccatgctgttgtgtcaacagctctgccaggcgcagctggaaggcagctcggacccgctgcacggcctcagcgtcctgtggccactggccactgccctccaggtgacaaaccactgaggaagaagagtcagaggtctcatactgtggcctggagctggaactatccctcccactccctcccaagggccctcttaccggtcatgggctccacgtaggccggacagggcttatcgagccggggcagcagtgaggaccgctcccgcagagtctcatagaaggagaaggctggacggactggagttggtgggaacacctgtggaagaagaggggctgaggaatgggcctaggactgggagggagtgcccagagtcaggagttggaagtggggaatactgggtgactggagcagaggtggggccactaagcagaaaggtcacctgcaccgttgcacctcacctctgtgtagcgcagcactgggtgagctccctgaacagcagacacggtcagtgggagaccctctagcccccacagtaggcgactgaggtcgtcgtagcaacgtaccgccgctaccagggcctcctcacctgtgctggaggtctgagagggagaagacggtcaggaggctggaccctacagaaggccagcttcacctggattctgccccagctcaggctgcagcagagccagcaccgccgcctgctggacatgccaggaagtgcaagctggccaaggctgagaggactctctccccgcagattgattactctacaatcactagccttgaccccaagacccttacctctttcaggccttggataagtgcatccagggggccccccacatagtggacacaggtttctgggatgtcagcatggctgaaaaagaggcagagacacagtgagaaaatttggggctatgttctcgctcaactgcctgggccagacccctgaaaaggctccccagcccacactgccttctggaatccagatgccaacactcacagtgccaagaggtgggtgaccacctggtggggaataaggcgcttctgggacatagaggctgcctcccagaccacagcttcccgaatggctccgtcctggaaacgccgaagctccgagcgggatccccagaactggcggaatttagcagcctgaggaggcaagggtggtagtagagctggggaaggaagggctctgtggaccctccccaacaagcttcagtccaggtgccatgaggacgagccaccccattccttccagtgtacatgctggggtcccccacctcaggctggtctgcctctggacccagctcaaggacgctggtcagtccctcaggccggagaaggagtcccagggtcagggtcccagagtctttgtgctttggtggatcttggctgatgtcccactgcaggatttcaaaaggctgagctcagtcctccaatcctccagcctggcctagaaacctactttctagctagctagaaacgcctagctggaggaatggtgtgtcctttgtgtctcttgggaccctggatccagcccaactcagacccaaactccccaacctacaccacctcacctctgggactgggggtcgagagtgagccagcaggttcagccgagcccccaggccctgctccaggagggtggtcagggggcccaaagcagctgagacatagtccccaccattgtcctgcagctctggccagagcttcagccggtggcacgctgcctgcaggcgactcagtggacggagactggaggggtacaaagggccaaagaggggtaatcaggttgctggcccctagtaccacctcctccctgaatgatctgagcacctgtctgaagacctttgccccaccactgtagccccgaagagacaggacccgccaacataccctgtcacccctaaactcactgcaggacatggtcaaaagcccggatcatgggtttgggagtcatcaacagcaggtggaacccgtcgtcagctctgctgtccagcaacatcatagacagccgtgcctcatgctgtacctggagccacagaagggaccatccctgtgcccttcattgatccaagggcttagaccaggagacatgccctaaacttaactctttgaagaggagtttctggggttctggtacttgcaaaagggacagagtctgggctgagacatcaggggaacacagattgggggcccattggtacctggtggtaagtagaggcagtgacatcagcacagaggttgagatggcctgaggaatccaggaagacaacggagaaggcctggtggaagtcagccagggccggcttggggggtgtagagagaagcaggtcaggattggcaccttacttgcaggcctcctggcatagacctggcccttccccaactcaccaaagagggatctgagctgagacataaactgatcccgttgactgtcaggtctgtagtggctgaagtgaatcacaagtgtattagaaggtatccccttctggggacccagccctaatgacaccctccctcagccgattcagtttgctcatctgtctgatggcaaaacaccaaaagactgctactgggatgagaggattcccaggaggagtggagcccctggcctttccccacctagttgcctcacccagaaactgcaagacacttctcaggacctggtagccactcatggtggtatggatcttgcgtgtagacacaaggaagacaaccagcatggagacaaggaacccagtaaacccaccctggccctgaaagagacagggagaggctgaggtcagagcctgcccatcacacaggcgctcaggtagggaggctgcgccacccccaactcaccttgtccagctcccgctgccgcagccagaccttcagaagtgccacgccatccttcaggccctgggctgaactcagaatggttgacagcagctgcaaatgggactcgagaactgtatcttgcaggacccatgtgttatagcggggggtaggaggctctgggctacctgtgggatgaaaagggaagccatgagaggaaaagtccccacacctcttccctccagctccacctcaacaccagggcctgctcaccatcccctgcaggactctgccctcggtaccaggcagagcgcacattgttcttggttggcagcaagcggcacgggcggaagaagtcaggtggagggcacggatgcagacgtacagtgaccaggcgctcatcctttcctgccagagacagtgagtgctgagactctgcaggagcccttggagccagagggctccccatcctgtccccccatacttgaggcctccgtgcctctgtgccttctcctccagatttaccatcccatgctatgccctcagcccaatgtgtgcctctcaccacgcggccgcagcaacagtgagggtttcaggtggcagccatttgtgtaggagaagcaaacactgccaaagagggggtcctgggccaggtggtgagccaagtgggccaggtagagggcacgcttgcggaagtagcgctggttcagcccgtccttgtcctgtaggatttcctggaggggccaggggagaagagaaggccaggcacataagtgcttgtggagctgtgggccaaggtgaaaccaaggtgagagagccagggctcctctgctgacagaagtgcctgagccacggttagcaacactaggcccagttctcatatctggagagcaaagctccaaaaggacagcaactggcccgagggatctaagctgccttcaggatgcctgcaatggtctgctcttctgatttagaattctgacttcaatcccctggcaagcgg

SEQ ID NO: 1883771 - DNA, 4001 bp, Homo sapiens
gggtttttatccaatctctatttagatatgtttgtgtatgttgggtcttagagtgaaaagtatggcttactgtaagtagcagtaaaacgtttgagagccatatataaatacacacctttgtgcacacaagcaaagcctcttttaaagacagttcaaaactgatgaaggttattaggctaattcacatttatagcacctccatgcgtcagatatttggaaaggaagggaggggttaaaaagccatttttatgatggaaagaacatcctaatgtttgattcatacttcaatcaatacacagtagctttgctttttcctctatgcattttcagaaggtggggggaaaaaaaccaaacaaacaacaaagaggtttagtgaaaccctgtctctactaaaaatacaaaaatcagacgggtgtggtggcaggcgcctgtagtcccagctactcgggaggctgaggtaggagaatcacttgaacccgggaggcggaggttgcagtgagccgagattatgcctctgcactccagcctggcgacagagcgagactccgtctcaaaaaacaaacaaacaaaaaaccaaaaaaacaaaaaaacaaaatcaaacaagccatctagagcaaggcgcctattctgacagggcacagggaggtggtggagatggagggctaggatggtaggctttcagggaaaatagtctgaagtgaactcttatgatgccagtttgttttaaggattcatatactaaagcaaaatactttacagctaataggtagttttatacttgataatgtgggaaaaggcaaagttaagtgataactcaagtaactggaaattttgtcactagtactattttaagaaagtagtgattggccgggcgcggtggctcacgcctgtaatcccagcactttgggaggtcgagacgggcggatcacgaggtcaggagatcgagaccatcctggctaacacggtgaaaccccgtctctactaaaaatacaaaaattagccgggcatggtggcgcgcgcctgtagtcccagctacacgggaggctgaggcaggagaatggcgtgaacccgggaggcggagcttgcagtgagtctagatcgcgccactgcactccagcctgggcgacagagcgaaactcggtctcaaaaaaaaaaaaaaaaaaaaaaaaaaaagaaagtagtgattacaggccaggcgcggtggctcacgcctgtaattccagcactttgggaggccgaggcaggtggatcacgagtcaggatatcgagaccatcctggctaacatggtgaaaccctgtctttactaaaaaaaaaaaaaaaaatacaaaaaattagccgggtgtggtggtgagcgcctgtagtcccagctacttggaaggctgaggcaggagactagcgtgaacccgggaggcggagcttgcagtgagcctagatcacgccattgcacttcagcctgggcgacagagcgaaacgctgtctcaaaaaaaaaaaaaaaaaaaaagaaagtagtaataacatgaaaaaatagtttgtataagctaattagtatattttgagaaagccagctggaaaaggcctcacggttgggcagtgtaatcctaaccaaagtaccagggttcaggaattacagaaatcagaactgctggtgttcagtaattgctgacaagtgtctccacttcaggaggaggacaacccagattccatagagttggctttgcaaacataaacttcttgatttatctacaggtatgtcaggctgagagaaaatggggtaaagaaagtaggggccattcaaagaacccatctcaggaaaataacctgtgcagctgcctcggtgaagccacaaagtgcctttgaggctgtggaaatggcatctccaaactctggcaggtttccgttcttggcattttgggagatgccagtcatggcctcgcccagcacctgaggaacagaggacatcaggggagtcagagcatgtcctcagaaccccagggcagcatctggttagctccatcctactgccctctctcctccgagttcctggctgtgctgacctttgagttctccattacactgtccaggcaaccaaagtaggacatgtcattgatgggctggactgggttctccaggagttcccggaccgtctgtgtagggggagggcaaagtgagatccaagacacctccctcaggcccaaaaccagaacacttccctcaacctcaatgccatcagcctgccatgtgtctacctccaattcccgcagggcgttatcacactccttctggccgggtgcctgctgggtgcacatagtgatgagctgattgatgctgtcagttactgccctgggagtgacagaaagttgagtgaaaaggtgaataggtcatcattcctgggtcctatgtaagtatttatcttttgcctataaccattcctaagccaagaagctctcatgaactgcctgctccccagtctctctcacacagtccagggctgggcttctcagcaactacttacctggcagctgcagccagctgactcttgaggttaggggcagcagggtccgtggacagggccttggcagccagaagaagtttgcttgaagacatggagatgcccttcaagttggacacaacttgggctcggtcctcctggctctgttgaaggtgacaaggtcaatgcattgtcctgtcctttcttatctgtctctaaaagggatcttctttcccagacactcaagtagtgctagagactggggagggaagggagccaggagcaagtcaggactggtcactcaactgcctcctatctaacccttagtgggaaccattcaaccagaccctctgcctcttcataccggagcctggcctgccatctccacaccagcttccaggaaggtgctgaagtcctgtccaaatcggcctgaggctcgagccaggtcctgaggggttccccgagaggcctgcaccagttctgtggctgcctgattcagcccagcagcagcttcattcaaccggctctgagcttcttgaaatgtcccagtgctaggaggaagctgcaaggtgagaggggaagtcagacagaagagtggggaatgatgcagggagaagtctggtaaaggagggctgaaaaggtgggcacatagcctgggagtaatgaaaggggacagatctgggaagtcagggtcaaaggacaaccgagagggaggaaggagaggcctggcattctttgactcctacgttcccccaccccctaccgtcctcctaccgagtcactcaggagtcgcttgctggcatctccaactgccctcagggcattatccacatcgcgctggccaggtaggcagctgacacagcggttcagagcctgggtcactgctttagccacctggggtgagaaaggagacagggttgcccaagtgaaaagaatttgagagatcgcctccattcacgcgacatgggagatgactagctctactgcctctgaaagtgaaaaaagaaagggggcgttgtaggtgaacaggctgaggttagggtttcaagtgacagtaattaaacttccccaaacttggtgtttagctcagcccatgactgaatccaactgagacacttctacaagaccaagagggccgggcacagtggctcacgcctgtaatcccagcactatgggaggccgaggggggcagatcacgaggtcaagagatcgagaccatcctggccaacatggtgaagccctgtctctactaaaacaaaattcaaaaattagctgggtgtggtggcgcatgcctgtagtcccagctactagggagtctgaggcaggagaatcacttgaacccaggaggcggagactgcactgagccgaaattgcgccattgcactccagcctgggcagtaagagcaaaactctgtctcaaaaaaaaaaaaaaaaaaaagactaagagaacataagggtggaatccacagaggggctgtcaagagcagacccaagaagacatcactctgtgag

SEQ ID NO: 1883772 - DNA, 4001 bp, Homo sapiens
aactattaaaaaaaaaactggtcgggcagtattcaggcgacgtggctcatgcctgtaatcccaacactttggggagctaagacaggaggaccggttgagcccaggagtttgagaccagcctgagcaacatagtgagaccttgtctctactaaaaataaaaaattagccgggtgtggtggcacatgcctgtggtccctgctactcaggagactgaggaaggaggatcacttgagcctgagaggttgaagctgtagtgagccatgatctcgccactattctccaacctgggcaataaagcaagaacctgtcttcaaacaagcaaataaaaacttccttatcctgaaccaacagctgcctccttataatttctatccgttggacttacctagtatctctggggccaaatagaataaaccctgtttagctattttaaggcacttaacatttcctcagagcttaaagaaaaaaaaaaagacaaaatttttaactcatcttctcaggatagactgcatcctcttagtatctgtcaaagatgtgctctagccagtatcaaggaaagcaagagagtgacttgtagagacaataactctattgctacagtttccaaatcccatgaactttcttagtagccacatcacactgctgactcatcttgtactttgaagaaattaaaattcttcactttgggaggccaaggtgggtagatcacttgagcccaggagttcgagaccagcctggcaacaaggcaaaaccccatttctactaaaaataccaaaaaaaaaattgccgggcagggtagtgtgcacctgtagtctcagctactcgggaggctgaggtgggagaatcacctaagcccagaaagtcaaggctgcagtgagccatgatcacatcagtgcactccagcctgggcaacagagcaagaccttgtcaaaaaatatatatatattcctgtaacctttctattaatgagcactgatttcatcatagtaccccagtactctgcttgtgaagttgccactcattgcttaaaactgaaaactaaggattttacatttattcatgtactgcttagtccaaccctgttgaactctctaaacagttctaccattcagcaagaggtggattactatgaagccaacgaagtgtcaaggcccttcacttacacagtcctttccaaggcccaatactaatgttgcactgataattttgagttatttttttaacagaacaccaaaatttgtataagcccaacaaaaacgaggatctgcccttgcatctggcatattgtgtacctgcctcaacttcctattagcaataaatctactaagtttctcacctcaatccttttttaaagttattgatataaagttaacagaatttgcctacttgggacttttaatcccttttcagcctttgttcaaccaatgagagtcttaccttagtgagaggaagtgtctcaggcagaataagcccctccttctccaatagactcttctcctcatctgtcagtactagcctagcaatctcctagggtaacaagaaagtggacggcagttgcatggggatgtcagagaggaatggggaatcctgcccccacctggggaatgtgagagtaatctcctgaaaatcaagtcaagtacctgctctgccagctcctccatatgctgtggagtcatctgggtcccctcttttctacagctctcactctctgcaaaagggaaagtatgaatagccaggcccatgaaccctgtcctccccgcaaacttatttcagactcacctagatccatagagacagtttcccgtgggagggagtaggtgtggtcatggtggacaaggcaggggttggaggagctgagaatgttcaacgacgctgggggactcagcagggagcacagcaaatcatctacttcccagtcgctcggtacctgcgcagggttccaatgaacaggccttgaccttatcaccatcacctgacttcatggacatcccacgctttccccagtcagaaccccaacctacctcagaaagcggcagcgcccagtccagtggggccctcacggcctcatcgggtgccgtccccaaatctccactttcctctagcaggaaggccagcaggtcttggtcaccagcatccaattccagctccatttgggacaactacggaaagggtgggccaccgggccccaacgtccgaagcccagacacgagccccaggccagctgtaggcctcgggcacctatccactgtccctctacggccgggattccccgccggcggctttccatagccctctccggacccgcctcccaggctcaattctcctcagcctccaacgcagcgaaagtgacgcaccccaccccgtggcactgtgggacttggagttccctccaactgagaagaggcttgggtgcagcgccacgtcccaggggctatgcaaatgtaggggacggccctgctgccgcctcgcaccccgagggcgggggttccggggctccggctccgccttctaccccaagctagaaaaaggaagagttctagcctgaaagggaactcgggcgtcgtcctggcgtcctctccggattgcgccgcaccctcgcttcctgccagggaggggctgccgggctttggcggctcccgagcatcgagaacggggccagagcagcttcctgcctgccccccgcgaccatagagcgcgggcccagggcgccgcccgcgggtgggggacgttcccaggacggaagtggccgagagagtgtcgaagggagggcgaggccggagcccgagggcgacccgagaagcggcggggcggcgggccggcgggcggggcgcagagccaggcagcgcaggtaggccagaccgggccgggcgggggccttagggtggggccgcggggcctggccccggggcgggcgggccctgcctctcttgcgtgtccggttcgggtcctattagttggagaggtcagcgtccagcgcatctcggcttgagctcggcgtgaagtaggccgtcttggggaagacaggcctttcctgggagcagtcctatgtctgggataggctttggggagcgtgaggagtcgggtggcagcggggcgcagggcggggacgggctttggtgttagctgatagcgggcatgtgggtaggaaagctttgggtgagttggggattaggtggggtccgtttaggaatcaagggtcgctataggagttaaaagctggggttaaaacttaagagttagtgtgagtcaggtccgttttagataggtaaggtttagattacggtcattatcttgtttgctgggatggccatcatacgtcataatttgagttcagggtcaggttaagggtcaacaaacaacaggaatcaggttagagcttgtttgagggattaaagaatgttggcatggtcggtgttaaggataaacagtgaaagcgtgagttaggaatcaaattataaatgaactttaggcttaggggtcaacatttagggttaacatcaggggatttggtgctaaaggcaaaacttagatcagtttcagggatcagggattggatatgagtctgtgctaggaaagggatgaatgtccaagccggtactgggaatcaggaaacaaattagaggtggggttaatgttaggaatttggggcagctttaggggttgtggtttgaggctagcatagttgaccttgagcagataaaatttaagaggttggcagtaggtaaatgcccttcttttgtagggaaatcctttattcctatgtagttacaggggcttctttttacccagagagataaactaatttcaggctagcgttctggctttagctagaattgcaggcatctgggattccagcttctttattccattctctaagcccaaggcccttgctgtggccaccacagttaggggacagagattctggactgtgttgtttacagacaacataggtgggaaatagggacccaggatgtacaaggcctagtcacaagttggggact

SEQ ID NO: 1883773 - DNA, 4001 bp, Homo sapiens
tcacgtgttataactacacatttgggtgttgctttgtttaatgtctgtctctgccatgaaatgcaagctgtaagggcagagcctgtgtcttttgctcattgttctttcccagcacctggaacactgcatgcacataacaggcccttaataaaaatttggtgaataaacacatgagttaagaacgtatgaataaatgagccccctcctttgagaactctaatgtctaatcaccagttgcttcactaaatgtaactcctggccaggcacggtggctcacgcctgtaatcccagcactttgggaggctgaggtgggcagatcacttgaggtcaggagttcgaaaccagccttgccaacatggtgaaacctagtctctaataaaaatactaaaaacaaaaaccaaaaaacaaaaaaaaattagctgggcatggtggcaggtgcttgtaatcccagctacttgggaggctgaggcaggagaatcgcttgaacccgggaggcagaggttgcagtgagccaagactgcaccactgcactccagcctgggtgacagaatgagactctgtctcaaaaaaaaaaaaaaaaaagtaacttctgacatgccaggaatgaagcctctgccggttcccctgagatctgctgacagtggtcactgcttaggggcagaaaaggcagacgaggggccaaactaggtatagggagagcattttttctagatttcttcccaccaaaatagggcagaaaagaaaagaagaaatgtacaagttataagaaatattcagaaggtaatagggcataagccccacctccccagcctaagtcctctggagtcagggctggaaaacaaagcagaaagggcctccgggcagccaaagttcaaacacaaaagcttaggccttcctctagaggaaaaggagtctgggccctcactggagcccgccactgccaccacaggtcctaccaggccccaccgttgggatttatgtaacaactgcctaacttagtcgcttttatcactctaaagaggggctcccgcccggagctgcagccctctcacatctttgccctgggaccctcactacttcataaggtagcccctggcttttaataccatttactctctgggatgtaggattttggagtagttttaatgtctgtgtgtatgagatctgttttctacaattattatatagctcttgtaactctcgtaattaacttcttaccatattaagcccaaatattcctttcactgtttctgtgttggtcctggcttagccctgggccacacacatgctgcttgtttgctttctcctgtgacagtcttgtgacggtcattcagatatctgtgcccagatatcggctgccaggtcaaagttccccccagttctatcgacagcccctcccatgaccctgcatccagatcacctgcctctaaataatgtcattttctgggtagggggtgagaccatgcatggccctccaggaggggtccaagagacagttattagagtagatctccagagatacctgcccttggtgcccttttgtgacttactttgagtgacatcaggttcttgagtaatcaacagcatatttcaacattctgcagtttggcctttaaagaccagagagtagctggtgcccagcacggctaatgcgtcccatctagcttatccgaaaggctccaggaactggaggggtccactggaacctggggcctccctgggaccagacctcaccttctgagactttaactccttggtgagcatcagaacctgttgctccaaggctgccactttctcctgggcagttcggttccgtgtgattccttcagaaaagaatgggaaggtgttgttctggcgcttggctttctgagcgaaactgatggtcagagaaggcttgggtgcaggctttggagaatcctctggctctctccctgctcaagaggagaaacgcagaagttatgactgatgacatcagcagttctcaaacctgagcttgctttagaagcacctggagggcttgttaaaatgcggatggttgggccctaatttcggagctctggatttaataggtctggggcagggcttgagaatatgcacttctaaaaagttcctaggtgatgctgacacagcttgtccaggggttagactgtgagaaccactggcctacataaacgttattgcactgtgctggcccatctgctaaactgtgcctgtctccttccttcagatcccacccagcctgcattggtctatctcatgccaccctgctggtgtttgccaagtggctttctcctcaggcacaagccctggcaggatgttctgttccttatttcaggatcccacctctatgtactaggagattttcaaagcacacagatctgtctgatgataggaacacaaaatgaatgtctgtactctgcattcttgctccagagagcagctcaagcatttaacttgattcttcttattccaagctaagttaagagatatatttcccccacagttgattgtctcaaggatgcatagtccttttatctcctgggttacaacctatggttcacaggccaaatccagcccacagcctgcttttacaaataaagctttattagaacacggccatgcccatttgtttatgtgctgtctattgctgcttttactcctcaaaggcagaactgagtgcttaaaacagaaaccctatggcccacaaagcctcgaatcgttactatcttgctctttacaaaaaatgtttgccacccactgtttttaagtcatcaaaattttattcttaaatcaaaccaaacatcagagaatcattcccttgtgttgccttgtcctgccctgacccagctgtgcttctggtctctgccatcagcctgcatcaagggacatttaagggcctgactatgtagccaagggcccttgagaagcttgttcacatgggatatatacatcatgcctattatgagtccccagcagaagaaattcccttcagccctaggaacttccaagaaaagctttgcttcttataagaaaatatgtttttagtcttatggacactggaaataatctagctgcttgcatttccctctttgccttggctgctgagcttacagccacatttactgcctactctcagatattttgtaggatcgtaaattgatcttatctaaatctcctaaccaaattactcatttgcaggagtatgcattttagtaaactattacctatttcttgggactaaagtgttaaaggtgttgaaaataagaatgtggtatggcatcccaggataggggacacgcagggctttggggataggccaaatgacttagcatgagaccaggccaagggctggccaaacagtcttgaacaaataaagagttactccagtaggtgacaggaaccagacactgagtgcaaaaacagtaccttgctcggccgggcgtggtggctcacgcctgtaatcctaggactttgggaggctgaggcgggtagatcacttgaagtcaggagttcgagaccacccggccaacatggtgaaaccccgtttctactaaaaatacaaaaattagccagaaatcacttgaacccgggaggcagaggttgtagtgagccgagatcatgccagtgcgctttagcctgggcaacagagcgagactctgactcaaaacaaacgaacaaaacaacagtgccttgctgagtgcaaaaccagaacagtcttgttccagatcgaagagaaatcaggttacactgggtacaaggcagcctgcagagctcagaaatatgtactacctctttctccttcctgtaatggggtataggggagcagggaagctccttgtagcactgctgccctctgatacatgactgtgcaccaactctgaggacaggcagggcaggcctcacagtgcccagtttataattagagaaaataaggcctaagacagtggtgttcaatcagtgccctggatttcataggagtgcctcaagggctgactgggaga

SEQ ID NO: 1883774 - DNA, 4001 bp, Homo sapiens
tgcgtcactggtgggaatgtgaaatggggtggccactgtggaacccagtacggtggctcctcgagaaattaaaaataggcatagacccaaagggatgaaagaagagaggtgtgcacacccatggtcagagcagcattcctcacaatagctaacagggaagcggcctgagtgtccactgacggatgaacgaataagcagaaaggccccagccatccacacaatggaacaataaataaccagcatacaaaaggcagggcattccgacacacacgctgcaacgtggatgaaccctaaggacgttatgctcagtaaaagccgtcagtcacaaaatggcaagtactgtataattccacttctatgaggcctttagagtagtcacattcacagacttgaatgtggaggttgccaggggctgggaggtgggagtagggagctgtttcacggatactgagtttcaggtttgcaagatgtaaaagttctggagatgaatggggaggatggctgcgtgaccatgtgcatgtatttaacactactcgactgtgcactttctgttaaaaacagcatttacaatggttatggtggtaaattttacattttgtgtattttatcgcaattgaaaattggaaataaaaaaaaaagagagagttttcccaaaggtttagatgccaaatagccaacggagaaaaagaacaagaacaggaatgggcaatgtttaaataaatacatagagccagtatatttaacaaaaaatgtagaaactcatcagtaatcaaggaaatgaaaaattaacatacatcatttttgcccaccaaattggtaaaaataaaaataagtgaacactcaagagctgcaagatgatggggttgggatagcacatggccctggtccagcgtggctggcagtgggcgtgggtatctgatgggatcaaccttggaagccaagtctagcctggctgtgcatcccacaagccctgggctgcatgctggcctgctggggtctgcacatccccgtccccacaaccctccacctccccgacccttgccagccaggcccctcaccctttaactcatcagcggcaaagaaggcagcaaggcagtcttccagggtgacgacaggcccccaaaaccagctgggggtacaggataccacaaacctacagacagaaaaggagtgcaggggtgctgccagggcctgggcaagaacaggagctgaagggactctggctgaggtctgtcaggcctgagccgcagaaggaccctgaaggcccagagaagcagccgggcacggcgggtcggggcagaggcctggagccagacacgtccgtgtcctgggccgagtgacatcatctctccgcaagcctggcctccttcatctgtgttgcggccatgatcatgctaccccctccctggggtcatgcgggtctctggcctcaggcaggagaggcagccctgggaaagctgctgcccttcccgccaaccaggcctgtgtcctgctgctgccctcccttcaacctgccatgtggtcacctccctgctgtccatcgccctccagctccaagggactatccaatcctggccacttcaaagtagccaagaaatcccctgcatattaagccaactcctctgcaggcttcggcccccagctcctcccaggacctccctggttccccaaatgcatggacttcactgtgtactgtctcccgcccaggaaaaccaggacaggcccagcccatgtcgcccagtagtggcaaggtgggcgcaccgtcggatgtactccacaatgaaggccagccagccctgggcggcatagctgtccccacaggcgcctggcttggccggcacattctggtagatggctgaatggagcttggccaggtcctcctttccaggaatgggcagtgataagtcctggaacgtttccactgtggtggatacctgtggggttgaaggtcagtctgctgcccatcctctggcaatgtctgcaccccaaaccccaagcagcaggtgaggggcagagggactactccccaggccatagacacgggatccacgcaggcagggccctcccctggataaaagcagggagcacccgtggagagcccaccctgcacccagtcagggcaagagctgctgaggccactggcagcctggcccagctccccccatccctggggcacccacccggtcacaggtgagacactgcacaaggctgagaatggagccgtcaaagatgtctgagatgacgctgcggtagcgctgctccttccgcctccggctgccagcactcaatacctgggctggggacacagcacaggactagcccagcctccacctgcctggccggggcgaggtgcgggccctgcggcttcctttgacaggatgtggagtgacatccgtgagtcacatgactgggtaagcaattcaccatctcatgcctctgtgtcatcctctgcaaaacgtggctcccacactggtgtctcaggggtgtacctgagaggagcccatagcccggccctccgccacagggggccatgagaaaggcagctacgggcgtaatctgtactcccagcctcaagctgacccaccctcccgtgccccccgaacctttcttgagcacgtacgacggtgccatcctcacggggcttgcacgaggggggctgctagacagcttggcatggccctcgtggtggtggacggggctgcaggggcgagaggagctgcgtaggtgagcatcattgtccggctctgggggcagagagggtaccatgctgggccagggcagccaggccagctccacgagtgggcaggaagatgacctgccagcccctcctaaagggacgaaagcctgaccctaatgtgtctcctctgtcatgtgcccactcctggccccagcacacaggccggagcagacctgtccaatccatgtccggctggaaggctcagggctctgggagagggctctgaattgggctccagcattatgagctaggggaccctgggcacatcactgagcccccccggaggctgacttccccactgtcattcgggtctagtgaagaacccgtcccccgggggctactgcaggtcggcgctcagcacccggtaggtactgggccataggctgaggttcctcccgcagtccccggccagctgatacctggcgtccggcaggggctggaggaccgtggtgacgggggctgggcctccgcgggctggtcgtcaagggcagccatggcagtgtccacatcagcgtcctcgtccacttgctccgagtttgtacgctgctggccccaggagaacttgcggtccttcatccgctccttctcagagatggctcggcccgcctcatctgggatcagcagctccgtctcggcctgcgagctgcccccgccacgcccctgcccgtcaccctcaccccggtcactgctcgagtcacaggacaagaactcatcttctgatgggctccggtcaccctcccgtttctcatccgtgtcactcgaatctgagtcccgagcctccgtcagcgccaccgtggccaccaccggctccttgagctcctcgtgcagctggtccatcaggcagcgaaggaactcttgggtgtcctagaaccaggggctgcatcaacagggctcccctggaggcaggaggaaccagtctccagcgccctgtggctgatgagagcgccagcctccatctaggaggacctcatgggcgccccctgcagaagagttgctcacccccacagcggcctcccatggcagtctgtcctaaccccattcttctgaggataacagtgaggactggagaggctaaaggacacctaccaggacacacagctagaaagtgtcagagccaggtatgcacctgggtccatgcaactccccggctccggctctgaatctcctgcctctgctgcaagctcagcacgggagggacagagaggcagtaccacattaagcccgagccacctttctccctacagatgagaccagtggaggtggg

SEQ ID NO: 1883775 - DNA, 4001 bp, Homo sapiens
atgttgctgtgtttatcatggaaatccagcaggggccagggaggctctgtgtctgtccaggccagaggccaaggaaagatgggcctggctgcgtggggctcctctctcccttgcccaggcgcccatctcaaggaaaagagatgtctcacatgggccctgaggggtagggggtgtgtgtgtgtgtgtgtgtgtgcgcgtgcgtgcgtgcgtgcgtgtgtttagtgcggtgtgtgtgtgacatagaaagaccctcccatatccgagacactaattaggcttctttaggctgctattcaagcatgggacacagaccagttactgcttcgttctcatcactgttttctaggaatcactcaggatgactttgtggaggaccaactacgaggggctgctctgtgagcaccaagggctcactatgagaacctgtcatggtgaggcaacaatgctcagtcagggtttagagacacaagcaaatgaaaacttcgccgacaaaatagtttgcaaaaggccaagaaatctagatctagctaatcgtcaacctacaggcatcaactagctgcagtctcacagcggtcaggctgacggcctgggtagtgtgggacttctggcagcatctggtgcagcctgcaatatccccaaacactcaccagcccgcacacctgccggcaaatgaacacgaacccataccaactctgagtggttcagtctaaaagacaacacggtttcttgcattttgcaagagcataagcccacagtgtctgtgagcagggacgagggcagctcctgggaggtgagtgtcggggggctcccacctgcccagctctggaggtctctgctggtgaagcatccccaagtcctgcctatccaatacgagcgcccctcaagcagctaaggggtatttggtgatcaaagaaatttgagaaactctggagagacgactgttttctccacatgctgtcaaatacctaatgaaggcaaatacgaaacccagtgacaacgggagtcccccgctggcagcgaggcctggctcagagccccacggaagccgagccctgctgctacactgggaaggccccacagcctcggccctggtctcagtagcctttctgggtcccagggctagccaagatgaactgctgccaatggctgagaaatgtggctgctctctcctggttctcagtgaaggacaggaaggagctacagtagccatgaatgagggtttcttcctaatgttctccaaaatgcccagaaaaaactaacacatcaatgtttatttccctccacagagagtccgtgactcacggtaaatatgcagaaaggataaaaaccattttcacatgttacgcggatcaagaccaaatactcaaacctggtaagggaaacaagtgacacactgtcgagaaggaattttcactgaggatactgtctcaaccgtccctctaagttccttggaggtgagttaattaccaatcagtcgattgacaaatgccccccatcttgcgcaaggtatcttttcaccaagctaagctgccctcaacaggcagggagttttactgctgtctcttcatactcaccagaaataatacactttgctcctcacaacaggcccgtcagcagcctcagagaaccatgccaagcagggtttcggcagaaggtggctactgcctccagaccgggcagccccagcctgcagcagcaaagggacctcaccaaaggttctggaggtcccgtgacctgccttccctcaagccaaacagctgaggggggatgtgaaaccccagctgcctcttacctttgcctatgacgaggccacacttatcggctggcaccgtgtatgttatctcctggacgccaccaggggctcccacgctccagtcgccacggccacgacctcttcctctggctgctgccaggcctccaaagccgtctctttcctggaaagatcacagggctgtagcgacctctgccactgccacagcaccactgctcctctcttttccagggaggaggttaagtgacaggatgtaatcaatgccacccatcagaacctagcacctttccacacttcccattctgaagggctctttcaagccagaattaacaccgatcacaggtgtatctggggaggacctgtgcagacgaacacacgtggttacataaacagctcaaatgtatccaacagaaataggcagacacaaactccaaggctgaagcccagcggcctttctccctggagctttcctcactgggccccgatctacaggcatcaagaactgctttctcccttgcagctgaggcccctctttcctgcggcggacacatactgggcctatgggaagtcagatatgcacagcctgctgaccctccccaaccaggcactgctatgagtcacaacacctggcactccagtcagcaagaaggataaacggattttactcagttttagaaaacttcttggctgttgtgcccccaagcagcagcagcagtaacaggttcaagagtgaccattcagggatacttcagaagggaggaacagagggaacctgccaaggcctcctccccatgtggggctggagaagtctctgaggcattctcccactgttcacccagcagagagaaaaacctaaatctaacagcggacagaggaagagccctttcattgagacagcagcaagtctcattccagccgctgtccgcggagtcattttggagctgcagtatttaaactctcttaaatgtggagggtgaacctggtcaagctaagagctatttcatggaagggagaagctgcacagacttttcaacacatgaagaaatgttgggcaaaacctgctcatgttgattaagagtaaagtgaacgtttacccagaatctaaaccagcagaaagctgagacaattggagtgcttttcccccgcactctgctcttatgagacaactgccaagtaaacaaggcaattttagaatggatgttcacacacgcacaggagcgcacagtcaactttctgggtatgccacagatctcgaagaaaaggttttctcccaaacatctcgcagcctctgcagtgcaaggttcataaactttttttgagacagagttttgctcttgttgcccaggcgggaatgcaatggcaggatcctggctcactgcaacctccgcttcctgggtttaagcaattctcctgcctcagcctcctgagtagctgaaactataggcatgcgccaccacgcccggctaattttgtatttttagtagggacgggtctcaccatgttggtcttgaactcctgacctcaggtgatccacctgccttggcatcccaaagtgctaggattacaggcgtgagccaccacgtccagctaattttgtattttcagcagagacagggtttcaccatgttggtcaggctggtctcgaactcctgacctcaggtgatccgcttgcctcggcctcccaaaatgctgggtacaagagtgagccaccgtgcctggccaaggttcataaactcttgctacaaaaaaaggatgttagagatcatttagagcaggggtgttcaatcttttggcttccctgggccacactggaagaactgtcttgggccacccataaaatacactaacattaatgatagctgatgagcttaaaaacacacacacacacacacacacacacacacacacacacacacaaaatcttgtaacattttaagaaagtttatgaatttgtgttgggctgcattcaatgctgttcctgggctgcgtgcagcccacaggctgaacgagcttgatttagtggccgttttataaacttgtctaatcttaagaattgcctgggtctctagtgaagacccaagaccctcccttggaaatgctgattcagtagatctggggtgggggcctacacatttgtaatttgagtaagaaccaccagatggctcttaggggatcacatagagagcactgcctggtgcaaagcaccctgagtctgctgctgggaacacca

SEQ ID NO: 1883776 - DNA, 4001 bp, Homo sapiens
actgaaagataaagagagagaaaggcaggaagcaaagctttcaggaatttttaccgtgtttcattccacaacggattcggaaatcgaggacttgataaatcttggcatctgggttttttcgggggtcatacccaaatcgaatccataggctgcgccaggggcctgttatctgggacagaaaagtggggaaaatgtgaggtgaggtgaaggcccaggtccctggacgggccagagcctacagtgaggcagcagaagagctcaggagctggggacagggctctggatgcccagccctgctctgccacatgcaggccctgtcaccttggtgagggcacgtggcctttccaaaccttggtcttcctgtcagatggagggaaaaggagcaccctttcctgtgggtttttgttttttgggggagagggtctcactctgttgcccaggctgagtgcagtggcaaaatcacggttcactgcagcctcaacctcctgggctcaagtgatcctcctacctcagcctcccaagtagctggaactacaggcacgagccaccacacccagctaatttttaatttttttgtagagatggggtctcattatgttgcctaggctcgtctcaaactcctggatgcaagcgattctcccgcttcagcctcccgaagtaccgggattctaggagtgagccatcatgcctggcctcccatggtttttcagaggattaaatgagatagcgcccgtggagcctttaccatggttcctggcacatattaagtgcccaatgttactactggcctaatcgatgagacatcttctgtccctaaacggagcttttgaatggcttatgtctaaaaagccaatgccagccagccgcagtggctctcgcctataatcccagcattttgggagaccgagacaggcagatcacttgaggttaggagttcgagaccagcctgaccaacatggcgaaaccccatctctactaaaaatgcaaaaaaagaaaattagctgggcatggtggcgtgcgcctgtactcccagctacttaggaggctgaggcaggagaatcacttgaatcccagaggcggaggttgcagtgagcagagatcacaccactgcactccagcctgggagacagagtgagactccatctcaaaataaataaaataaataaaataaaataaaatgccaacgccaagcagcacaggtcgctctcctgagccggaagtccaacaaggcagaagaaatgagtctttcttgtgtcctactgcctgttgcagaccctcacagtcatgtcttacgctggcctcccctaatgctctgtgaggcctggcagcggggaggatccctttccaaccagcacctttggaacctcagtaatgacatgtgtctttacatgcttgtggatcaaaggtggatctgcctcccactgaaccccactcaacacaggtagaggacgacatggggccgctgtggtcaggggctgggttctgcagcccaacaggctgtggagggcgccctggactcagggagctgaaacttttctagctggctttaataagctgtcttagggatgctaggatcggggggccaggacaggggggaaggaaggatgggggtgccaggacgggggaggtgctaggttgggggcagggcaggaaggatgagggccaggccaggggtgggtaggaaggatgggccaggatgggggtggggcaggaaggatggggagccaggatagggggttggctgctcttactgtggctctaagacatcacagcagggaccagggaccacatgggtggaaaccaaggcaggtgggtgggcagctgacacttaccatgtaataggctatgaagggaagcaagaccttgagcttgtctgggtggacgctgatgttggccttgacagcatttcgggaccagatgggacggatgtcaaacagctggggaggccaagggcagaggctgagatgagcaccagcagcttccacccttcggccctgaactcccaacatgttctgggccccagcggcccctccagagaggagctggtagaggacaggggctggacacacagggcgtggccctaggacctcctgctctcactaattcatcccttccctcagaagcctgggctgcatgcccagcctgtgccaagtgcagttgtggggctgggtctctcaaacgataagagacatggtcgctgtcctcatagagcccacagcgcggtggggagtacggctcagggggcacatgctagagtcccagggtccccatgctgccccaatctacagaacaggtgcctgaggtgggacatcgtcagggctgaaggggacagcctggcccggggaggactgcaaaggtcagtgtggccggagtgtagagggccagggggctggggcagcgggcctcacgagccaattcaggtcaggaatgtgggctgtgcctggtgggcaataaggagccactgacagtgtgccccagtgactgctggaaatcaacaagacatccacgtggtctcccacaggcacactgcgtaagggaagcgccgggctccaggtggcagtggcctgtgaacctgatgctcatgccagtggggacgcaggactccacggcacccgcaagcccggggaaggagggctgcctggcagcacggttccagttctaacggtaagaaagtgctgggcctggcacactaggtgccccactggcttggctgcaatgagtgaatggaagaataagagctcagtggatcccagagctccacgtttatgtcacatctgaacaacgcacgcatatttttcttaagaactctaagaagcattttcaaccttgggaatgtagaacttataccgacacagcctttagacatggcatctgaaggtgagaagttcccatgcactaaggaatgggtaaaggtcagtgcagccaaccccacagccaggaacagggagcagctgggtaaacacgggaagccaacagagaggctggagccaccggggccaggcgcagcgcaggacttgccttcctcagctcctcctccaccttccggtccacggggttagtgcagactctcctccacgtctgggctgcagcctccagtggctgcttgggcacctcctcatcctcaaagttgacaaagatggcattgtgggggcgccgggctctgctcaggccaatcagattctcacctgagatggggggattgttgtagccttccctgggggcagagagtacaggtgagaacaggagcaccaaggccatcccaggcacccgctgggccagaccaggcagggagcccagaaccccccaaggcccacagccaccgtgtgcctctctctggacatctgtgctgggaaaggaccccagagttggctgctaaaggaacctgtattcacagaggaagagacgcagccacaactgcctatgacaactcagagaaaccctggggcctgcagctctcaaactggggaaaggccaaaaggtcctagaggctggagtgcaggaaagggcacctgtcatggggctggtggccccaaaagtgcactgagtcaggcacagcactgtccagccagtgaaaaactggacagagtctaatgtccagcagctggcaatggtgaaatcacccagcacagctgcatgagagaacgcaatccgttgtcaaaacagggacaagagctgcactcactcacatctgcttacatgcgattcacttatttaacgctcaaactaatcctacagagaagggaccattttctaataaagcagctgaaaccacagggactgggaaatttgcccagagacggagctcctgggaaggagctgggactcccatcgagaaggctggctgcaaaggtcccatcacacacctgtcctgccacccaacagagcatgactctttggctcacaagcatctcgaccacatgtagatgaatgaacaaagaacctcaccaaatggcattgtcatgaaacacaggggttaaagccaagggttccatttgtccaaa

SEQ ID NO: 1883777 - DNA, 4001 bp, Homo sapiens
ccgatattctcaaacatcaaactaaagctattttagagaaaggaaccaagtaactcactcaaaatttctcataggtaatgaggaaagctctggctgactataagaaaaaaaaaattggatgactaggctctcattttgctaaattaccacgttaattatgagcccaactaccacccctgccagctttcacttataaatgctagaaaaacacttcacacaaaaaaatacataagattactatatttccttttaagaggaacgtttcaacaaattttacaggtgtcaatcaacccttgttcaaatcgggcacacatcaaatctagcatcatgggtgttttatttatttggaagtgaattttaactatcaatacaaatgccaagatactacacaaaacatccacaggaacttttttcatcttttttttttttgaattgtacacaaacatttcctacataatccaacatacaacagagaaatggtacatctttttctttcaatttgcatacaatggaaaaacaagtatatatatattttacaaagtttaactaataagacactagagcaaattgacagtttaagtctataggtgagaaattatctaataaaaataatcaattttttcagcattagtcacttccataaccaagtgttattctgattaataaaacttgctgccaatcagaattctggtatatactcataccattactcaacttgtagtactgctccccaccttagttcttcacaactaacatagaaaattgttgaaaagtaggggcaagcatttgcaaaaacaaacaaaaaatccccagcttattataagcatgaatatgtatgatggaatttcttcccagcaatagacttccaaaccatcaagaaatcaccagaactaagtttgccaagttattttgcctatgtccaacaagagatgcacttatatgtccaacagaggagctgaaaattaaacttagtgtttagtttgggggtgggttgggaaattcagccaccattttaaaatgactgtcttaaaaaaaaaatgaccaccaaaaataggttcactaaatttattttaaaaatcataaaacgtttcttacaaaagagcattacattctgcacactgctctgaacagatgccagggacatgtggactattgttacttttcctccctgtcccaccccccaaatgttacagtgaccacaaagcaaggtgttcacaataattacatggggggaattttttaaaccaccaacaataacgaaaaataaaatccactcactctgctgctgtttcaaaatttcaatgttagtttttgcacgcccttcccccccccaaccctgtttgtaaggaactaaaacattacatctggtgaacagcaaagatttcactacacctcaaatgcagaacacctatgaagcagaggaatgttggctttttaaacagaagcagataaaaaaaaaaagatgcaggactccttcagttcttcactagtcttagaaaaactttccagaatactgcttcacactataaaaaagaaaaaatatcttgcattagaatccttcaacatctgcatactgcttcacactataaaagaaaagaaaaaaaagtgcgaattagaatttttgctcgtaacatcttaatcaacatcaagacaatttcaatgctaaattaaaatgataaacacgtccattacaattagaagagttcaaaaaccattagcaattacaaattaaagcaatgttaagtgtcaagaaaaatgatgagtagtaaatcggacattagtagaacagaattaagaaaacggaattgaaagttgttaatatttggtagaaaagacaaagaatgctagtaaggtgtgaaatgctgcattttacagcaccaatcatttgtcctgtagaggcatggcctgtgccatatggcagactgtgatttgttgtcgatttagttatctaaaaacaacaaaatcactagtcttccacacagaactaggccaacatccaatgaatcttctatattttctacaggctctgtacaatttttaacaagtggttttggcagcagttttcaccagagaaatgagaagtttgcttggttaaggcttcttccagcaagattagtattgaatgtcttcatttttagtaagaaagcagaagaaaaattaaggcaaactattagaatgtttagaagttaggtccccaaaaggttgagacaccatggcttctaaaagaaaaaaatcaattgagaagaaaagctttttaaaggttttagtatgtataagctaacacaaagctaaacttaaactgacctgttctgcagcaaatactgtgcattctgtatctggtcctgtgttcctgtaatggtaatgatccgatcttcggatccttctaaaggctcatcaattttgatcgaagctcccgactcatgacggatttgtttaatccgctgaccacctttgccaataatagatccagccaactgaaaagattttttaaaagtatgtgtttacgatatacttttaacatttactacctgtattttcaaggagcatgaagttattaattttattcattcagaatcttaactgatgatctaacgctccctaaacctgtcaaggtttgagttataatgtatttatgtcacacttactaatgtttcccttagttagttaagggctcaaaacctacttaactacttttattaatagcactgatcacttgacaagactcaaacagctgaaaacccagctcactaaagcccattaacataacctcaatcctaaatgtgtatttttgttaaaaccttctgaattaaaaaatatacagaaaggaggaataatcataaaagtgataaaatgttcctggtagtattaaagatacttacatctttgggaatagttacttgtgtagtaataataggtccaccaagatcaccatatgagccacgaccccctgcataggaataatctgatttaaataatgagcagtaagttcatttaaaaagtatgaaattaatgtttgacttcacaaaggagagaacttaccatatccggagccaccctaaaaacagaaagaaaaaaatagaaaattactttgccgttgtaattactaccggtactttaaaaaaattcatttaataaaatggagtcttgctatgttgcccaggctggtctcaaactctcgggctcaagtgatcctcctgcctcagactcttttgtagttgggattatgagtgagcaccactgcacccagcttcactattcaagtattttaatctcataaaatccctcttcaggaaaccaaagtcctcctgtatcctattttcagtaagtatcctcaggggaataaaaaacttactggagagcaggtaagcatcttaaattatcactgatatacacacgaacaactatgatactcaacctgtggttcataagccatctgccattctgatgggctccatgtatctattgcagagtcccaagtttcatcagcactgaaaccaacctgttagagataaaaacattaacatgaacccgcattgtattttgttatagagctgtttttaatatgcctaatttgcatgttacattaaaacaaaagagggtacatatataggcagcaattttgtaatcgaggggaacaaagctcaataaagtcgtaatcctccagcagcaaataacagaattatttaactagtaatccaaacaaaatttacttgtaagaaaaactttttaatcactataaccttcaacaaaacgtgaactacattgtgacaaccctcacatacccaacacactggtaataaaccaaagttcttaccatgccgtcgtaacggtctccaggtctccctcttctgtcataggccatgaggtctctgcaagcatagtacttgttgtaatctaaacgtgcttacatgccacacatatcaaatcaaagtctaccttgtctaccactaagtgcagcctcttgcaggttaataattcatagatgggggaagaaaaaacaa

SEQ ID NO: 1883778 - DNA, 4001 bp, Homo sapiens
gtggggtggtctagtggcctagctccaactctgtccaggcaggaaggccctgcagcagtgacctcacaggagtgggcccagaagctgggcacaggaaggcccctggaaagcactgagaggacagacccacgcggcggccgcggtggaggatcaggtttaatggtcactatgagggtatcgtacatcgttccaagcccggcccccgccccagccctccctcagctgggaacacagccaggtgccctcagacccctggctctgcacaaggggggcctgccccctcgccccagctatatacacgacagcccatcctgctggccgtggacaaaagctgggagctcctgtgcccagtcaggagcccctacagtccaccagctgcgcggccgggtccaggggcccactgtggtgccagcgagtttctcaaaacccagggcccagccccagctgggcccctgccaagccccaggcctgtgtgctgggatggagcctccacactgaggctggtaaaagctgaactcaacagcagcaatgagagtgctgggtgggcttggggggatggggagcaggccccacccagagcctcctctgaaggaggggacgctgcgcccttccttcctgctgcccagactgcccctaccgggtccggcgccggctgaggtctaagtaagcagggatggggggtggcaagaggagtgtaagtgaaagcacagacagtcggagactcggccagtgtagacagacccagagactcggccagtgtagacagagccaggctgggcagcccggcgacgctggccccacgcacacgggccaccctggtgctggtgatcgatacggcagggagggggtgggcagggagggtcctgaacacatgtgggctgctgggctgctgggccggggtgcctacactgtaactagcagcatagtgcttaactagttaacaagaaatgctgcttccctttgaattgtttcgggggtgtagaaattgcacttatttctatgaaccccatggagggatgcccacagctgagcctccaggcgaggcatggcaggtcagtgcctggccgctgagcatccacgggccacagggcgggatcctcccggcccccagggactgcagcctctgcggccacgggtgcagcgaggaccggaacccacagggggaacctgagcaacgtctgaggtgccctgaagtggctccaggcgagaccggagccacacagtcccggggagcacgaggcggcccagccccaggtcccggtgcagagggagtggcctgatggtgactgggcggaggcctctgcccctcacaggacgtcgtcaaagtccagcagcttcgagtgctggcggctcttccacaggcgatacaaccggaagtcaaagtacgtctcgatcatctgcttccctgggcggagcgggggcaggaggctcaggcctggccggccctggggatcccaccccaccgtggccccgcagtggctgcagagcttcggcccagcctgggtaactcaccttgggctgagagctccaggggtgactcgaaggtgaccctataaggagtcatgagggtcctgaggttctggaacagctggaggaagcggggtgccatgagtccgaggcagagagatggggaaggaggagcggggaggagatggggagcagggcccaccctcttttttcagaccccccaaacctggctgggctcaggcataaaggatttctaggggaatgcccgggggaaggaaaaaaaatgccaggaaacatggaaggctctgccctgtctgtccacgtcgggggtttccagaggtctggggtggggcttgggggtcactgtaccttctctccattggggttccccagaatgtagcagcccatgatgtggatgacgttcggctctgggttcactttgctcatcaggcggctcagccgcttccagaagctggtggagaggggtgggtcacccagtggcaggggacaggcaccccactccacagagcggaccgtggaggaggggctgtgggggagggacatgccagggcctggactctgcctccagccctccccgcgcccagggcacccggcttctcactgaatcatgtcctcttccttctccactttggcaaaggtggccaccttgttcttgaggagatagaggtgtccaggacctccctgtaagaagctgtggtcaggcatctgctcctccttcctccccctctccgacacacatgcacccacgcacatgcgtgggaggtagttttggtcttcatcccccggccacgcttcttccccttgatctcccccaccacacgtctttcccttgatctcccccaccacacgcctcttccctttgatctcccccccacgcctcttccccttgatctcccccaccacatgcctcttccctttgatctcccccaccacacgcctcttccctttgatctcccccaccacacacctcttccctttgatctcccccaccacacgcctcttccccttgatctcccccaccacacgcctcttccctttgatctcccccaccacacgcctcttccctttgatctcccccaccacacgcctcttccctttgatttcccccaccacacgcctcttccccttgatcttcccccgcctcttcctcttgatctccccccctcgcctcttcctcttaattccccccaatgcctcttccccttgatctcccccaccacacgctcttctccttgatctccccccaatgcctcttccccttgacctgcccgccacgcctcttccttttgatctcccccccacacctcttccccttgatctcccccccacgcctcttccccttgatctccccctccacacgcctcttccccttgatcttcccctgcccctcgtctcttccccttgatctcccctgccacgtctcttccccttgatctcccccaccacgtctcttccccttgatctcccctccacgtctcttccccttgatctccccctccacacgcctcttccccttgatcttcccctgccacacgtctcttccccttgatctcccgcgccacacgcctcttccccttgttctgccctccacgcctcttccccttggtcttccccaccacacgcctcttccccttggtctcccccgccacgtctcttccccttggtcttccttggccacacgcctcttccccttgatctccccaccatgcctcttccccttgatctccccctccacacgcctcttccccttgatcttcccctgcccctcgtctcttccccttgatctcccccgccacgtctcttccccttgatctcccccgccacgtctcttccccttgatctcccgcgccacacgcctcttccccttgttctgccctccacgcctcttccccttggtcttccccaccacacgcctcttccccttggtctcccccgccacgtctcttccccttggtcttccttggccacacgcctcttccccttgatctccccaccatgcctcttccccttgatctccccctccacacgcctcttccccttgatcttcccctgcccctcgtctcttccccttgatctcccccgccacgtctcttccccttgatctcccccgccacgtctcttccccttgatctcccccgccacacgcctcttccccttggtcttcccccgccacgtctcttctccttgatctaccccccaaacacctcttccccttggtctcccccagccacacgccccttccccttcatttcccccccgccacacgcctcttctccttgatctttccccctcaatgtctacacctcttctccttggtcttccccaaccccagcctcttccccttggtctcccccagccacacctcttccccttggtctcccccagccacacgcctcttccccttcgtttccccccgccacacgcctcttctccttgatctttccccctcaacatctacgcctcttctccttggtcttccccaaccccagcctcttccccttggtctcccccag

SEQ ID NO: 1883779 - DNA, 4001 bp, Homo sapiens
gatggatagcttctgagggacagtgtgtcctggggtggctccggctctgcagtgggacaggctgggctgagactcctggctctgtcgctcattatccatgtgactgtggggaagtctttagctccccaagtcacaggtcagttcgtttgtaagatggggataattccatctacctcccagagttgctgcgaggcacagacagatttcacataaagtacctgccccaaggccagatgtgtaagagagactcagttgtgggttgttgttctttgtttgagacacagcttagttttttttgtgtttttttaaaaatgatttttagtctcctaggacttgtagcaaacgggttagtgtctcctggtcatcggagccatgccatacatgctattaaatattacatcaattcatctaacaatctgtctaaatctggtcagagggacttggttatgtctgagcagctctggtgttttagaaacctgtgctcctatcctgaaagtttctcattcagaatcctagcagccatggtgggaaactcttgtctttctgttctaagccatttagtatattatcttctatctagcaggacacaaggtgaaggagacagagctgggtttttgcagacacaaagatctgggtttaatcgcacctctaacactgagcaactagacagcctagcgcagacctctcgattggggcaaagggctgtggtgaggactttgcccttgaatctcagtgttcagagagtaagccgcccagagattcttccagacagccctctggtactgtccctcccctgcttaaatccttcaatggttatcatgcctttagcatggctgtccctccattcatcaacatgtactgacctgctatgtactgggtgctttgtgaggtactggggagggtgcagcggataggaagtccagggtctttcccctgcatttaggaccctgccccggcccctgcctgtccttcctgccttgttgccccttgctccgcaccccatagtgcaccttctagccacactgagtgcttgcaggtctacgaatgcacaaggcattcagttctcccctgagcctctgctcctgttccttctgttgttactcacatagtcctgtttcctcctaacctcaccgtgtcctgcagtgacttcactgtggccctcagtacagtctggcatgcaagggagcttctgggcaacagtggggtgcacactggccatggagcccagcagacctgatcccactctcctcacaccctccctagctgtggcacctggggcaagtgacatcctccctctgcgccccctcccctcttctgtaacatggaggtagtaacatctgcctcaaagttttatttcgagggctacaggcgacctgatgtagggaagtggtgagtggtagccactataattgtctgtgtagtttctagcctgtcactcttcctagactgtgcactccctcagggcaggagctgcacttctgctgcctcaggatccccagtgttgggggagcagagcctggcgtgcatgcatgaaatgagcatgtgtgaggtcttggggaaacatgtctcttgaaatcagaaggctttttggctttgaaagagttaaaatctgctcgtgattataaacaagctccatttcagctccgcactatcactaggtgtgagtcacaaggcttagcaggtgtgggcaataattaaaggcttcagcaatctacctgggcaaggtatttttgcctcttattccaaagaggaaactctctctatggagagcagaggagctcattaatgagagtaattaggtgtaaagggggtaggggctggcatcagctgcagcttggaggagctaatcattaagctctgtaatctcctccgctgaacaccagcagatcaggttcggggctgcgagcagggctcccccacctgagtacctgaccatgggctttggagaggctgaaagaccttacctctccccctgccaggttccaccaggggacaccgtgtgtgtgtgtgcgcgtacacacacgcgcgcgcgcgcacacacacacacacacacacacacacacacacacgcagtgtggggtcagctgccggggaaagaagcctgagcatccaagaagacgctttgctctcagtttgcactcacctttgaggagcatgtgctggttttacaaagtttcctggatataaggaatggatcaaagactctgtttttggcctccacatgcggaggctaaactctcatgcctaggcttctggattttctagccattgctaacatttagctagcactgcagcagatttcattttctgaatccatctccctggcccatgggctctgtgacttgggaacaaggggttgattcccctggatcttcagtggctggcataccccgggtgccatagatcactggctgcatggtggggtgcatgggagcaggtgggaagagaagagatcgatggattttggcattgtcacttttctcagttctgtggctttggccaagtcacaacctctctgagccctaatttcctcctctgtaaaagaagctcaatcataaatacgtttaaaatttcagtaaaaatggggagaggctgaatgtcaggcaagtgggcaggtaaatccaatgaaggccccaccctgaacttgagctagtcagagggcaacgtgtcccaggtcaaggctacaggaacagagactcgcccccggaacactgtgctcttagatgccagcgctgtggggcatctctgcactgttcacagacagcgtcaccttggctctgggctctgccgccagccccagagctgctagcccagccctggaatctttctgcctcagcttgatacacaccgagacttctgggaggccaggaaggaagcagctggctcctgcatcccccatgagtcccactccctaaagcacccctttgatcttctaacctgtagccatggccaacaggagcctcttggaaagttggcaccaactaaatggcatgtgtccagccagcaagccttgagcatgagtgtgctggcatcatcttccttgtccttagagcccagtgctggtgcaagcaccttggtgaaaccatccctgatatccaactcctcacccccacctcatatgttagttcccataccttccatggtcccccaaccttctgggcaccctccaccctcctattgaccacacatttgcctcttacactcctctgggaataggtaataaaactctcttttcccattgggactgatcctgccaaccccctgcccagccacaggggtgggcatgcgaccctgggagccgactggaggactccatcctctggtcacaccaatgagtttagggtagcccagaagtgatcgacactaacttgagcagtctccactgagagttgctgcacagacactggagttgagagggactcacttcaagctagaaggaccatagaggcccccatatttctatagcaaagcaagagaatgtttgaaaataaaacagataatgaaaagcaaagccaaacagaggtcactgagagtctagacatcatttgagctcctggatccagccatgctggtagcaagacaagtccgggatgtctcagttatataagccaagaaattctccctcctatcctctttgctcaagttcgtttaagttgggcttctaccatctacaatcaagggaaggcaagccagggtttaaccaagtctagggcccaagtcagctggcaggtttgtttacctgccccctccacaccaatattattgctggtaactagagcagggtcttcagaatgttttctctcttgtgtcttttagttacgagccaaggtcacagttcttggttttctccctgaaccatgagcaaagatacggcagaacctgaggctactctcagaccaatgcgcatggcccccaaatggctttcctggatgcgattgtcctgtggacactttcttgtcccacatgctccttataaagacccctgtttctcaaaggtcttt

SEQ ID NO: 1883780 - DNA, 4001 bp, Homo sapiens
actgggctccaccaattttagaagtgggcctgaacttacacctacagagaactgtactggtagagcaggtctttggtgcacccaacagagaaagcaaggagaggcaatatcaggagtcaggcaggcaaagggggaagagtagtgagagtttctgcacacacatggcatatccaggaattagctcttagataaaacagatgagaaaaataaattctgagcgtagagctaagttttgagccttaactagagatggcatgaggaagcagccatgcagagtcctaagaaagaagtctgggccagcatccaggagaacacgccaagcaggaagaaatagacaggaagccaattccacaccaggcatcattttcggactctgggagtgccactcatgatgcttacaatgtgaatggtgccctggggttagtacaatgctgcagcaaggcagcaaggctagcaacaataattccatgtttctacaaatataggatgaccctgcaagtgacagcaatgtcagctattcctcttgtgcttgtgtcacctgaatatcaatgaacagggtctgcagtgtaagattctagcgatggaagtctccagaggtggtgggagctgttgactgggcccatgctgaaataacattgcatcaaccacttgtaaatgccaaattccacaatggtaggaaggccaactgagtaaaagctgactgggtattctgtctagtctgttacatgtcccaagagaaatgaagcaggggacatcctttctaagtcatgctcaaaatcaagaaacacagataagtcaatgcccagttctgtctaaagacagaaaattttccagtcagaatatatatgctaacaaaaaaatccttggacaatctctcaggaattccaatgtatcacagaatgtatgttagtgaagctaagtgtagtcaaaggattgattctggaatcacaaatccaggttcctgatagtaagcaacagaaactaacaaaagctagtgtaagcaaaaatgatgatgatgatgatgatgatgatgatgatgatgatgatgatgatggaatgctttggaggagctctctgaattgaagggaagtctagtaaattagtcttggaaaagacaaaccctataaacacaccaagggatctcatttagaaaaaatcttaggaaactagaagggtggataagtttcaatgattctcagtacttttttctctatatacaggagtcatatttcagagaaaaaaaagcattcaactggcctagtcaagactattcatatacgtagtgtataggaattagggaaaacaggataccttgactaacactcctacaaaactgcatcaaatagggaaagtaaaattcccctccaaaagaaggtgaaatggacacaaggcagccaaaaattagtaaaggtcattgcagctacttattacatttgtgaatttaggtaaaccatttacccacttggattttctgctaaaatgtgacatcataggtcagagatctttgtctcactttctcattgatgtatcccaattgcctcaggtgaaacctgacacatggaggatgcttcatgaatacttgttgaaagaatgactctctccaagactcttcccacagttaaaatggagatgtcttgtagagtccacaaaatgtctagtacattgctataacatagtagctgctcaaaaaattctgattatagttactgtttttattaggataaatagtactagaataatttgctataaacaacgtagaaaaattccagtgttaatatatccaagttactctatggaatcccaacacaaaacaaaagttattcattatgaattcaatgaagcctgttaccaaatcctgggacaaagtaaatgatttgaccgatgatgtagtcatatgaacagaaatgaaaaagtgaatttaaaaagactcgcattggtgccacacttagactaccagactccctgaaactgcatgtcctcagggagtctggcagtctaagagtggcactaagtgtcattagtgccagacccaaaatataataacctgattatctctgggctttcaataatgatgtcattcttttctttcattcttagttgatttaattttccttactacatagcagatattccaataattttcataagtctctgcaagaccccatttccacctagactccaaatcatattccccctgctttttcctgggcattatttcagcaatcatctcttctttactgggtcttcaatccccaacacacccccaccgtttcaagtttcccttttctcagactacaaaacagctcactattccctttcctaaaactacttttatgacatttattctccttcaattactgtatcttttctgcctttgctttcattgacaatctgctttgcaagttctctacactcagtctcctcttcccactcactcttcagctcattgaaactgtctcctgccccctccacccttttgaagcttttgagacagaagtaggccctgctgagtgctagatccaggtctgctacttccatggcccccaccccagtcccctcttcagtatctgagcattcaattctagttgtattttctggcttgttctctcggcaaatatacattgagtacctattagtcaccatcctgggtaccagaaatataaaagtgaataagatctaaatgcaaaaatgatctaaacgcaacagtgatctaaatggaatgtggtatcctggcttgaattctagaatagtgaaaggatatttgtggaaaatctggcgaaatctggataaagtctgtagtttaattaatagcattgtactaatgtaacttcttagttttaacaaatgtaccctggttatgtaaaatgataatgttaggggatgctgggtgaaggatatatgagaattttctataatatctttgcaacttttccataaatctaaaattattccaaattgtaaaagtcttaaaaattgagtaaggtatgttccctgccatcagtgagctcacagtgatacacaatcttgggataaatgaggcaaattgtgggagaaaaactatgaactaccgattcttccatcgaaaatgaatgcaatctgccttttttccccatcatgagttgtacaattttgtatgcatctatgtaccacactgtaaatatttcatgaggacaggacagaggagtatctaaaggtgaattttttcacagttctaaataatacattttgaggctttgggaggtctcagattgatcgaagccaaccctagctaaatcactccactttctaagacgttgaatttaaacatattacttacatactttctttgttcttttcaaggcaaatagtttaatgtttgagggagtagtaggccaaatagaggtgatttttgttgttgttgttgttgttgttgtttagccttcttattgtctggctgccagggttcctggaaatgggatttttaacgagcttttttttttttctggagaagactttgatgtggttgaaaatttattctctctcgagcgtaggcagggcaccaattaacccacacagagtgcccttgctgtcctcccagcttggagtttattacacttaccatgtagtgtataacactattatcccatctcctttgtgcttccctcctgtggactcaaagcaatttcttaagcagctttctgctgtctctctccgtcttttaaatatctccattttgcttttttccataaataatcttctgattgcaatggggctggaagagagaggaaaggtgaaataggagagctgcttcttcaaccagctgattgagccaggaataatggtggttttaatcacttcaaaatccatttatgcagaacctacaacatgatagacataagggtacagagatgaataaataagaaatgggactaaggacttgcaattttatggtggaaagtgtcacatacctaagtacagaacaaggcagagagaaatgaaggctacaattatttccccggtat

SEQ ID NO: 1883781 - DNA, 4001 bp, Homo sapiens
ctgtccttgtgaaaggaacatgctgctgtttcactgtgagctttgagatcctttcaaagagaaagaatgggtttttgttgctcagtacacacaaacttgcctggtgccccttctaattaatggcatttatttcccccagagagctgccaaaggctgaaggctgggatgtggcattgagacagaactaacctaactggctctcatggggattgatcacgtgcattgaccttccactacagtgttctaagcatttgagttaactgggtgtgctttccctacaagtaagtctcagccactccataaaaaagaagatgggattgtcaagtatcaggtttcacatactgtatctttaagacaaggtgaggtttactttcaaagcagggtgtggaactttctacagagaaaccctgcatggtcataaactattcatgaaagttctcatgtttctagaacaacctactttctacttcccttaactggtcttattattacctgtctcatcttcctgacaactctgacctcagatctacctttaatttattttaatacattcccttttttatcctggacataatgtttataaattgttgatatcttgtccatttgatacctgaccttgacctaccttgataccactgtccttacttttgctagagatgtcagtgtcagacacatttctcagtgcctgttcttgatacccctttcctaaccccatttttggctttgctctccctgtgaaaactttacaactgaaagaggttccactacatgacacaaagccaaaggcaggacaagggactgcaaaggctcctacagcaaagtctgcagtgtcataggacagagggagtgagctccatcacccttggcacctaagcaacaagaggcctggcctagtttcatacaccccagagaacccttaactaagcaggtggtcacaccaacttgagactgtgcttcaactgtatctgtgtcctgagactgtgcttcaactgtatctatgtcctgagaaaagccaaccatgtcgttatgcatcagccaatgcagtgcaacagaatagtacatgctttggagccagggctacttggcttggaatcctggttctactccttgctaactgtgttacctcaatcaagtttcttaacttttctgagcctcagttaccttatctataaaatgggggtaattgtacctgcctttcactatcattgtaagaatttagagataacaattataaaatacaggacattgcatataacatacaatatatcgggtttattattatttatttttccttgctatttttgtcattattattgtcatgacagggccttaatgtccagattctagcaagaatagtgaacatttcaaatatccaggcagctcatttcttgagagatggaccacaggcttcctcacacactaggctggttgctcagtgttgtaaatcaccacttggcttcctgcctgaacttttaatcttgtccccatctcaatttaaagagggtgagaaagcagagacatcaatcgtttccttgtcaaggacaacagccccttccttcttccttggatctctcctggggacccatctgcctggtgccaagggagggggctgctgctgaatacaaatcaccatgtggtgggggagtcttgtgcttctatatcagccaggagccatttcaccatccctgtgtgagactccaatgagcccaacccagtcctcccactgctcctggggttaagcgccccactgcttcacagtcaccctggatagtgatgtaaccatgaagatggcagttacccaaggtactgggacacagactttattgatttgttcttctaatgtattaggaggaaacaggaaacctcaggaaggtcataagcgacaattgtgcattgactggcacagacattgacttcattcagaaaggcacgactcaagtggccttgctttcagagaggaggggggccatagaggcaagactcagaaaataaagacaataagcacgagctggatcacagggaatcagaaggaactgaagaacctaacgctcaagctcacacttgagggaaagtctttgttcagttcctggtagagccagatgttcaatcgatgttgctaaacaattggatgaaggcataaaccagcaagggtgatccccttagaacttcctctattgattttctgggcacctctgtaccattttcccatttgattctgtggttacatgcccttctttccatctctttttcatgatctttaaagctgagcccgtcagataacttttaatggactcccgctgttttcttcagctttcaacctcttgcgatgcgccctgtaatcactgaccactgcaaaaatcagaatggcacatttgaagatctcctggacttcctgtaccctcttttcttctaggtctgtgttctggatatttggggtttacctctcaaacgttttgccttccctgatgattttattaatgagaagtgccgtctttcttcaacggttatggttatttcaactttatcatccaattctcactttcttgtgagcaattattccagatgagcatttgagttaactgggtgtgcctcctctacagataagtctcagccattccgtaaaagggaagttgagattctcgggtatcaggtttaaaacactgaatctttaagacaaggtgaggtttactttcaaagcatggtgtggaacctcctaaagaaaactgtctatgaagccatatctttctaaatgtttggctttaatcaattcagcagacttttggataggatcctaaggtctcttctaaccccataactacagttaaaccattaatccagaactcagtggaacattgcagtttttctagaaacggttctctactgattattaatactgaaaaactatagaccaccaagcagagatggaccttcaaaccactcttttgtttaggcttttgtgggctctgtacaggcaacagatctccagtcctggttttagcatccatgtaaaacaccatcttggcagaaggagaagcaacagaaaagtgctatctccagtgaaagacgtaatgcgggggtttactcataagcagtgtagagattaaggacaaagccttctgtacagctcagattctaacacacggaggtgattagtcccagctctgcaagctactctctctgtaacttaggcacatgacttaaactttgtagcctcatgtttacaggggattactaataaactaataatggcctcatgtttaaaagggattactaataaactgttttgggagtgctatgaagataagcagacaatgaattttaaatagccaagcacatagcaactgctcaataagaaattgttggtttccccctcctgcccaggataccagtgagttctggactaataatttggcttcaatcatagactcatgggcttagaaggaaccttaatatcatattttagtataaaacatctaatatttattaaccactaactatgtgccaggcaatgtgataaacaatttgaaaataatattttatttattgagataacagatattatactcatatttcagatgagaaatatgagaaaagtggggctcccatgtattaaataatgttccttaggtcatgcagctaatcactgataaagcagagatgcacatcttggactttctcactccagagcccattctcttaaccacattgttgtaagaacattttagaatgagaaatcagtggtatgactttaataagctaaaaaatcagtgaactgtagagtctctggggaaatacggtttggagagtggaggtggaaatgcactaaaataatagattccagtatcgatctagtgagcggagctgaggagacagagattagtcggatttgtaaagttgttattagtatttgccaaagatgtttgccattgcccatgttcttcttgggaatgttgccttttgaatattactctggaaaacaggatcaataaaaatcctttctt

SEQ ID NO: 1883782 - DNA, 4001 bp, Homo sapiens
atctaacatattttagatatttaagaaatgttccccagtgggttgaccacatttcattgcttaaggtaatgcagagcagggtatgaacaagaaagcctaatgtatgatttccaacgagtgaggcaggaccttgtacatataatgctgtgtccattataataatgatgaacaaagagctatacaaacacgcttgtcagtttctaaccccagactctggcagaacagttgaaaatagatgctcaatagagatgtctgctgagttgatgctgacatataagttccatgttattgatctacatgtgggaaaaaaattgaaaggatttttttttctctagttattgaaagtcaagggtcagatgagctccttgaatgaggcctattgttctaacttgcccctggtcttaaaaaaactgttggcattaggatgaactatacattccagaaaagtgattctcaactctctcctgattgtacctgatgacatgttgcagaagccagtaatttgttactaatattaaagagtaatgttagtggatgatttgcttttattaaaaaaaaagaagggcatgttcagggtgacatatatgccaccttattgcattctagtaagataagcttttcagaggagacatcacaacaagctactggaaataaaatacagccaacacattgttttatctcagccacatccagcagtgtgatcacacagacacaaggatcatgggtttagatgtggggcaaaaagacaaacaaaaaggctgagaactgtaatcctagattgtgaaagagaaacagaaaggtctactgaccagtgattgacgatacttctgtctgaaaacatgctttcaatcgatttaatatttttccatatttatgccaggataattaaaatcaattgaagaaatcctacagaaataagctccaactggatttaatttgcaaaaaatttaaaggctgcacattgttttagaaaaaagacaggtcaaaatgaaggtaagatttgtattaccagcttacatgtaagaacttcattgaatgttttgaagataacattttgaggaatgtagaaaaacactgagaggaactttatcactaattattatagaatatttaacacaaatataacctttagatatgattcatttttctaagtgaatttgaaagtatttaggtatgactatgagtagagtctctgctactcactaatgtaggatacacatcatcaacttcatacatttactatattcctccttcagtaattgaatttgtcactcttgttaaaagaagaccataaacagattataaaggatcaaccttatgtggtttcatgaaaggctgctttatgagatttaacaacagattcatgctatcaatgctgatgctaaatgtggtccattgaacaatcctgaaatataaaaagactaattacataagttgatgttacacatgaacatgaacagagaaaatattttctcagaaaaaaattagataacaatctcaacatttatatacttaaactcctgattagatacaaccaagaaaaaaagtttaagggaatacatatgatttttaattttttcctttcctgcaaggtctataaattatctttcacataagcactggcaccattcatttcattgaataatttatgtcttgtagaatgtctgctgagtttacaaagataagatcaggactattagagatgcttcccttggtgggattcaacacctcaagtaaacctactgacatccatgttgagtggacaagttaacccttgcctaactgaattattttgcattttcaacattacttccttgtttagaacttaaacttatactcagaacttggaggaactgacaacagtggaaggtaccagccataaaatgttgtccattgcaaagcagtagaaatgagtaggaagatttgtgggtgttcccgggaactcatcagtctcctgttcattttcaataggagactcacaagttcctgcaaatgcacacaaacttattctaagcaggaaccatttgcagataagcagctgttcatatttcctccatttcaagtgaatacagtaatctgttcccctggagtatcttcagcagcttgcctggtgcttgtgattcttttcaaacagttttgtgggcatcccagacactggtcaccttcatttatgtattcaataaatattgattgagcatcccttaagcaggtcactgttcttgttttaaagatagagtgataaataatttcttgcctttagggcaattctatcaaacattagtccagttcactttcaataatgcctgagtcaaagtatcagtctccaatgccaaatgagaggcagtggtatttaaatttgtacttcctggtgcaatgggaagaatctagcaaagggaactacgagatcagaattctagccctactgcagctaagacatagcagtatttccatgtcacaccatttaacatgttttttgcttcagttttttttttaattttaaaaattattatttgggctattttacttttcattctggatataaatgtgtgatgatgatataataactggaaacaaagaatggaagtgtttatacataaatataatgttattgaagttgtctttttctattaaaaaacctttgtttcagcaattactgtaaattttaaatgtattattaataactggaatcttttctaccagccaacacataaattatttttctcatataaaaacaaatggttaatttgcccatttaatggctcctaacattgaaacttatttttatcagctttaatgtctccattagatctcagactctagctctaacgttctaagaagacaggctcagttcttgaccaggaaggtggtaatcatcaaggtaaatatttttccaagaccaggtgttagtctttgcagtttttctgaaattttaagctctagaaaattttgcctatgttagtttgttcaaatgaaaaaaataaatattccactatctcttctccccataaaaagcatgtgtataggcaattatgcctgttcacacacagggtctctgtccataaaggttcccagctggtaaaatttcatgcactcatgcttggtacagaatagcatatagatccatttattttactaccatatgcccttgtaagaggcagtatgtaaatactttattgaagaggtttaatttttaagtcctatctaggaattggcagaaattaactacaggttttcttggttttttgttttgttttgttttgttttgttttgtttttgtggggcaaaagaaggggttttgatctcagtagactttcctgtccctggagcttggatttctgtttctgtctcactgttaaaggactgagaccatatctccatataattaggttgtgcaggtaagcagttactgtcttttcctaaatgggtacacacttgtgtaccaggggcagcactgccatggagacctgatcaaaggggcctgcctggtatttaatgaggtggaagaagaatgccacaatgaatacagcctcaactactctgaattatgaggtttatgtggttgagtgtagaagtttctccaaatggacccagagtcagttacttgtatggcagaggagtttggaggacaatgggacattctctctttaatctctactagggctggggaaggaagtagaccccactgaataacctcctcattatgtggctatattaaaattgttgaatatctatttatgtaaatcatatgctataaaggttatttgctgttaaagtctccaattaaaattccaattgacagtcaagaatccttgaaatagcctaatcaaataagagtagatcaccactttatccaaggaataagcatcctctaggcagaggcaccatcctgtttttcttttttccacacctagaaaatcttcagcagctaacaaaatcaactgactagtatatgaaatgtatttgtaaataaataaataatcagcaactcagagaacatttat

SEQ ID NO: 1883783 - DNA, 4001 bp, Homo sapiens
tgagctatgattgcaccactgcaccccagccagggcaacatatgttttttgtctcttaccaaaaaacacaaaacctacactaaaaattaattcattgtttgtaaacctgtatttatcttaaaaataaaaaaagcggtagtgaaataaatataaagaagttgggattaaaattaggatacaaggatataggtacatgattatgagatatgcttattagtccattagcacatcccattatatctcccgtaaactaaaaattatcttaagaaaaaatattgtgacttccttctaaattcatatatcagcagttctacatattatcattaaaaacataagcttcggctcaaaggaaattttacaggtgccccctttcataaaacagaaaaatcaaagagctctaggacaaattaatttcagaaacctgtcttctcagactcttttcccacctgtcctcacacatcagcaaagtagcacccaacaaaagcacaggaaatcccagagctctgtggattttgcttatgaacatacagtcctatgaaaaataaggttacatatgtatcagacaaggaatggtaataataaatactgaagaattaaaggctaggaaataagaataacatgtttgtatcatagttcaaattaaattagagtagcaagatatttcttaggtaaagcatttccaatcatatttatacacatatattttaaggttaaaagtatacatattgattcattcttttggtcatttatatgttgaaaaataatatactgattttcttttatctaacagaagggcttaaaaattagtatgctaatttatttaaagtcacccaaccttatagagcatatgcataatccacttctaaggaatgaaacataacaggacaaaataaagtcataatgaatacaatagatatattcaatgatgatgcaaaagtaatttcagaagcctgtaccactgtcacttaggtgtccagatgtgtcacttaagaaattaaaggtcagaagttttcatagttctgacagtcttatagtcataccattgaacttaaataagacctacgctctagccttggaaataaataaaaaacggtaaaaccaaaatgactatttgaaagcttaatcagttattaaaatagttaatcatcaattgtttgatttatggtcagggataatccattcttggtaatcctgatgacagaaatgaccacaaagttccatttattttaataagcaattactagtcaacaattaggcttttgtgaccttgtaaaggttacacaatcttttctgtcatagaataggactatagatactgtttccagaagagtaaatgaaaatgaatgcccagtgaatacctaattttaatatatgccatcaaaatgtacaatttggtatgttaaggtgattttttttgcccacaccaatgtttttcttgttaaaataaaatgttgctttttacaaaagtactgcataacaatgatgtcttcaagcccctgatcatttaccaaactatttaattaatatattaattgggcataataatccaaataaaatatgatatttaaacttcaaaatggtatgcttaggatttaaggggctgattcaattaatgtttctgatgtatcatgtttttttaaccaagaaatattacaaattacttttcaaaaaaagaacagtagagacagagacagcaactatgtaaaacatgtatatttaggtaaagtaaccataatttctggtgtgtttgacacaggtttgatcactgttaacactaagcaccaaatagaaggattctagagtatatttaccagggatctcttgactttgtgtgtcttgtaatacaaagtggcttgttctcaatggctcagtaaaggaatcttaggcttcatggtgtagatcaactgcagaagcacctgtgaagcactatgaattactttgtaaaccaccaccacattagcttagatatggtgattcacaaagaaatccacagcacttcacagtttgtgtaaagcctggtacctatgaaccaacaaaaacagtaccctttggccaccaaaagttgaggaagtatttccatctagttcacaatcaattgaagaatatgctcagttttgcaccaccctcttttagctgaaacacacaagaaacactgaacatttattttaagtaaataaaacttaaaaataaatgcatgctttctatattatataccagtaaatttcatttaaaagaattcctaatacaataactagcatgacattatgcaggatgaaaaaacagggttctgctcatcaaaataaaagggcatggttattaatatagatgtcaggagtagggagtagaataaataataaaactatatgtaattctcacatccatatcacagtatataagtgttgctgggataatttgttctaaagatatcctcagttacttagcttcccactttatactcatataatctcatatcctatgacacaagcttaccaatgttacaaatctgcccttgtacccctgaacttaaaataaaagttcaaaggcaatcattaaatgagtttaacctgagtgttttttcctctgatatttgtccaagtaagtattttttcatatgactgctgaagtccaagaatgtttataaaactaaattctatattatacatattaggttcaactctgaaagaaaaccacaccaataaaaaatgaaaaacaaacaataaagttactctcctttgcaaaataaccagaatcccaccttttaacttttatctaaagagcaaaaagaaaggtttcatttataattaatgaaaagaatctataaatcttcccagcctagtaagcataatatcaatcaagtaattcatgcttttgaaaatttcaacatttttcaaagtaaccatcaaatgtcaacattaattaaaagtttgctttatagaagctcatgaacataagagtcctaggcagttcaccactgtcagtgtaggtcactgctcaggaataccctactcacctccaccaaccacacatataacaaccaagccaaacttgctaagtatctgaataattaaaaatatttaaataaaaaatttgtagaaaatatgtatgtatgaaaaaaaaatatttgttttgcgcttatcatgtgccaggcatagtcttggttagatgctggggatataaaaactccaggtttcaagaaatacaaaggagaaaacaagaatttgaaaaaagcagtaataggtgttatgaaaagtttccatatagggctaatggagacatggagaggccacttaattcagtgctaagagcgttgattacagatgtcttctctaagggaataccatatataagagaactgaaagagtagcaggaattagcaatgagaagggtggggtaagtgttctaagcagaagagaacacatataccacggcctatccaaagaaataacgtgatttttattttattttttggtatactatagctgaaaaggaaaactgctgctacagttagagtaggtgaacacaagtgagcatcaccagatcagaggcagcagggacagaaaaatttgaagtaagagaactccagaataatgaggcaacctgtctgaaatatgggcagagtaaaggagcagttatacaaaggtcctccagctcttcatcaagtgtcacactcaatcccaaactggcccaggcaaaacctcttgaagaatcaggccagtttccccagtgaaattcaggcatactagttgggtggaatacatttagagtttgacatgggtttaaaaacaaatcaccctggccgggtgtggtggttcacgtctgtaatcccagcactttgagaggccgaggcgggaggatcatgaggtcaggagatcgagaccatcctggctaacatggagaaacaccgtctctactagaaaaatacaagaaattggccgggcatagtggcttgcgcctgtagtcccagctactcgggaggatgagacaggagaatgtctttaacc

SEQ ID NO: 1883784 - DNA, 4001 bp, Homo sapiens
gcccctcctgggcctctgatggtatttcagtttttgacccctgaattaaagcaaacagaaacaaattctgatcatgaattttatcatcattaaaaacaagctttcagagatagtcattctctccataaaggcatttttaaagttttatttcgatttacttactctgcttagctaataacaatgtccttatgtaattaataaaatatataaattaatttttctccagggcttaattattagataaggatacgtttccaactgaaggtggcaacgttatgctggaagaacatgtcaggaagaccacaaaatttcatgactgtacttgctacactttcagcagaagagttatacatattttcaattcaacaaagattaagccaaaaagaattcttagaacattcccactcttctttggcacatcaaaaggcaacaaatgtcattttctcccatgtttttatgtgcagtttagaacaaagaccaattatctatgcagctgtccacagtggataaaacaaaaagcatacatttggtccagagttaagtcacctgggttgggcccatccaaggaagtttgatgtttctactctcatgaaaagtaccaatggcactgcacagtgattatcttagatattaaggataaacacaaatttctccttaaatttccatttattggaaatgattggagggagggaacttctccctcacctccacactgcctcttttccaactcttcttccaacacaaaatagtttaaacagcaagcacttagagagcttttagccttgcttgttgattacaaggcccaagttagtgtatggtttgcccatcggaggaaagctaaaacatgggccttcatgggtattaaaattgaagaaaccttttccagcattttttctattttctttaaagtaacaacctatggacttccccatctgacattttcgagtgatcccactgtgtgaatgaaggactacttcagggtttgagggcaaagctgaaatcttagcaacttaccagtgagcaaaggtagaacccagagcccatctctccttttccaggctgctgagtaaagtctggctcaatcaacctatcaatgaagcagtgcttacaacattctccaagaccacccaaaacccaaactggaaatgaatcatgactaatctgactcattttggctcacacagtgcccttccaatttgtatttacctttaccacccaggacctgaccttggacatgtgtaccaggatgtaaggcaataaacctattcacaattccaaaagggcctggtcctctatgaagatttcctgaaggctacttactttctctactcattaaaatttttgcttaacttcaaatttctgaaatataccatatgtgaaaaatttaaatgttaatctgtgcctactgtactacttgaacagagaaaattaactgataaactgtaaatacaaaatgtcaaaattaattcttctgagttttaatatcatctaaataaaaagaaaataatgcagcaagtctactcctcagggaaggcaatagattgtatagttatctcctgaacagggtaaaatcactaccccacaactatacaatctactacctcactctgatagagcaatgttttcttctggaatggaaagtacaatctctttcgaaagaaaatttcaacataaaattatcagcataaatcaaaataaaaaaatacatttattctgacacagagaaataagacaagaagcaaaaggtttccccacccccatccagtgtacttgctacagactttatctctaaattaatttatttccaggccataaacaaatgctgcactacatctctttaagacaagttaatcttaaatattgtacaattagttaactgactttctatcagaccgcctggatgcagacttttctatcacgttaggaaagacagtagattgtatagttatctcccagtggtgggtgtgaccctaaaactatacaacctactacctcatcccacagtgaagagaacatccagggtgaatggtgaaaaggaatcacagttgagcaccacaggaaggctttttttcctcctcggtaatcctggtttcctgtgtgagtgataagaaaaatagtattagaccattttcattcacttacgttgaaaatgaagtttaactgaacattttggctacatgcataatctatgctgtggtttcatttcctgtatttcattaatagtattttaaatgcttggttatctgaatccgctcctaaaaccatgtatttacaagattcagaaatcaccctcttaccaccaccttttactattattaactgctggttttcttacagttcctacaaatgaaaatgcatgaaataacttatccttcaagaaacaacaaaaaatcattacagaaaaacatgacagcctctaattaaaaatccaatgacttcaaaacccaaaagtcctgtacatcatgcataatccaaatgcactaacatacaacgagataatataaaaaacacacacaaatagaaactaatttttaaaggaacctactcatttatcccatgcgagcaaacactaagtggtcttattaggactaaatcaaagataatcacctggatctgattcagggtcaggatcctttcctttagatagaaaggtaatatgtggattgaaggcagagtccaaaatctttaataaacccaagtaatctaaactgtattattaccctttaatttacagacttcatatttaggaggtagctactacgaagattatcttttaagatagggactaaatttattttgtagtgatttagtaaccaaaagcactaatttttaaaattacaaaacgtaataaaaaacatacggctcaatataatagaatttaaagtctagaaataaacccatacatgggtcaactgattttcaaccatgacaagacaattcaactgggaatcgttttttcaacaaataatgctgacggctgtatagccacatgcaaaaaaaatggatctgcattctttgtaaactggtgtgcaaaacacacattaaagtaacttaaaacaacctaatttaatggtaaaatattttaatagatatttcaccaaagatatgactcataagcacaaatggccaacaggcacatgaaaagatacattattcattaggatggctaataagattaataaaagtgttgacaaggatgcggagaaaattggaacccttagattgctggtgggaatgtgaaatggtgcagctgctttggagaacaaaacttgtagacaagtcaaacagttgttaagtggaatcagaaacacgtatttcgtctttgtctccatttgaagatcctggctggcatacagctcctaaaaccctcagaatttcctaagtgatgaatgtctgtttaatgctactgagtcgattggtggctcctgtagtttcaggagggggatagtcaccagaaagaccaaggtgtgattagaggggtggaactttcagcctcaccccctcaacctccaggtaaagcagagaggacagagagtaagccaatcatcaaaggccaataatgtaatcaatcatgcctaagtatgaaacctccataaaaaccccttaagtgtcagggtttggacagctctgagttgaaaaacacatcttcatgccaggaggctggtgtaaccctaactccatagatacagaagctcctgtgctaggaaccctcctggacttcagcttaaggacctcttcatctggctattcatttaaatcctttataataaaccagtgataatgagtgtcttcctgtgttctgtaagccatcctagcaaattatagacccagtggaagaggttgtgaaaccccctaatttatagctggttggttaaaaattcaggtagaaacctgcatctgaagcgggggcagtcttacgtgtttgagccctcaacctgtgaagtttgtactaacttcaggtagtttcagaattaaatttaattgtaggacactctgttggt

SEQ ID NO: 1883785 - DNA, 4001 bp, Homo sapiens
ctaggccaggcagaaatactcattttgaaattaccccaatcctatcacacctcatttccttgctcttttcctacgcatcttcgcctaaatcagtgcacatgaaattgatgcaattttgccacaacttaaatcttcaactttaaagaactgtaccatgtaaggtaccttagaaaacatacccaaccatctcaattcataaaggaaatttaaagccccaagtatgagaacatccctagatcacgattcttccttccactggagcaaggggctaggcagcagaggggcaggatgggaaactccactgaatttcctttcaactttctcacccctggagacttttaaatgtattactgctcatgatcaggcaagggtggttcacacctgtaatcccagcactctggaaggccacggccggtggatcacttgaggccaggagttcaagaccagcctggccaacatagtgaaaccctgtctctaataaaaatacaaaaaattacctaaatcctgtctactctacccaggaggtggaggttgcagcagtgagctgagatcacaccactgcactctagcctgggaaacagtgagattttgtctcaaaaaataaaataaaataaaaaaaaatactactgttcatagtagttggaaaaagatggaatgctaatgcacaaattcgtctcattcctagaatgataaatgctcaaactagactagtgaaatgagacataagagtttttacaaggtagtgtctgcctgagcaaactcaaataattactcaagtaaagaaaggaggctgtcctggccagcactttgggaggtaaaagccagaggataatcaggagttcaagaccagtctgggcaatatggtgaaaccgtctctacaaaaataaaattagccaggcatggttgtatgcacctgtagtcccagttactaggaagcttgagtccgggaggtcaaggctgcagtgagctgtgatcatttcactacactccagcatgggtgacggaatgagaccatctcaaaaacaaaacaaaaaggagggtgatcctgagcagttaattgtctgtacaaagtcacacaagtgtttacaaaaatggaagagctggaaattgctcgtgttagctttattaaaacatctgtaaatgaccatccaatcaccaaattattgctaatgaaaaatgaaactaagaacaaatcataataattacaaatgaaaaatgcatctactactgcaaggatggggataagggttaaggatgacttaaaaagcactagttttgaagtatgcagtgtttttattgaaaagatgtataacttttaacaaaatatgtaacactattacccagtcaagacaaccactttcattttattgaccttccagttcttgtacatattaaacagacaaatcactgttacataccataatgagcagcagctcaattacccattcccaaaccatgcaattccaccccagccgccccaaattttaaatccagaagacaaacctagaaaagcagcaagataaatatttacaaacattgtagaaaaacagcagtatttcaagttttgttaaattctttccttcagacataatgtagacatagaggaggaacagctgagagtctctgcatcacagaaagagaaacctgagcaaaaacaaaaccatgctttctaaactttccagtgacaccaaaagggagacactagcaactaagtgtacttcagaagtctcaaattctcattagttgactttcagttatcaatgtcagcaccatgctgcagtttataatcactaacgcaaacactgctctctttgatattcttgcaatgttttcatttgaaaaaacctacagaaagaactctgcttacaccaaagcaaagtagcaaggaaacaggttatcggtgaataataaggccctaagaaaggcagcaggtcgtatagttacctccttgtgggcaaaatccctgccctaaaactatgcaacctactacctcttcctaggaacccattttttttttcttgctggtcttctacttggcagatgcacttcaaattaacctgttaaattaggtcatgttctttgagttttgtttctaattcaaactaatcagaattctttaactaatgcttttgaaaagttatctggccatatgaccttggtaaaaagccacaaatacatttgcttaaaatccaacctcaagtcacaaacgaacaagaaagtaatgacatcagaggatgtaagccagtagtctaatactcagcccaccacgtattactggagtcgctgacttttaacatttaattatcaattttttttttggacagtctcgctctgtcacccaggctggagtacagtggtgtgatctcggctcactgcaacctctgcctcctgggtttaagtgattctcctgcctcagcccccagagtagctgggattacaggcgcccaccaccacgcccagctacttttttgtatttttagtagaaacaggttttcaccatttaggcaggctggtctcaaactcctgactcaggtgatccgcccaccttggcctccccaaagtgctgggattaccggcatgagccaccacacccggcctaatttttgtatctttattagagactgtgtttcaccaggctggtcaggatggtctttaactcctgacctcaggtgctccacccgcctcagcctcccgaagtgctgggattagaggtgtgagccatggtgcccaacccagttaccaacatttaaatatcaaatttcataaaatctccagtctctcctgttaactggaaaagtaggtgacaatgtatataaaccctgcttgctacctatcaaccagagcaaattaatttactatatttgccagttacaactagcccctcctgggcctctgatggtatttcagtttttgacccctgaattaaagcaaacagaaacaaattctgatcatgaattttatcatcattaaaaacaagctttcagagatagtcattctctccataaaggcatttttaaagttttatttcgatttacttactctgcttagctaataacaatgtccttatgtaattaataaaatatataaattaatttttctccagggcttaattattagataaggatacgtttccaactgaaggtggcaacgttatgctggaagaacatgtcaggaagaccacaaaatttcatgactgtacttgctacactttcagcagaagagttatacatattttcaattcaacaaagattaagccaaaaagaattcttagaacattcccactcttctttggcacatcaaaaggcaacaaatgtcattttctcccatgtttttatgtgcagtttagaacaaagaccaattatctatgcagctgtccacagtggataaaacaaaaagcatacatttggtccagagttaagtcacctgggttgggcccatccaaggaagtttgatgtttctactctcatgaaaagtaccaatggcactgcacagtgattatcttagatattaaggataaacacaaatttctccttaaatttccatttattggaaatgattggagggagggaacttctccctcacctccacactgcctcttttccaactcttcttccaacacaaaatagtttaaacagcaagcacttagagagcttttagccttgcttgttgattacaaggcccaagttagtgtatggtttgcccatcggaggaaagctaaaacatgggccttcatgggtattaaaattgaagaaaccttttccagcattttttctattttctttaaagtaacaacctatggacttccccatctgacattttcgagtgatcccactgtgtgaatgaaggactacttcagggtttgagggcaaagctgaaatcttagcaacttaccagtgagcaaaggtagaacccagagcccatctctccttttccaggctgctgagtaaagtctggctcaatcaacctatcaatgaagcagtgcttacaacattctccaagac

SEQ ID NO: 1883786 - DNA, 4001 bp, Homo sapiens
tgtccttgctgaagtagtaaatttattaattaaaaaaattctccacccttacatacatgagtttttaatattttgtgtgacaaaatgggaagcatgcataaagcatttgagcaattatttgagtttgtgagctttggtaactgatttttttttttaatgtcttccctcatcatccaggctagagtgcagtggcatgatgatggctcaatacaaccttgacctcctgggctcaagtgatcctgccacctcagccttccaagtaactggaactataggagtgtgccaccatgactggttaatttttttttttttttttttgtagagacagtgtctcactatgttgcccagaactcctgggcttaagcaatcctcctgccttggcccccaaaatgctcagattacaggcatgagacatggtgccccgcctgatttttttttttatatgtaggaaaaccatttttctttgaattactgatagacaaaaatatgaatattcagacttggatatctggcaggcgttttctcaaaaattaataaaatgagcctgtcattctgatagcatttgttgccaatgataaaatttgagctttcaagcaaaatttagtattttggaaatttgtatctgcttctcaatatttaaagatgttgctgataagatcaatgataatgatatttttgatattatataaagaattgtgctataatcctagctacttgggaggctgaggcaagagaatcacttgaacccaggaggtggaggttgcggtgagccgagattgcaccactgcacttcagtctgggcaacagtgtgagactctgtctcaaccaaaaaaaaaaaaaaaaaaaaaaaaaagaattgtgttaacattggaaagccctgcatatcttagtgaaccagtattttccaaatgaccactgcatggtgtaacaaaatcatgtatgggcccatctgataggggtttaacatttaaaatgtataaagtactcaactcaatagcaagaaagaaacccacttaaaaaataggcaaaggacctaaaaggacatttctcaaaagaagatatacaaatggccaacaggtacatgaaaaaatgttcagcatcacttatcactggggggaaatgcaaattaaaaccacaatgagatatcacctcacacctgttagaatgggtattatcaaaaagatgaaagtgctgaagaggataagaggatgtggaaaaaaggaaactcttatacattgttagccggaaggcaaattagcacagccattatggaaaacagcaagcatgggggttcctcaaaaaactaaatatagaactcgcataaaacccagtaatcccacttctgggtatatatccaaagaaacaaatcaatatgtcaaagggatatcttcactcccatgttcattataacattattcataagagccaagctatggaaacaacccaagtgttcatcaacagatgaatggataaagaaaatgtgatatatatatatgacatatatatgatatatacatcacattttctttatccatttatatattattatttatatatatatattccccaatggaatactattcagccttagaaaggctgtcatttgtgacacgtggatgaatctggaggacattatgctaaatgaaataaggcagacacaaaaaggcaaataccacgtaatctaacttatctgtggaatctaatgaaattgaactcatagagaatagaatgaagagaactcatacagaatagagaatagaatgatgggggtgggagggagagaatgaggagtcattgatcaaagggtagaaagtttcataaaaggaggaataacttttgtgatctattgcccaacagggtgcctatagtcaacaatatgttaaatatttcaaaacaacacagttggctgggtgcagtggctcacacctgtaattccagtgagaggcgaagccagctggacttcctgggtcgagtggggacttggagaacttttctgtcttacaagaggattgtaaaacacaccaatcagtgctctgtagttagcaagaggattataaaatgcaccaatcagcgctctgtaaaacgcaccaatcagcactctgtaaaacacaccaatcagcaggatcctaaaagtagccaattgcagggaggattgaaaaaagggcgctctgataggacaaaacggaacatgggaggggacaaataagggaataaaagctggctgcccccctccccacagccagcagcggcaatgccctgggggtccgtttccgtggtgtggaaactttgttctttcactcttcacaataaaccttgctacagctcactcgttgggtccctgctggtctttaagagctgtaacactcaccgtcaaagtctgtggcttcattctttaagtcagtgagatcacaaacccaccagaaggaaccaactccagacacactagcactttgagagaccgaggcaggaggatcacctgatgtcaggagttcgagaccagcctggccaacatgctgaaatcctatctctactaaaaacataaaaattaactcggcatggtggcacatacctgtattcccagctactacttgggaggttgaggcatgagaatcgcttgaacaagggaggtggaggttgcagtgagccaaaattgcaccactgcactccagcctgcgtgacagcaacactctgcctcaaacaaataaataaaaaataacagtaaatttcagatgtctctgcacaaaaaaagataaagtgatgatatgttaatttgtttgatttaataatcccatgttgtatacctatattaaaacatcacattataccccatagatgtatacaattatgatttggcaatttaaaatattaatgaattttaaaaagagcagctttctggccaggagcagtggctcatgcctgtaatcccagcactttgggaggccgaggcaggggatcaccaggtcaggagcgagaccatcctggccaacatggtgaaacccagtctccactaaaaatataaaaagtacagaaattagctgggcgtggcggcacgtattcccagctactcaggaggctgaggcaggagaatggcttgaactcgggaggcggaggttgcagtgagccaagatcatgccactgcattccagcccgactacagagctagactctgtctcaaataaataaataaataaaagagcagcttttcataaaaatgatttgcctattaccttttgagtagtctaatagtatcatttgtaaaccaaaacaaaaaacagaaaacaaaattaagtgtgggtaaagatatatattcaatgtgaaaaataagttaatggatttaaatgtaacgagaaaaatgtattgactagtattcagatgccacagtgcagttaacctttaagaaaccagtatttattaaattttggtgtggtgtcaaagatgaatatccataattacctaaaagggctgttttaaaatgcccccttttccaactacaaatttggatgaggctgtcttgtcatcatatacttcaaccaaaaataaatatatatcagcacagaatgaaggcagaagcagatatgaaaatctacttctattaggccagagacattaaagagacttgcaaacacataaaacagtgccactcttctccccatttttgtttggaataatgtatttttttaaataaaatattaacatgcaatagctttattttagctattttattttactcttttttttttttagacagggtctccctctgttgccaaggctggagtgctgtggtgtaatcatagctcactgcagcctctaagtcctgggttcaagccatcatcccacctcagccttccaagtagctgggaccacaggcatgcgccgccaccacacctcgctaattttttaaatttcatagagatgaggactcgctatgttggctagactggtgtcgaactcctgggctcaagtgatcctcctgcctcagccttccaaagttctggggttgc

SEQ ID NO: 1883787 - DNA, 4001 bp, Homo sapiens
aggttttcaccatttaggcaggctggtctcaaactcctgactcaggtgatccgcccaccttggcctccccaaagtgctgggattaccggcatgagccaccacacccggcctaatttttgtatctttattagagactgtgtttcaccaggctggtcaggatggtctttaactcctgacctcaggtgctccacccgcctcagcctcccgaagtgctgggattagaggtgtgagccatggtgcccaacccagttaccaacatttaaatatcaaatttcataaaatctccagtctctcctgttaactggaaaagtaggtgacaatgtatataaaccctgcttgctacctatcaaccagagcaaattaatttactatatttgccagttacaactagcccctcctgggcctctgatggtatttcagtttttgacccctgaattaaagcaaacagaaacaaattctgatcatgaattttatcatcattaaaaacaagctttcagagatagtcattctctccataaaggcatttttaaagttttatttcgatttacttactctgcttagctaataacaatgtccttatgtaattaataaaatatataaattaatttttctccagggcttaattattagataaggatacgtttccaactgaaggtggcaacgttatgctggaagaacatgtcaggaagaccacaaaatttcatgactgtacttgctacactttcagcagaagagttatacatattttcaattcaacaaagattaagccaaaaagaattcttagaacattcccactcttctttggcacatcaaaaggcaacaaatgtcattttctcccatgtttttatgtgcagtttagaacaaagaccaattatctatgcagctgtccacagtggataaaacaaaaagcatacatttggtccagagttaagtcacctgggttgggcccatccaaggaagtttgatgtttctactctcatgaaaagtaccaatggcactgcacagtgattatcttagatattaaggataaacacaaatttctccttaaatttccatttattggaaatgattggagggagggaacttctccctcacctccacactgcctcttttccaactcttcttccaacacaaaatagtttaaacagcaagcacttagagagcttttagccttgcttgttgattacaaggcccaagttagtgtatggtttgcccatcggaggaaagctaaaacatgggccttcatgggtattaaaattgaagaaaccttttccagcattttttctattttctttaaagtaacaacctatggacttccccatctgacattttcgagtgatcccactgtgtgaatgaaggactacttcagggtttgagggcaaagctgaaatcttagcaacttaccagtgagcaaaggtagaacccagagcccatctctccttttccaggctgctgagtaaagtctggctcaatcaacctatcaatgaagcagtgcttacaacattctccaagaccacccaaaacccaaactggaaatgaatcatgactaatctgactcattttggctcacacagtgcccttccaatttgtatttacctttaccacccaggacctgaccttggacatgtgtaccaggatgtaaggcaataaacctattcacaattccaaaagggcctggtcctctatgaagatttcctgaaggctacttactttctctactcattaaaatttttgcttaacttcaaatttctgaaatataccatatgtgaaaaatttaaatgttaatctgtgcctactgtactacttgaacagagaaaattaactgataaactgtaaatacaaaatgtcaaaattaattcttctgagttttaatatcatctaaataaaaagaaaataatgcagcaagtctactcctcagggaaggcaatagattgtatagttatctcctgaacagggtaaaatcactaccccacaactatacaatctactacctcactctgatagagcaatgttttcttctggaatggaaagtacaatctctttcgaaagaaaatttcaacataaaattatcagcataaatcaaaataaaaaaatacatttattctgacacagagaaataagacaagaagcaaaaggtttccccacccccatccagtgtacttgctacagactttatctctaaattaatttatttccaggccataaacaaatgctgcactacatctctttaagacaagttaatcttaaatattgtacaattagttaactgactttctatcagaccgcctggatgcagacttttctatcacgttaggaaagacagtagattgtatagttatctcccagtggtgggtgtgaccctaaaactatacaacctactacctcatcccacagtgaagagaacatccagggtgaatggtgaaaaggaatcacagttgagcaccacaggaaggctttttttcctcctcggtaatcctggtttcctgtgtgagtgataagaaaaatagtattagaccattttcattcacttacgttgaaaatgaagtttaactgaacattttggctacatgcataatctatgctgtggtttcatttcctgtatttcattaatagtattttaaatgcttggttatctgaatccgctcctaaaaccatgtatttacaagattcagaaatcaccctcttaccaccaccttttactattattaactgctggttttcttacagttcctacaaatgaaaatgcatgaaataacttatccttcaagaaacaacaaaaaatcattacagaaaaacatgacagcctctaattaaaaatccaatgacttcaaaacccaaaagtcctgtacatcatgcataatccaaatgcactaacatacaacgagataatataaaaaacacacacaaatagaaactaatttttaaaggaacctactcatttatcccatgcgagcaaacactaagtggtcttattaggactaaatcaaagataatcacctggatctgattcagggtcaggatcctttcctttagatagaaaggtaatatgtggattgaaggcagagtccaaaatctttaataaacccaagtaatctaaactgtattattaccctttaatttacagacttcatatttaggaggtagctactacgaagattatcttttaagatagggactaaatttattttgtagtgatttagtaaccaaaagcactaatttttaaaattacaaaacgtaataaaaaacatacggctcaatataatagaatttaaagtctagaaataaacccatacatgggtcaactgattttcaaccatgacaagacaattcaactgggaatcgttttttcaacaaataatgctgacggctgtatagccacatgcaaaaaaaatggatctgcattctttgtaaactggtgtgcaaaacacacattaaagtaacttaaaacaacctaatttaatggtaaaatattttaatagatatttcaccaaagatatgactcataagcacaaatggccaacaggcacatgaaaagatacattattcattaggatggctaataagattaataaaagtgttgacaaggatgcggagaaaattggaacccttagattgctggtgggaatgtgaaatggtgcagctgctttggagaacaaaacttgtagacaagtcaaacagttgttaagtggaatcagaaacacgtatttcgtctttgtctccatttgaagatcctggctggcatacagctcctaaaaccctcagaatttcctaagtgatgaatgtctgtttaatgctactgagtcgattggtggctcctgtagtttcaggagggggatagtcaccagaaagaccaaggtgtgattagaggggtggaactttcagcctcaccccctcaacctccaggtaaagcagagaggacagagagtaagccaatcatcaaaggccaataatgtaatcaatcatgcctaagtatgaaacctccataaaaaccccttaagtgt

SEQ ID NO: 1883788 - DNA, 4001 bp, Homo sapiens; identical to SEQ ID NO: 588582

SEQ ID NO: 1883789 - DNA, 4001 bp, Homo sapiens
tgatggctctcccagcctttcctctcttctagcctctaccagctccctccccatttttatctcacagatgtttcccctagtaaaatcctctgtattgtccatcctgtcttggtgtctgcactgaaggggagtgtaaaatcccaggtcacagaaagagcccagataacctgcacatccactctgtgaggcagggcttctgagccttcttccaaggtgagcgagtaggtttgacaagctctatgactttcccaagctcataagattagaaagcagcagagcctggtctggaacccaagctttctgatccccaaatccctgttctcttctgctttgcactgtccactgagcactttcccaacagtcttcacaagcttcctatcatatccacaattttccctgtgaagaggcagtgcaagctcaccactcccattttgaaaatgagaagctgagagtcagaaaggccaagtcaattgcccaaggtcattggttagcaagtgacagggcaggtatttcaacccaattctcctgcctcccaacccaggtgggcaccatttatcaccctccatgctactttagctcctgcaagaaatctgggagttgcctgctccacctgcctgccactccccacaaattcaattttccccctcttcctagaagcacaggccctggggtcggggggtcctggctgtgcccagtatgcaggggcctggggtccagcccagggatgtggggagaagccgctacttgccacagttggaaacccactgctgagcctccttccttttagcttgaaagtgctctagagtttctgagctcacaatgcatctctttggaagtctgccctcccagggttgccatggtgactattttggtactgcatgctagaaaaagccgaggcacctgctggtcacaccaccaaaacttgtctctctgaaaaatcagcagatggcatttgtcagaaattcctacttcttgattaatttgggaaaaagaagagtgtgtggcagtgctgatatcctttaacctggaccgggcgtgttggtgtttcagggaggatgtgaaaagctgtgcacagaccccatgaccttcttctgaagtggtgggtcatttagttttcccagagaggcaaagaagtttggtgatttggagcctagtaaatgaaaacaagagaaagaccatgatgttgcttttgtattaagaagagttgaaatttcaaggccagttctgaagaggcctataccccacttctagtaacttccatgagttctcaaatatgcctcaggttgggtccagcttttaattagagggacgtgttgaaatcacaagttagattcaaatcccagttctgccacctattaattgtgtgaacttggacaggtccctcagcccatctatacctcagtttcctcatctgttaaacagtgataataaaaacatttacctcataaagttgtcaagaggattaaatgacatagctattgttgttattgttattgactagaattaaatctaggcatggagaaattagcaagtccatatgctcatatagttttacatacaactttgcaactatgcttctgaaagtaaatcaattaatttcactgtctcagtctaagcagtgatattacagttggagcaacattaaaaaatacaacaaaaacttctggtgcacattgtaccatgtgtttctaccttactcgttatcttgttctgcttcccttttcacagtttgcaatactatttgttcccagtgttacttagcaaactttgactgaactggttccctaagcatgcattgactaccacctctgaattttgggccaggcacttaaaagagttttctgcagaaggaattatgtagtttactgcttttctttcacctgttggttctctatgaggaatgagcctcaagttccccactggcaattttgttctatcacaagtcctggtaagtcctggctgacaaattctgggtactctcctttcctgtggccatatcagacattgctaatcaatcagcattcttcttgctgaattttgaagaacctgggaaccttccagaagtcagtgctcaaggtagccactgctaattgatcagagggcagaaaaggaaatgtatttgtcatcctcattgtaggggaaaaaacccaggaatggattaattctaatcccagttctgcctttaactagctgtatgaacttgaacgaatcatttccttctctggggctcagtttctatatttggaacaagttgaataatctttaattctttctagttctcagtctccacactttaccatgctccctattccccgccacatgtacacacattctcccatcaggtgggctcccagcacccaacgcaggctctgatctgttccttttctgggacttatccaaatgatcagattttatcaaacatcctgggatggccaagggccaaagaaaacattttcagatgcttagaattaccaaatcacagcatttctgctatgaaagttgccttagagcacaatgagctgaatcctccatgttaaagacgagcaaactagaaaaagagaagttcagtgacttccttgaggtcacacagcaagtcagcaggttgatttggcccctgtttggggacccatccaatctgaggccaggcattgtcctgaatcttgagaaagttcataaggatcctagctaagagcaagccagagaagatgctggccacctgggtgctctgaaagcctgaagggtcctggtgggatgggggctgcacacagctggaagtggctgaggaacacttgctgggggtccaagcctgtacaatgtgacttgaggaagtcttggcccctgtctgggcctctggtctcagctgtataaagaggtggattgtacaatcactggtcctcaagccaggctaagcagcacaatacttggaaagctgacgacaacaacaacaaaatgcagtctagatgccacagccctaaagatttcaattccattggtctaagtaggcttccatatctgtacttgtataaaaagcctcattggtggtttgaatctatagccaggtacagtgagttgaatggttaccctcctccggaaaaaaaaaaaaaagtaccatgtcctaatccccagaacctgtgactattaccttatatggaaaaaggatctttgcagatgtgaaggatcttgatatgaagaagatcatcccaaattatctggtgggctctaaatccagtgccaatgtccttataaatgtaaggcagaatgagatttagcacagagagggaggagaaggaggcactgtgatcagagaggcagagattggagcaatttggccacaaatcgaagaatgtctacagctccggagctggaagaggcaaaaaatggattgtcccctacagcctccagagggagggcagcactgccaacaccttgattctggacttcttgtctccagaaatgtaaaacaataaatttctgttgttttcagtcactcagtcacgtgccctgggctttatgaatcagatatgcccagggaagagtgtagtttagaagtggaccaggaggaagggggctgcccagaacccaccttttggcccaagcagccctggagacctgcagctttgtgggtgtcagagcctgaggttctggtgctgctgagagctcagcatcattcgtgaaagccgtagagtctatgccaaggtggggtcttcaaaggtgtgatctcactgcgtggtttgggcactttttctggctggctacctttaagctggactctttggctatcctggagattcctttgaaaggaaagggaattctaaatgtaaacgccacctcacagacacttgttaagtgtctcttctcctcctccctcctgcctctctcctctgccacgtctgtcaaactcctcagggcagtgcatcattctaagcattgtgggacccgtgaacagggatatattggatctaagttcccacaaaatggcactgattgtttgaagatgctta

SEQ ID NO: 1883790 - DNA, 4001 bp, Homo sapiens; identical to SEQ ID NO: 588619

SEQ ID NO: 1883791 - DNA, 4001 bp, Homo sapiens; identical to SEQ ID NO: 588621

SEQ ID NO: 1883792 - DNA, 4001 bp, Homo sapiens
cacttcctgctgaaagtggccactgcaaatggagccttttccacaagagggtaagtgaacccgtcacaggcttttaaggagagatggctaacctgaaactatcaggatgtccctccttttcggcttctcggtggaggctggaagcagaaaggtctctggacctaccgtggtccagtcccatgtgtgcactcagcccttggccgtgtcctgagtccttcggggagattatgtggcaaaatgtgttgtttttggtcacgtagaatcacatagtatctatgaaatgttagtaaaagtcttttcagatagcaaaggcgtacattaaggaacgtaatcaccaagctgatgtatagttctaaatgctatcattgagccttggccatcttgaaagaagaaagagttcacatttttttgtcctgttgcaaacattcccctccccaaggacacctgtcccgcagcgcccaccttctcgagtcctactctgcggggtttggatggccaccttgtcaccttgcctcaaatcggccttgtgggactgttccttgagctttgctgcccccacctccaccattctgctgagcccctggccacaacggcatcgtgacttccattgtgggggggggctcagtaatgcattttgaacccaagagttaaattttagaatgctgattgaagaggcctgggttttggttttcctttgatttagccacacggtgcagatgatccaaaatacagccttgaaaacatttttgtgggcctttgcgtgttctctttgtcatcacttttggtgagtaactctgtgtgtgtgtgtgtgtgtgtgtgtgtgtgtgtgtgtgtgtgtgtgtcccttgggccttctttacaccactcacaggcggtgttactttgagtgagttttatcactctctgagcctgtttcttcctctgtgaaatggggatagaaatgcctcctttgcaggatttgtcatgagaattaaattggggggggacacagaaagcaccaccctggtgcccagtgagcacccatgcatgctggctttctgtctgtgtccagggttcaatgcagaacttagcctaagcatgagcagggcatccccttagacctttcctttgccaccacgtggctcccgcctgctgcagttgcaactccagtcaccagcacccctccagcaccccacagcatcagagactgggcacaggcaacctcccctgcggagctgggactagaatggctgtgttcacaggtgagcagctgggaaggggttaagatagtaattgtgtaagtcttccaggctttctcccagttctgcgataatttgatgaagaacttcaccctaattaaatattcaaattaggaataagtgtcaatatggcttcccattgcctggaatgatgattaattgtattcaaaactctagtggcccactgtaatctaaacctaaccgttgttcttgattatttctgcaccacacttgccatgtttttgttttaagatttaaactagtaattgatttgccatatgccgtcaagctgcacgtactttatgcatttaggaacttggggagtttggaattgtgatttccttcatcttccagtggcagcttttttttccccttgtccaatgcacagtgatttggttttgtgtgtgtgtgtgtgtgtgtgtgtgtgtgtgcacgcatgcacgcgcatgcatgcatgtgtgtatgtgttgcccatgaggaaaacccattctacagtcagcctggtaggttggagttgcattggtcgtggcaaatgggcttcctgaatggaaaatgaacaggtctgtgtttgcacttactttgtgccctgtgtcatctcagtaaagcaacatggcatggtggaaagagcatgaacgcacatcctagcccagccattttcttcagctgtgtgactttgggtgagttacttaacctctctgaaccacttttcccccacatatagggtactacttcccttgctgggttgtttacattagagatgtgtatgaacatgaggaatggtgcaagtgcccagtgagtagtaactgccatagtcctaaataattacaggagtgaaaattccaggaacaaagccttcacgcgggcctccctggaaagcccctcccagccatgcaagtcaaatcccatttcctacctctctgactcccggagcctccgttgcccatccttggctttgtgacatctcttgggccactgtctagactcttgaattactatttcattgctcgggcctcttctccccagccacagtcttttctttttgcaggtgggaccatggctcccatgtccctggatacctcccagggcctaacagagtgcctggcctgtagtagactctcaacagatgtttgttattttggttatttctttttttttttttttttgagatggagtcttactctgtcacccaggctggagtgcaatggcgtgatctctgcttactgcagcctccacctcccaggttcaagcaattctcctgcctcagcctcctgagtagctgggattacaggcacacgccaccacgcccggctaatttttatattttttagtagaaacggggtttcaccatgttgttcaggctggtcttgaactcctgacctcgtgatccacccgccttggcctcccaaagtgctgtgattacaggcatgagccaccacacccagttatttctttttcatgccactgttttaaaattgaagcatataaccatattgtcctttatggcctatcttttgatattcagagcttttactttgtgatataggagatttatgttcgtgtttcagttgacttatggataaattcctaaaggggaagatacacgtttcatttggtttcttaaactgtctcggtgccaggcagtgcctagcacacagtaggagcacaataaaaaaagtgcgctgagtcagtcgccacatcctaattatagcggccttgtgtgcctgttgatactggtccagctcccctggcatgggcctgtgttcactgggtaatacttggaattaagttttaggtctgggcatagaaggtttataagatagtgaatataactgtagaggaaataggtctcttttaagttttacaaaaccttacttgtcttggcttgtgtcaattacaaaacgaaacaaaaaagagactcatcagaccgtgacaaatgatagtaaactttgcgcatggtggtttctccctgaggttggctccaaaatcaatatgaaaagaaaaccacaactgaaaatattttagagcctagagtgattaaaataactgactttctgttttagcggaaacaagttacaagaaagaattacaatatctcctcacatctctgggtcttcacagatctcaatcgtaattcagagcctcacttgggaaacacaggggacttggagcaggaatcctggctgtgaagtcattgaggaggattcgagtgttagtcaggcccttccagctgaaaatgattcattttaattaccttccagggtgatccgatacctgagcatatggtctttaagaaataaggttccccaaactgtcagcaagtgtgggcaatggtcagggacctctttctgacaccattgaccagccttggagagcgggcgctctagaaggtgcttattaaaatgccagcaggtgcagcaaaggtccccttctctgtgactcccgcaccctgcttgtgccaggtgttttataagagcctttttcttcattaaatggcattcattaagcacgtccttacacctggcacagaagctgtgcgtcacagatgacttcttcccagtggtgtttgcaggaataatgtggaatttcatttagccatttgctgtgttcttcttccccttcctatcttaacttgatttttgttgcttttcatatttcttctgctgcccccacaatccattcctctcctttgtacatgacctctggtctttgtccaccagcagacacattatatagaaaacaaggtgtcccttcagcaccaagcac

SEQ ID NO: 1883793 - DNA, 4001 bp, Homo sapiens; identical to SEQ ID NO: 588633

SEQ ID NO: 1883794 - DNA, 4001 bp, Homo sapiens; identical to SEQ ID NO: 588645

SEQ ID NO: 1883795 - DNA, 4001 bp, Homo sapiens; identical to SEQ ID NO: 588646

SEQ ID NO: 1883796 - DNA, 4001 bp, Homo sapiens
actaagaaacatatcaaggtgcttttggcacaggtgcccacaaatacggatgcagtgctgagatagtttatgagacttgtaccatttcacaaactctgaaattgggttccatattggcaaggctgccacagttgttaagaataatcctctatgtttcttcctcacaaaaccatatctcatttatatccagaccattacttcactataattacaaggacaaattattagcaagaaataagaatagtattagaagaattgatcctattttgaacccctctccagtatcttcacactcttgtcaactctccaggcctctctcttgccctgagttatcagcctgtgtggtgttaactaccttagaaggtacaagctaagaaatgtaacagtatcaaccctcccagttgcttaattatacccataggtaatacaaaaagctctgaagacccaaagatgacattactaatgatgtgatttcaggagccacagaagaaccttaccagcttccctcaaatcagtccttatcctctttctatcttcactcccatcatcatctattttcacactatccagctaagcaaagattcctggaggctgacttgtatcttcagactcacagagtgaattcagctcttctgaatcaagacccacccagtctctttcattcagacctgttgctaacaaatttatatttgccaaggatattaggcaaaagaggctacttgattggtggccaacctcgtgcccacatggaaggtatctttaatagggtcttttcaaaccttagtggaggagggtcagctcaatttgggcaatgcatttgttcccagtttcattttcttcctgggaattaactcgtcatttcattccttcagtcatcttctgtgtaggtgaccggagcactgagaggcagctctgatgcactattgtgtgtcagcagctcaaaggccctaaaacactgaaggttctgcatctgaagtattagattgttagcagcaaaatatgaaagatgaggtggacagtcctctaagccctatttagggaagcttttccaagccacaatcttaactacctacccaaaggatttgcattacccccagattctgtgccaacaaccttttaaggaaatacagtccttgggaaatgagttttgatggtgaattggggtgttaaggaagggaaagattgtcatagatggtagggctttgaaaatgcagggtatcagctgccactcctggcttcaacacattgagtcactgcctagacggttctcttggtcttattcccatcctggccaatgcttaaatactatttgttgaaaataattctttgagacagatttcagctacctcccttccaggttcgatttaacttggttgtaattgtcaatttgttgttataggtcttacctgtgtgaaagaaagaaaaagaaagaaagaaagaaagagaaaggaaattataaggtcaagttaacagttttgaggttttgtgtttttttctggaactacttcaagtgagaaaataaaaaaaaatggtgacaaagctgtacagatagagataatagaagacaaagagattaaaaggaaataaaaatgcatgattaaaaactaagaataaaaaacctatttttatgtttcctaaaggaaattgtttattctacagcctcagtaggtagacacaaacataaagatttccctagaagacatagagtgggatttgataacactgtctgttattttctgtacattgtggtaggtccaggaaatatgacattttcccccttgatgtgttattgttgttgttgggtggggtgggcattttgtttatttgtttggtggcaatcagtggtagtagggagtgggagggcttatattggtttttccagctattaaggggacatattgtgtcgttgtgcttttcacgttataaaatgtttatatttaccagtacagcactgggctttataaagactgcactcagaaccacactgcacagtccagttttttaaaaagctgctacatgacagacaggtaatcccactgagtgagttttgagaaacaaatcaaacgaagtaaacaagaaacataaaaaccaaatagcaaatgaataaaagcctgttcttgtaacttattcaacttttgccaaattcctaccaatcacttgctttttaaaagaaatgtataatagccaaaagagaaattatgtccctgttgtacagaagttagaatttttgactccaggcagcagtttgctcagtgatcttgaacaagttatccaattgcctctacatttgcatcagtttctctagctgcaaaatggggataatactatatacctacctcacagtgggagggcaggagattttgaggccctgaggttttaggtgggctgtgagggccaacgcttgacacaaagtccatgggttattattcaagaatgcacaggcccatcggccttttagaaagacaagacagggagtgcttgtttgatatttcaaggaataaagccggagctcctgaattgtagtccaccttaaaagagagacctgtattggagaatattttatttttttggcaaatttgatcttaccctttaccagttctataatttggttaaaagctgattatgtcctacaatgtcaaagtcagctaactgtcgtctacttaagacttctggtcatttccaacttatagaggaagggagtctctaaaatctcttcttcagaaggcacctcacttctcagacttaaaattccacatcaagtgttccattaaaagaagataaggcattctgagtgcaaacaaatgggggcttcttaaactacacaccagcagtcagtgaggaaaactttgaacaattattgagttgctttcttgggtctctataatcaataacctgtctgcagatatctatctatataaagatattatatataaatataaatttacatatatatgcacatgtatatatagttgtacatatatgtgtgtatatatatacttaaatgtaatatttacaaaataaaactgtgatctcgtctagagaaaatgtattcatattacaaactgctcttccatatttatgtaccatattatacctttttattattgttataattattatgggtatttctaattaatatgatgttgaaacctgtttggcaccttctggaagctaccaaaaaaatgacactccattgaagtgcttaaaagctgttctcataagaattcttctggcctattgtaaaaaagaaaaaaaaaaagaaaaagaagaaagacacaaagaaaataatctaaacaccaaaaactaaacacaattccaatcctttttctgtacctcacgcgcataaatttgctgctcctatttttttttctgtttatgtgtttttatggatctaagttaaatcttttggcaatatataaaaatgtaaatagtaaactttatttattaagaatgtcatcttttttaatttatatttacacaattgttcatctaatttattttttctatacagttttaaatactcagacatattttgctgttcatgatatttttatcctgttctcatggatttgttttcccatactgttttctctgatctcaattacaggttggatctcacaaataataatgtcagagacagaaatattttgccactgttgattactatactttaaagttctatattatgaaaatatataatagcttgtacgcttcagtgtgttgttgtgtggtttttgtgtgttgcggaatgataaagggctgtcatatatacacgctaacatggagagagccctggggcctggaattagacaatcaatgatagaacaagattttatccaatatatatcgattcctctacaaaattaattcctgaaagtatctaattttgcatatgcaaaaactgaaaaactttcttacatgttataagaaagttctggggagctaaagcatatgtcactcttggttatatattgccttttgcacacagcctttaataatat

SEQ ID NO: 1883797 - DNA, 4001 bp, Homo sapiens; identical to SEQ ID NO: 588692

SEQ ID NO: 1883798 - DNA, 4001 bp, Homo sapiens; identical to SEQ ID NO: 588694

SEQ ID NO: 1883799 - DNA, 4001 bp, Homo sapiens
gcatcgttaaagacataagaaaagagaaagctgactccttttcttccagtgaccattagtaacgtattctcccacaaggcacacagccacccactcaatgctgtcattaatcccacacagataggctttgcctggggagtgaacatatggtatcccctgaagcttttgtcttttctgcttgaagctagtttgtaaaaatcaaaaatgatattgcatttactttggtatatttctaaagagttttttttttttttttgaggcagagtcttgctctgtcacccaggctagagtgcagtggcgcaatcttggctcactgcaacctccgcctccagggttcaagcgattctcctgcctcagcctcccaagtagctgggactacaggtgcctgccaccacgcgcggctattttttttgtatttttagtagagacggggtttcatcatgttggccaggatggtctcaatctcttgacctcgtgatcagcctgccttggcctcccaaagtactgggattataggcgtgagccaccgcgtctggcctctaacgagatatttctaaaggttaggccttcagtcaagaattttaaagctggatcttagaggttatctaaactaacctctccatttcatagataaggaaagtgagtcccagaaaagcactggtttggacaagttcagaaagctaaacagtgactgtggatgtatgattctgtctcttaactcctaatccaaatgtcttctcactagataaggctgtgccttctacatttgaaggctcaaaccccatggatggatggagggaaggatgggtggagggatggatggatagatggatggatagatagtttactcattcattcagttatgcaagaaagattgagccacctccccatcagacagtgtgctaattgctagaatgcaattatgagagctgtttatagtgcctgtctctattctgtatgccttccttacctcagttgaatccagggaggtatataatcccaccattctattgaaacccctcatcaagatcactagtgacctctgttatcaaatataaggactatttacctattcttatctttcttcatagcattcaaaacaattgactacttccttctccttgatgtctatttcatcttggcttctatggcatcgttttcttccaaatgccccccacctgctggaagctctgtttctgtttcctttgctggctcctcctcttgtgtttaacttctacatgttggaattcccagcttggttccagctcattgacttttctctaactgcatgtccactctaagtggttatatgttaatgtcacgcccccaacaaatgtacatctgctactgaactcaaaacgtatatctctaacttgcctgcttgatatctccatttaaatatctaatgggtatctcaaatttaacatgtgctaaacagaacctttgactttttctctaaatctgctctgcatcattcttctctctcagtatagttagtcagcaacattaaacaagtgtcttctatgtgccagagtctgttgtagacattggggttacagtagtgatgaaacagacaaaaatctctaatatcaagtaccttccattccagtggagggagaaggatcatggaagccaagcaaatagcttgttcactccaaaaaggcctaggcccagccaccacctctcaccttaaccattgcaataacttaactggtgtccctgctcctacccttctgctgtcctatcaacacagcaaccagagtaatttgtataaaacacaaatataacagaaacacaaaacctcttccccaactttaaaccttctagtcacttcccatagctctttgaataaaattccaaacccattcccatggcctacagacctctgtatcatcaggtccttcccaccatgcagatcttcctggtctccctcggctgcagccacacaaatctcccctctgtttttctgatgccagcttctcggcacttgctatttcttctgtctggaacactctgacttcagaatatgaaagcaggtggccactcccatcatgcaagaatgccaacccacatacaaccataccatttctcagatttcccagtttaaaccttccttctgtctcatcatgctccttcccgtcacactatgttgacacgttgctattaaaaattatcttatttatttatttatttatttatttgtttgtttgttttctgcctccatgcactgaaatgcagctccatgagagcagtgacatgtctgtcttgttggctcctatatcactggtgcctagaacagtgccagaaacacaggagttgttcagaagtatttgctctgtgaatcaacgaatcaatgaatgcattgtgaatgaggttattggtcctacccttgcccaacaaataatcttttaaccctaacgaagttgagatccacaggtcaattcctaaggtgctcctctagtgaagtcttgtccaaatgtgagttcccatctttactaatatctttcaaacagtgtaactcaatcgaagtgcttagtccatggcaactcattaaatttcctttcctcttttatttattgactcatgggcacctctcactgtctaaacacagaagaaagctccctcttccccatgcttccccatgccctttatcccactccctcttccccactacccctctccttctccatattgggcctcccagcacttcctgtcactgccataccattctcctccccacctgctcttctgcagtatccaccaacgtggcttttaatctctcagtcctcagagagcacaggagaggcaaggaagctaaatagacgacaccagatcctctcttggggacgggggatatgaaacttcatctgttcattacttttgtgtcatcccagttcattggtagaactgggcaagtacaccaccagcttgtgtttgaagtggtattacgagtatgttttctccaggagagtagagagtagttgcgtctaattcagacttggggtgagcactcccagaagcacgcctatgcttgttatggctcacttagatgactacacttactgcaaagcctattaatacttaagccacatagtataccaggtactgtactaagtcctttaaggtaacttatttaaacctcacgtaactctgtgacaccagtagtcctgctatgatcccattttatggatgtggcaactgaaattaagtaacttgctcaagatctcatgaccagtaattgacttgacttccagtgcaggcagcacctgggctttttgtcatgatgctataatgctgccccgaccagaagaagacctcagtcttcacatcgtttgacacaggacttgaggaaaagtacacattgccagatggagctagaaggggagatggtgcacgaggtgggaggagtgcaggtttgcggtagaggatgtgtctcagaaatggcaaccattcaatgaggttggagccaaagacacagtggggagtgaaggaagctattttgtctgttttaaaaaaattgtaaatcagaaaccaaatatccagtttgctggtttcttttgaggattgctctgcctgggatttatcttgagtccaactaaaaacgttttacctggtttgtttggattaagattgccaagttgtggagccactgaggctccttacgtgtccacagccatgctcatggcgaagggcctgactctggagctcaatctcatgtggtcgtgtatgtagggacctccgcctccatacaagagctaggactggaggagccacagacagtcattctacactgcctgcattttgaacatgtaaaaagaaacgtggagagtttggagagtttgaaaaggatggtccagggggctgggggtaaaattactgcaagagtatctcaccacctctctcagagtttgttaagaaatgaacatgtgtggaatctatagtaaaaagtggtattaagcattttaaagatgggcctcttccagaaagttcgagccaagcag

SEQ ID NO: 1883800 - DNA, 4001 bp, Homo sapiens
gacagacatagacaagtgaaacagaatagagaaatcagaaataaattcacgcgtttacggtcaactcatttttaacaaaggccccaagaacacacattcgggaaggacaatctcttcaataaactgtaccaggaaaacccaacacccacatgtacaagaatacatctaggccattaccttaccatatacaaaaatctactcaaaataaagatttaaatgcaggacctgaaactatgaaactaccagagaagaaaacataggataaaatgcttcatgaaattggttaggacaaggaattttcaaatagacatcaacagcacaagcaacaaaagcaaagatgtaattacgttaaacttaaagccttttccaaagcagaggaagcaatcagtataatgaagacagaacccagagaatggaagaaagtatttgcaaactatgcatcaggcaagaggttaatacacaaaacatctaaagaattcaaactactcaaaagtgaaaatacaaataatcttatttttaaaaatctacccaaaacctttgtcccccaccatttccccaccttcttttcctgaccgcatttggccctctccctctcaccaccctttctcttcctccatctaccccaaactttttcaccgttttctccctaccgtcatttcgcaaagccttctctactctcccgctcaccacgcttttccccatccatctacccaaacactttctcccaccgtattttttttcccaccgtattttcccccttctccctggccaccctctttttccccctcccgctgtcatcacgcccttttgctccttcatataagcaaaaacattttcccccgtcttttcccaaagccttttccctactgctgctcaccaccctcttttccccctttatctacccaaaaactgttttcctcatcgtctttcccccggctcctccttgccactctccttcccttctccatctacccaaaaacatttccccaccatcttttctcaaagccttttccccactcctgctcacctccctcttttccccatctaccccccaaaatttccccatcttttcacaaagtctgcccctgcttcccactcgttctcttctctcccctatactgcttgccaccctcctttttgccttccatctaccccaaactattttcccgtcttttccccaaacttctttccctgctccctctcgccaccctcttttctcctcctccttgtcaccctctttccctcctccatctacccaaacactttttacctaccatcttttctccaccatctttcttttctgccactgttttttcgcaaaaccttgtcttcctcccgctggttaccctctttttccttctcccacttgctatcttcttttgctcctctacccaaaaacttctctccccaccatcttttcacaaaaccttctctccctactgctcgcccattttccccccctcaccactctttcctcttcccaattgccaccttcttttcccccttcatccacccataaactttctacccaccgtctttctgcaaaaccttccttccctccctctctgcaccctgtttttccacctccatctacccaaaaacttttttccccaccatcttttccccatcgtctttttgcaacgccttctcctcctcgctatccttttttccctttggcactaaccacactctttacccacctctatctatcccaaaactatcttcttcttcctacccctccagccgcgctgcaatgtccaccgccaccaccaaccgcagcgaggcgagccgcgccacggtgccgcggctcaagcctccagcatacgacctgtgactccttttcctggtcttctaagccgggcactgagcagctcaatagaaacacacggaaacctaaaaaaacaaaaacaaaaaaaacaacaacaaaaaaaacgtaactctgcttcagcattatttatatcctgaggttatgcgcatgccggttcctagactgcatgttctgattggatgagagcaagtcttaagacaaccaatcacagcatgaaaataaagtccaatcagagtaggcctagaggtttttctctcatccaatcagaacatgtagtccagggtctcctaacctcagtatataaagcatgctgaggcagcggcgcgtcatttctggcacttatgtgtgggtgtggggagctactacgtacccggcttaaagaactggaaggctccgtcacttttcgccccctggagcctggagcttggagcctggagcctggggcactccctccctgttggtggtggtggtgacggagcggtaggagggaggctagcagcgagagcttctcctgccgggctggaagacagaaagaagaggcaccgccgcgtgctggaggctggagccggagcttgcgcctccgcggctcgcctcgctgcggttggtggtgaaatcagagaccgcagctcggccacagtggtagaaatgtggtagggtaggtgagttatccagggctgcactgccctcttctgggggtaagggttgggtgtactataggggctcactgccaaaggctacactgcctgtggcattggactgtttgggggcactctctggggttgcattgctggtggtggaatggggggctacactgcccgaggtggcaggggtggtcgggagaggcaggttgtgtacactaacgtgtactgccagtggcggtggatggcttaggggcgttgtcttctgctgcactgtccgtggcaggggcgggttgggtggagttatctggggctacaatgctggcagtggggggtggtttaagggcgtggtccggtgctgcactgcctgtgactgggggtgcgctatcaggagctgcactgcccatggcggggtgagggtggggcgggtttggggcgctgtctagtgcagcaatacccgtggctgcgtcaggtgggcactatcgggtgctaacactgcctgcggccgaggagttgggatggtttgggggggtattggttacattgcctgcagctgttgggtgtgctatcccagggttacagggggcaggttaggggtgctatcgggggctatactgccagtggggttggtgggctgcagaggcagcagcggcagcgacagctgtggcctccttcctctttctggtggcctccatggaaggatggagttcttctcttcccggactccagactctagagggtgatctcttcgtgctcatgcaatcttgagcaccgcagggctctcacacccactgtggttccctggcccgcgccctcacgcacgctctgtgttgtggagaccatctgggactaccgggcagggaatagagggcaccacgggggagggagggggacagggcactgtgggtggaggcgtgaggaatgggaaccagcacttgggtggagagggctggctgggtctgagtttctcctacgcgggctccccgaagagcgcagtgccgatgggcccagcaattcctggccagctggacttggccaggagccggtttcagtgaaggcactcacacccagcccaggccccagttcctggccagcttttgccagaaagagaggctggactttggaaggtgggtgtgagtgcctttaatgaaatggtccctgccgcccagtggccagcgtgacaaggtgaagctctaacacttccactccctgcatcctgttctaggtttctctggctttgcctgcgcaactgctcccagccaggctggaggaggaggaggagtcacctgtggtatgctggagcctgtagatggcgtggctctgcagcttgcctcatgaggttggtggcagcaacagagactgcagcttgaccagagtggtaggagggcacccgtgggggccaagtgataggagccttgtagggtgggctggtgcattgagggcaacagcggttgtactggcatcggcgctagcgttggtagcagcggcaagtctgggggctgggaaggggagtaggagcgctcacttgcccatcc

SEQ ID NO: 1883801 - DNA, 4001 bp, Homo sapiens; identical to SEQ ID NO: 588695

SEQ ID NO: 1883802 - DNA, 4001 bp, Homo sapiens
ttttctctcttcactcctattttctatggagaatttcctggttttggagtttgggtgcgttttatggagaggaggcagaaaatctttagctccagcagaatgaaaggatacatgcaaaggaacctagcacagtatctggtacccaggtctcctttaacttggctttattcattcactcctggtagggcattaataagggatttagccccctcctattgaaaacgattaattcaaggaagagttcagacagtgtggacagatacagtgtaggaaagcctatttctaaggcaggagctgggtagggagggtgagaagggcgagaagaatagggaaatatgtgtcgtctgtgttgctgctgttgcaaccaccacaacaaacaaacaagtgaaaaaaaaaaaaaaaaaaaaaaagaattgtccataccggaaagtgtgctgttttggaggaggctggggaaagtgtggatggctcgagtgggtcctgttggattgaagtctgacagtggtgattcccttcaacaaatggtcggggtgggagggtacacacacacacacacacacacacacacaccccacacgcagcgcccagcctccgatttcagcgctggcaggagataaccattcttagctcgcctttccagggttatttttggctgaggctgttcgctgatggcaaaaggtttcagccccctcccaaatccctccccgtccttgttctaaagagaaactggtgtgtgtaggctgcgcactcccagggagacagggagacgggccgggcgccggagaggaacccggactctgcccaaagtctcgccgcccgccggctgttttctggcggagggtgtgccccggagggcggcgatcgcgggtgaaggctggggccaggcgcgggtggaggcgtcaccggggtcgggctagcaggccctggaatcaggcttttgggacaccccgaaagtgagtccaacttggggagaaactgagggcagctcgggcggtctggcagcggagaaggtgggtgggagaaaactttacaggaaggcagaagcaatctctgccgagagagtcagccgagcggccgcgcggagaggaggggcgggcggtccccaggcgggcgggtgcagggcgcagggcgccgacctgctggagagggggcccgggcgcgaggcggagtcccggcgcgcagccaggctggtggaggcccccggcaggctgcagattccctccggctccgggagccgcagcaggaccggccaggaggcgccatggaggggagccccatcccggtgctgacagtgcccaccgcgccctacgaggaccagcggccggccggcggcgggggtctgcggcgacccaccggcctcttcgagggccagcgcaactacctgcccaactttatccagagcgtgctgtcgtccatcgacctgcgcgaccgtcagggctgcaccatggtggtgggcagcgacggcaggtactttagcaggacggccatcgagatcgtggtgcagatggccgcggccaacggggtgagtgtccggatgcccctcgcttcccgccgcgccgccgccatgccctctcctagcccttgtccccctgctgcctccgggcccagttgggaggcccctgcccggccccggctttgctacctcactcccgcgtcctcaccctccagcgccccactcccgccgcgctcgcagcctccccggtgcaccccggacactgggttctattagtacccaccgcccccaaaagccttgaggggtttccgtcgttcctggagccactccgggcgccctggactcttctccgactctgcgcacatcccgcacctgctcatttttctttcggacattctcttacccggccctgtagattccaaggcagctcccagttttccatattgttcccaacgcattcactgcccacagtccccacacaaacttctttcgcaggctcacaacatagtccctctgccccgtgccctttttgcaataatctgccagtcccctaagtcttagctctgcctatttaacagtagtggtgtctcagaacacacacacacacacacacacacacacacacacacacacacacacacacacgatccctgacatatttggcaagagtaggccctgaaggtttttattattttggttctttaacccagtggaattactgaatgatttatttaattagggtagggatggagtggatccatttgtttgatgctaaacagcctgagctcgcagttcccagggggcatatctctaaatggtctgaaatgagatttgcagtggttttcttaatgcaattcccaacttctctccaaatgccttttggcatttgacaacatttcatgcctcttcccctttcggttttcatccttgttttctctcccttctcccacgacctcggtagtcttctgcaatccagattctcagacttcaggtttttctccctctgcccctttcctctctgtcctataactagaagcaccttttggcatagacccatatcccagtttcctctttcccaggtccagcagcatctcaaggacatctacaagagggatacctaatttcaggggtctctgaattatatgtgggaaacatcgtctaaaaaagtaattttatccttattcatgcaaccagacccacactcatagaacttttctttaaggaaagtgtcttgcagatgtataaatgagtgttaacatctttaaaagcgaaactgaacaattccctggcatttgaattccctccttccttcccaaccctctccttttcattttctcatttattattaaaaacatttttaaaggatctccatgcttcatatttatctactataattcctccttctcggtgttgcagggatggggaaagaggatttttttaaaaacataataaaacgcaattgggagaaacagggccagtggtgttggggtgggtagtggaattgtgatttttgactccagtagacaatgatgctggatatatggggtttgatttatctctggctcctcacttgggattgatgaagtttggctagaatcagggagttgaagagaggttgacaaatggtctttcactcttctctgacaggctgttcctgtggagtgatggagaataacgagccttgggagagctatgggagctctcatacttcttcccgagccaattttttagggagtgagagaaacatggcctgtccaatacttgttgtgggtcaggatatttttgaagctacggttgttgatttgcatgggaaaattattatgtcttattatttcttgtcccactttaccataaggactcctcagcttcttacttcaatgggtcttctatgacaaacacactttattaactctaagagtggaatttattttaacagataattagcataggtcaatatatgcttaaaatagggtcaaattaaacctactagctgttataaaggacagatgacaaattaaaatccacatagaagcatcgactcttaaataatctgaaagtactacttctaagaggggtgggcatgggtgaagggaatggtggacatgtttcagaatttcaaacagccaactttaaccaatcttttcctcattttgttcaccttcttgggggcttatgctaaagtgaagtgaatagccataaggctggcttcaggagaaaggtggtctaaaagaactggataattataagcaaaattggtcttgaatgattgaaaattgatgagaatgtgcttgtctcctgatttggcatcctgaattagactcaggaatactgaacttggatcccaaaggctttggtcttttttgatatcctattggatactcataagcaggctagaaaaatagaaaactagaatttattctctttgaactgacaaatctaaccagtgggctgcattctctatatctgaaaaatcttggttttgattgaaaaagttaattttacaaagcaattttctttttttaaattaaatttcattttttttgagact

SEQ ID NO: 1883803 - DNA, 4001 bp, Homo sapiens
accgtagcttcaaaaaatatgaaagaccatttgtcaacctctcttcaactccctgattctagccaaacttcatcaatcccaagtgaggagccagagagaaatcaaaccccatatatccagcatcattgtctactggagtcaaaaatcacaattccactacccaccccaacaccactggccctgtttctcccaattgctttttattgtgtttttaaaaaaatcctctttccccatccctgcaacaccgagaaggaggaattatagtagataaatatgaagcatggaaatcctttaaaattgtttttaataataaatgagaaaatgaaaaggagagggttgggaaggaaggagggaattcaaatgccagggaattgttcagtttcgcttttaaagatgttaacactcatttatacatctgcaagacactccccttaaagaaaagttctatgagtgtgggtctggttgcatgaataaggataaaattacttttttagacgatgtttcccacatataattcagagacccctgaaattaggtatccctcttgtagatgtccttgagatgctgctggacctgggaaagaggaaactgggatatgggtctatgccaaaaggtgcttctagttataggacagagaggaaaggggcagagggagaaaaacccgaagtctgagaatctggattgcagaagactaccgagttcgtgggagaagggagagaaaacaaggatgaaaaccgaaaggggaagaggcatgaaatgttgtcaaatgtcaaaaaggcatttggagagaagttgggaattgcattaagaaaaccactgcaaatctcatttcagaccatttagagatatgccccctgggaactgcgagctcaggctgtttagcatcaaacaaatggatccactccatccctaccctaattaaataaatcattcagtaattccactgggttaaagaaccaaaatattaaaaaccttcagggcctgctcttgccaaatatgtcagggatcgtgtgtgtgtgtgtgtgtgtgtgtgtgtgttctgacacaccactactgttaaataggcagagctaagacttaggggactggcagattattgcaaaaagggcacggggcagaaggactatgttgtgagcctgcgaaagaagtttgtgtggggactgtgggcagtgaacgcgttgggaacaatatggaaaactgggagctgccttggaatctacagggccgggtaagagaatgtccgaaagaaaaatgagcaggtgcgggatgtgcgcagagtcagagaagagtccagggcgcccggagtggctccaggaacgacggaaacccctcaaggcttttgggggcggtgggtactaatagaacccagtgtccggggtgcgccggggaggctgcgagcgcggcgggagtggggcgctggagggtgaggacgtgggagtgaggtagcaaagctggggccgggcaggggcctcccaactgggcccggaggcagcagggggacaagggctaggagagggcatggcgacggcgcggcgggaagcgaagggcatccggacactcaccccgttggccgcggccatctgcaccacgatctcgatggccgtcctgctaaagtacctgccgtcgctgcccaccaccatggtgcagccctgacggtcgcgcaggtcgatggacgacagcacgctctggataaagttgggcaggtagttgcgctggccctcgaagaggccggtgggtcgccgcagacccccgccgccggacggccgctggtcctcgtagggcgcggtgggcactgtcagcaccgggatggggctcccctctatggcgcctcctggccggtcctgctgcggctcccggagccggagggaatctgcagcctgccgggggcccccaccagcctggctgcgcgccgggactccgcctcgcgcccggggccccctctccagcaggtcggcgccctgcgccctgcgcccgcccgcctggggaccgcccgcccctcctctccgcgcggccgctcgctgactccctcggcagagattgcttctgccttcctgtaaagttttctcccgcccaccttctccgctgccagaccgcccgaggtgccctcagtttctccccaagttggactcactttcgggatgtcccaaaagcctgattccagggcctgctagcccgaccccggtgacgcctccacccgcgcctggccccagccttcacccgcgctcgccgccctccgggacacaccctccgccagaaaacagccggcgggcggcgagactttgggcagagtccgggttcctctccggcgcccggcccgtctccctatctccttgggagtgcgcaccagtttctctttagaacaaggacggggagggatttgggagggggctgaaaccttttgccatcagcgaacagcctcagccaaaaataaccctggaaaggcgagctaagaatggttatctcctgccagcgctgaaatcggaggctgggcgctgcgtgctgtgtgtgtgtgtgtgtgtgtgtgtgtgtgtgtgtgtgtgtgtgtgtgtgtgtgtacgtaccctcccaccccgaccatttgttgaagggaatcaccactgtcagacttcaatccaacaggacccactcaagccatccacactttccccagcctcctccaaaacagcacactttccggtatggacaatttttttttttttttcacttgcttgtttgttgtggtggttgcaacagcagcaacacagatgacacatatctccctattcttctcgcccttctcaccctccctacccagctcctgccttagaaacaggcttgtcctacactgtatctgtccacactgtctgaactcttccctgaattaatcgtcttcaataggagggggctaaatcccttattaatgccctaccaggagtgaatgaataaagccaagttaaaggagaactgggtaccagatactgtgctaggttcctttgcatgtatcctttcattctgctggagctaaagattttctgcctcctctccataaaacgcacccaaactccaaaaccaggaaattctccatagaaaataggagtgaagagagaaaagactaacaggataaaacccaaagcaggaagaaagttctatctcccatttctctcaatgaatttttggacccaccaaggctactgtcctgaaatatcctgctgcttctccttccccaaatattgtccacttcctgagagtaaggctgacttgcagcaggcttataaagtgtttggtcacagtaagacaactgtgagtaataacacacattgtatactgttttgcaattgataaaaggctttgcatctgttttttctttggaggctgaagaaaagaagaatggtattcacgcagttcccattttacagatgaaaacaagaggactttttctgtgaagtcaagaaagtggttacaatggtactttcagcctgtccgaattatgtattgcccctcccctttttattaataacattgaagtgtgatgggaaaaccactgaagccgtcagttgaaacctgctgggactttttagccattctcttcaacataaagaatgggtgtttttggagggggtgagaggaatggggaaatgttgtcaaagagtacagtgttttagttgagacaggaagaatatattttgttgagatctacagcacagcatggtgactgtagttaacaatgaagtattgtgtatttcaaaattgctaagacaataaatttcaaatgttctcaccacaaaaaagataggttttgaggtgatgaatctattaattctctggatttaattattccacaatgtatacatatatcataacatcacattatacctccgtaaatacatacaattttaatttgtcaattaacatttttttaaaagaatagtgtggccagttggggaggtagtttttttttttttttcctctagtctctactcagtctccaagatcccattccccataaagttcctgtcacccag

SEQ ID NO: 1883804 - DNA, 4001 bp, Homo sapiens
ggtccaaaaattccttgagagaaatgggagatagaactttcttcctgctttgagttttatcctgttagtcttttctctcttcactcctattttctatggagaatttcctggttttggagtttgggtgcgttttatggagaggaggcagaaaatctttagctccagcagaatgaaagggtacatgcaaacgaacctagcacagtatctggtacccagttctcctttaacttggctttattcattcactcctggtagggcattaataagggattcagccccctcctactgaaaacgattaattcagggaagagttcagacagtgtggacagatacagtgtaggccaagcctgtttctaaggcaggagctgggtagggagggtgagaagggcgagaagaatagggaaatacgtgtcgtctgtgttgctgctgttgctaccaccacaacaaacaaataagtgaaaaaaaaaaaaaagaattgtccataccggaaagtgtgctgttttggaggaggctggggcaagtgtggatggctcgagtgggtcctgttggattgaagtctgacagtggtgattcccttcaacaaatggtcggggtgggagggtacacacacacacacacacacacacacacacgcacacacacacacacacacacacacgcagcgcccggcctccgatttcagcgctggcaggagataaccattcttagctcgcctttccagggttgtttttggctgaggctgttcgctgatggcaaaaggtttcagccccctcgcaaatccctccccgtccttgttctaaagagaaactggtgcgtgtaggctgcgcactcccagggagacgggacgggcctggcgccggagaggagcccgcactctgcacgaagtctcgccgcccgccggctgttttctggcggagggtgcgccccggagggcggcgagcgcgggtggaggcgtcgccggggtcgggccagcaggctctgggatcgggcttgtgggacaccccgacagtgagtcccacttggggagaaactgagggcagctcgggcggtctggcagcggagaaggtgggcgggagaaaacctggcagcgaggcagaagcaatccctgccgggggagtcagcgagcggcggcgcggagaggaggggcgggcggtccccgggcgggcgggtgcagggcgcggggcgccgacctgctggagagggggccgggcgcgaggcggagtcccggcgcgcagccaggctggcggaggcccccggccggctgcggattccctccggccccggagccgcagcaggaccggccgggaggcgccgcggaggggagccccatcccggtgcggacagtgcccaccgcgccccgcgagcaccggcgacccaccggcctcttccagggccagcgcagctacccgcccaacttcatccggagcgcgctgtcgtccgtcggcctgcgcgaccgtcagggccgcaccacgggggcgggcagcgacggcaggttcttcggcaggacggccgtcgaggtcgtggggccgatggccgcggccaacggggcgagtgtccggatgcccctcgcttcccgccgcgccgccgccgcgccctctcctggcccttgtccgcctgctgcctccgggcccagctgggaggcccctgcccggctttgctcccgcactcccgcgtcctcaccctccagcgccccactcccgccgcgctcgcagcctccccggcgcaccccggacactgggttctattagtacccaccgcccccaaaagccctcaggggtttccgtccttcctggagccactccgggcgccctggactcttctccgactctgccacatcccgcacctgctcatttttctttcggacattctcttacccggccctgtagattccaaggcggctcccagttttccatattgttcccaacgcgttcactgcccacagtccccacacaaacttctttcgcaggctcacaacatagtccctctgccccgtgcccttttgcaataatctgccagtcccctaagtcttagctctgcctatttaacagtagtggtgtctcagaacacacacacacacacacacacacacacacacacacacacacacacacacgatccctgacatatttggcaagagtaggccctgaaggtttttaatattttggttctttaacccagtggaattactgaatgatttatttaattagggtagggatggagtggatccatttgtttgatgctaaacagcctgagctcgcagttcccagggggcatatctctaaatggtctgaaatgagatttgcagtggttttcttaatgcaattcccaacttctctccaaatgccttttgacatttggcaacatttcatgcctcttcccctttcggttttcatccttgttttctctcccttctcccacgacctcggtagtcttctgcaatccagattctcagacttcgggtttttctccctctgcccctttcctctctgtcctataactagaagcaccttttggcatagacccatatcccagtttcctctttcccaggtccagcagcatctcaaggacatctacaagagggatacctaatttcaggggtctctgaattgtatgtgggaaacatcgtctaaaaaagtaattttatccttattcatgcaaccagacccacactcatagaacttttctttaaggggagtgtcttgcagatgtataaatgagtgttaacatctttaaaagcgaaactgaacaattccctggcatttgaattccctccttccttcccaaccctctccttttcattttctcatttattattaaaaacatttttaaaggatctccatgcttcatatttatctactataattcctccttctcggtgttgcagggatggggaaagaggattttttaaaaacacaataaaaagcaattgggagaaacagggccagtggtgttggggtgggtagtggaattgtgatttttgactccagtagacaatgatgctggatatatggggtttgatttctctctggctcctcagttgggattgatgaagtttggctagaatcagggagttgaagagaggttgacaaatggtctttcactcttctctgacaggctgttcctgtggagtgatggagaataatgagccttgggaaagctatgggagctctcatactccttcccgagccaattttttagggagtgagagaaacatggcctgtccaatacttgttgtgggtcaggatatttttgaagctacggttgttgatttgcatgggaaaattattatgtcttattatttcttgtcccactttaccataagggctcctcagcttcttacttcaatgggtcttccatgacaaacacactttattaactctaagagtggaatttattttaacagataattagcataggtcaatatatgcttaaaatagagtcaaattaaacctactagctgttataaaggacagatgacaaattaaaatccacatagaagcatcgactcttaaataatctgaaagtactacttctaagaggggtgggcatgggtgaagggaatggtggacatgtttcagaatttcaaacagccaactttaaccaatcttttcctcattttgttcaccttcttgggggcttatgctaaagtgaagtgaatagccataaggctggcttcaggagaaaggtggtctaaaagaactggataattataagcaaaattggtctcgaatgattgaaaattgatgagaatgtgcttgtctcctgatttggcatcctgagttagactcaggaatactgaacttggatcccaaaggctttggtcttttttgatatcctattggataatcataagcaggctagaaaaataggaaactagaatttattctctttgaactgacaaatctgaccagtgggctgcattctctatatctgaaaaatcttggttttgattgaaaaagttaattttacaaagcaattttctttttttaaattaaatttca

SEQ ID NO: 1883805 - DNA, 4001 bp, Homo sapiens; identical to SEQ ID NO: 588701

SEQ ID NO: 1883806 - DNA, 4001 bp, Homo sapiens; identical to SEQ ID NO: 588703

SEQ ID NO: 1883807 - DNA, 4001 bp, Homo sapiens; identical to SEQ ID NO: 588714

SEQ ID NO: 1883808 - DNA, 4001 bp, Homo sapiens
gtcagtttttattctgatcttttcaggcacttttgcctgagactactctgcccagcatggaaaagcttcacagaaacacgtagcacgtctcatttcaagtggtaccttccaaggtgccacagtctcccgcccttttcagttgtctacttcttcctcttcattctgttcttcttcttccagcctttcttcgtcttcatcattgtcctcatccctgctcttgtcttgctcttccgagtctgtttttttgtctttgtccttcttcttttgctctgaggcctccttcttgcctttctgctcccgcctatatgctgtaaggacggaacaaggggttaggagacagagctgaaagtgagccagacggactgcaggagctaattacattgtacaattggaaaaacggaggcagatgggcgcggtggctcacgcctgtaatcccagcactttgggaggctgagacgggcggatcacctgaggtcaggagttcaagaccagcctggccaatatggtgaaaccccgtctctacaaaaataaaaaatgagccgcacgtggtggcgtgcgcctgtagtcccagctactcgggaggctgaggcaggagaattgcttgaacccaggaggaggagactgcggtgagctgagatcccatcactgcactccagcttgggtgacagagcaagactccgtctcaaaaaaaaaaaaaaaaaaacaaaaacaagaaaagcaagacaaaaacaaaaacggaggcagagaaggaaaaataacttgctcagcattacaaaacagatctgaggtggtgcccaccgaactgggtcgagtcacatcaagtgctggcttactggacttaaagggacccgcgctgagaaggctcagggcctggtgaacaggtcacacaggatgaccatcttctatgtggtttagaagacaagaggctcgttaccttccagagcttctttcaatggggtaacgaaccgctggaactccatctcttccatggctgagagcacatcactggcattcagcgtcttccgctttcctttcattgcaaagttgttagcactgagagaagagaaaggctgtcagactccctcttgtttgtaaggcgtgagtgggaaaaggagcacccagaggtggaacgggaaagcctgcctcttacatgtatggattttggtgtgacagggataagtccttcccttctctgcacaaaaaagctaaagcaaagtgattttgttgtgttattttgcttcagaacttgtaaaaactggcagaggactgtgaacatgtccccaccgagggagaacacaatcgttggggtttgtaggctcccagccagcaactcccagccaggtatccccgcgcctcccttatgcctctgtcccgctcaccaggatgtggcgtacagcacgaagacgctggcggcgcgggagatggcgctccgggcctccttggagatgttgacaccgtccgggagctgcgaggagaccgggggtgagcaaagctgccgttccagcacctgcttccctcctgcccgttcgtccgccccccccgagctgctcaccgcctccttgatgatcctggtgatcacggcattgggcaggtttaggtcctcgggcctctccgccattgccgccgctggggcttaaactccccttcgcctccgcttcagggagctactgcgtccggacttcccgcgtcgctacggtctgaccctgcgaggtttccgttccgccccacgtggcctacagtgtcccacagtgctctgagcgccatagcctccctcctccccccacagccccgcctccgcctcaaataccggcgcatccggattttgaagccgcagtggttttggcccgccaaggcttccatccaaccctaccgcaccccgcacgcccctccccaggtccatttctctgcttctcgccatcgccgcgtcgggaaccttctcaccaacttatttggctcaatggagcttccgtccgtttcccatggtgccctgcgccgctgctgggtgacggcgcggccgggcgcagcgcgtgggagacgaaggcgtggctgactcggcggggcggatccctttaggacccgaggcaggctctgggcccgccgggtccgttaatctcaccgcgccgcaaggggccacgttttaccacttgatttagcaaccctaagcggtttggaatctgctttgctctcacaggacctcagcccgtcgtgatcagattctcccactttcttttttctttcctggaatggagtgggcagtctttttccatctctaccgaagttgatgttcatttttaatcttttcgcccctcacgcttttgtaataatggtactaagactgagtgttatttagattttattgttgttgtttgtgtttaacgcgaactatttaggcagcccagggataatgctggccatatagagatgcgcctgattaggtctcaggagtcaattcggactgggcaggtaacgaaagggcgagaagcagccttttcactgtatgaagaatgcaacgtcacattcgctttcaaaaacaaaccgtgttaaaattgtatttatttttcagttaaattgttcatcatacattttttccagttaaaaccattctcaaggttttgcaatggcgtttctttttttttttttttgagacagtctcactctgtcgcccaggttggagtgcagtggcgccgatttcggctcactgcaagctccgcctcccgggttcacgccattctcctacctcagcctccttagtagctgggactacagacgcccgccaccacgcccggctaatttttttgtatttttagtagagacagggtttcaccgtgttagccaagatggtctcgatctcctgacctcgtgatccgcccgcctcggtctcccaaagtgcagggattacaggcgccagtcaccgcgcccggcgcaatggtgttttaagttgtttttaagttatttttatattaagttcgtagaaattctcactcccactgattttatttattttttaatttttaaaatttcttgacagggtctcactccgtcccccaggctggagtgcagcggcacggtctcggctcactgtagcctcgacctccctggctcaggtggtcctcccacctcagccccaaatagctggggctacaggtgcgttccatcacacccagctaattttttgtatttttcgtagagacagggtttcaccatgttgcccaggctggtctcgaactccagggctcaagtgattctccctcggccttgcaaagtgctgagattacaggcatgagccacggcgcccagcctcccactgagaattaatgctgcttttttttcccgtcaagcatgcagtcccaagtcgccctgtagttttcctgctttcgatagaagcctgattatagagaaatattttaaaacaaaagagcaaatgctatgataaatggcaactgaaagtgtttcaattagagaccataaggtctggtgggggaactccgcttggatagaacagacctggctgaaaccatcagggctgctcagcgctagtcagttgctcttcaactggaattgggctcagtgttgtcaagtattttggtccctaaaaggacattgtgggctatttcaattttaaaattgattcaaatttaaaattgattcaaagtgctagccaaacaaaacaagtaataggccaggtgcaatcccaggctgatagtttatctttgatctaaattatgaaactgtttagaacagggagtttgtttattactgttcatgtccaaagcaggtcccctcacatatttagtaatcaataaatgtgttgaataaaagaaagaaatggacactgtccttaaaaagttcttaggaataaggtggtagttagtgattgcctaaaacacctctagaaaggaaaagatgataatatttattgaacacctcccatgaataaaagtacattatctcatttaatgcttctgcagtcctacttagggattccctgccttctgcttatg

SEQ ID NO: 1883809 - DNA, 4001 bp, Homo sapiens
atgaatgcacagtttactgttcctcttccacctttcccatgtaaaacggggattcagggaaggctcatcaacgcctcaaaagaatgcaaccgctggcctcttttatccaccctcccgtttttttctttccatttttccctactgtctgctctttcctctttgaatacggaagttctcaaaccctctttggaaatcgtgcaggccgcaggtcctactgtgctccttcggacccgcctagcccgcggagcccatccttctcctgaagttgcggatctggtttgccgacactttcccctgggcacgtcctcaacccaggcaaaataaacctctcgatagattgagactcctcagtcattttctttggtgtacaaagcacgggctcgtcttcctgtgtccatcccggggtttcggggcagcagagctccgtctccacaagtgttcaggatctattcagatggttcagcctcagggccaggctgggtcctctgcaccccaagctgtgtcctctgtctatggcaatgacccagatagggccggttctcagatggctctgaagaaatgtttaggggtgtctggggactgtgcaatacctttctccacactcagattacagagttctcccttgaccgtggaccacttcctggacacggctgcacacagctgtcacctccctaagctgagccttaaagaccaaggtcccactttcccagtctgctcttgatcctttagaattttcacaaagttgggctgggcacagtggctcacacctgtaatcccagcactttgggaggccgaggagggaggatcacctgaggtcaggaaaccagcctggccaacatggggaaaccccgcctctactaaaaatacaaaaattagcctgcatggtggccagcacctgtaatcccagctactcaggaggctgatgtaggagaatcgcttgaatcctggaggcagaggttgcagtgagccaagatcgcaccactgcactccagcctggggacagagcaagactctatctcaaaaaaaaaaaaaaaaattcacaaagcagccccctcctttttcaattaaaaatattctgtgctggccgggtgcgatgggtcacgcctgcaatcccaagactttgggaggctgaggcgagctgatcatgaggtcaggagttcaagaccagcttggccaacatggtgaaaccccgcctctactaaaaatacaaaaattaccctggcgtggtggccagcacctgtaatcccagctactcaggaggctgatgtaggagaatcacttgaatcctggaggcagaggttgcagtgagccaagatcacaccactgcaccccagcctggggacagagccagactccgtctcaaaaaaaaaaaaattctgtgctggtttccttttcttcctccacgccagagcccggaggctgtggtctacagctgccggccatgcccctgcctccatggagacctgggattgtgtcagatgtcctgctccagcctttaagagcaggagtggctttgtcaccaagggtatgcacggcttttccatcccctttcatcctgggtgacacaggctgcagataataatcacagcctgggattcgagggagcctgactagtcgccgcctctctcccccgactcggatgatctgcttctgagcctgtcttctgttgtgaaacttactcccgaatgccttcacctgatgccgagcaaaacgtcacagtctctaccatgttgctatgcggtagctgtaagtagacagcacagagcacaacaataggtcacttctgcccaactgttaaccaggcagctggtcacccagctcagttacctgcataaaagcctcggcgatccccgtggccacattggaagttctcctgtggcttccacactaagaactacatctagggtttacatcttttttactggccaacctccttttgcctttcaggagtgtgactgagcaacctctttggttgtaaccagagacgctggtttcagaacgcaggtggaaaggtcggaaaggtcagcagctgctgccacggaaacaagaaggggtctccgggcaacgggcttggtctggaagtgctttcacctctgtcccccagctctcccctctgggcaatgggcttggaatgggagtgctttacctccacacccacagctgtctccatgcatgcaccccctccgcaggggcctggcggggcagctcacctgtgctttgctcccatcctgggcactgaggtgagtcagatgtgggggcaaccacacagtagcaccccgctcatcggttccacttggggcagtgaaacaaaacactgctgataaaaaacttaaaaaggaaaagagaaaaattaaaagcccagattcccagggaaacgctgcatctgaacttctgattcaagggaggaaaaaaacccaaagcagctgccctcgtcaggctgtgcccacccccaatttgtgctcaccctcggttcctggccatctctgcaagggagacccttggaaatggggactccctcctcactggagccaccatcacagatgggaccttctgaaggccataggtggcaaagggagcccatcctaaggtccaactttgtgtgtggccacagatagaccccaggccatctcccttccctttctaacatgagctcggggtgtcatgatccgtcaaagcggaccttaccatctcccttcatgaccaccaggctgagagaaaagtgggcaggtgtttctccccgggaaatactgctgcactgtggcaggagtggttttgaaggctgccttaggttgaagctaggcagagtcttctggggcacagaggggcctgggacacctgcctcttcccgatgctcagccctcaatgccttctggccttggatggtcctgggctggtgaaaggtacagcttccatgcagccctacttttctgtacagtgccaaactgctacatacaaaaacaactatagatatatattgcagacagggtcttgctctgttgcccaggctacagcacagtggcacaatcacagctcactgcagcctcaatttcctgggctcaagcgatcctcccacctcagcctcccgagtagctgggtctacaaacgtagatataaatatacgtatacatattttttttccttttttttagagacagagtctcgctatgttgcccaggctggtctcaaacttctgggcccaagcagtctgcctgcctcagccttccaaagtgctgagattacatgtgtgagccactgtgcccggccagaaactacaaatctgtatcaagacttgcggaggctccttaccctcccctacctcagaataaagtgattcaggacatcatgagtaggtttttatacaaaaatatcaaacgttctgtaatgcctttccaagactcacagaacgtgcggtagagtccctcttctttctgccaaaggaaaactgaaatagaatcatttccatggatctaggggaaatttttgagactcaagaaaatcgtgacctttctcatttttactctgcaccacgttcatttaacaagagtgcagaaacctcctcgtgagaggttttaccagaatctgttcccctcgtcacattcaccattgttttaaccttgattgccaacattctatttcagagttgtatagctaagtcttatcagcttatcatttctgatacggcttcagcagcctcttccactgaacatggttgagataacatttctcagagagacttaacaagtgaactaactctttgcctaagagatggagaaagtgagctcctagcagagtttctgaagtaaaagattccagttgctgcttccccaggaaggagggtcctggggaacttggggtgacacagggcagctgtctgggcccccttcagggcaggagcactccatggtccccggctgcccagcccaaatgacagtcccgggctgaggttccccaggggcagcccacgtccaatggccgtgcagggggtttagaggtgtaaatgt

SEQ ID NO: 1883810 - DNA, 4001 bp, Homo sapiens
atgaattgtagcatcagacagcattcaatttcctctgcaaagacttcttcctatggaaatagactctcagtgatgaccaaagacagaaacttgagtagctcattaatttcactttccctaatatcaataaatcttaaacccacctgttttgcagacactaagattttttttaacttcttcattagctctagggaaatatgcatcattcacacatcctcccacagtttccagcaagcttaagagtggctgattttatatcacccatcacctcttttatcactaccaaagcatcggcaatattgtactgttgccatgcttctttcagagtaaggtgagggttttttcaatacagtcagcaaagtggtcaaacatatgcttgattatgttcaaatgcttcagttataccctgacccaagggctgaagaaagctagggccttcctgagggagaaacacagtatcaacattagaatgaacaaagaataatgaatctgggtgattgggacctctgtccacagttagcaacattctgatttccagattttttttgttaaatgacttcggatttgatggataaaaaaattgtaaaactaatccaaaaagtggcagtggtgattctgggtgtgattacaagaaaacaggaaggcgtttatctctaaaagacaagtggggtgttagagtctttgtaaagcagcagtggttttatcattttgtcacctgaggcactgccacaaaaaaatgagggaaatcctgtccttagcttcctctaagctttccagatttttgtcttttgccccaaaagtaggaaggcatgcactgcaaaagatgggtcatctccttggcgttgaagacctgttgaggcacaaagcctctctccagttgcttggaatactcgatacccactcaggatttaagggtccttcctccccatcaacttcgtatgttgcaaaacagcagcgatttttaaagttctcaaaccatcccttgctcgcatgatacttatttgggttgtcctccccagatgtttcccattggttccctgtagatgtatttggcctggttgcagagggccttccgggtcagatgccgccctctgtcatctggccttccacctaaaaggttaactgggtctccaccttcacgatgtttacattacaggggaatacacagcagcttagagcagatgggcgaccaactctccacgctggtctttcttggtttcctgagggtagtggaggacaagaggggaaagcagggtcttgctctgtcgcccaggctggagtgcagtggcacaatcaccgctcactgaagcctcgacctcctagacttaggggaccctcccgcttcagcctcccgagtagctgggactacaggtgcgtgccaccacaccgcactaatttttttcctttttttttttttttctttttggtagagacgggtttctcactatgttgcccaggctggtctcgaactcccgggctcaagcgatcctcccgccgcggcctcccaaagcgctgggattacaggtacggccactgcgaccagctgcttctccttggtggactgatcaacaccaacaaggcggcgcacgtccctattactcacgccttcgtcaggctcctggagaatattcatccagtcttccagaggcatgacgctccgcctcctcttgacaggtggctggcccaggatcaagattcccctccaggccaccgctccacctggggaggcctcagccgcggccgtagccgcggtggcctccataacggctgcagtcgtccccgcctagagcctggttttggagcctcgaggacgccgacgaggctgtttaacttcccgtgagtccccaccctcgccgctccgctggccgggaatttggcaaggctttgccctacgcggtaaacacgtaagcctactggcctccgcatttccctgagcagcgacctagatgacgccagactgagggagccgcaaccactggctacagttgacacggccctaacggaggcttctcgcgaggcttggcagccccatagccatctcagggacaaggaggctgtgatcagatctcgcgaggttcaggaaagcgccccgggaactgggccgctgggccagcccctgcgtcggggggcaagatggcagcccaggctttggcgctgctgagagaggtagcgaggctggaagcgccgctggaggagctacgcgcgcttcactccgtgctgcaggcagtgccgctcaacgagcttcgccagcaagcggcggagctgcgcctcggcccgctcttctccctgcttaacgagaaccataggtgagaggaccccgggggcttgagccgaggagaggggcacccctaaatatggacatgagagtggttgagggcaagaacagcgcttttcccagtcacaggggaggtggaaagtagccgaaatttgcagagaaggaaggatcctgggttcagaggcaggagatggggttcaggttcagcctctgagagtgccccagggtgttttctcccgtcgcctggcctcgctgcctctgagcagtgaggcactgccttcttcatcaaatagaaattaaaggaggaaagcaaagctgtccacttacaaggagcattccacatctctttgtacaggttcttgatttgtttccccttctaaaaggatcctatcctggcaatgtggcaagaaccatcagcattttaaattcacatgctttttcatccagtcattcttgttaaaaaaatttaatgcaagtatacgcgcacaaaatgtgcagttactttgttctttcgaacccgaggctggaatcgccccaaaagcagcggcaagagagttcccacgagggagtgcttcaaaccttcccgagatgtggctggttgggatgacagaaaaagaagcactgaatgccaaggcgatcagtccaaaagcgtttagggggaaacctgcagagggctgcagaaattgtcaagacggacaccgggagaaaggtgttcctgggtatgtccgcagtgagggggtcagggtatggagttcagatgagagtttaaaggaatttggctcagggttgaggccagtttcttccagtgttttgggcaacaacctaggtacctttatcaggcctgtgaatgttcaaggcccctggtttatggtcaagcctgctagggaaacctgccgctggctaggtcagagagcaatcaaggcactctgattttccatcaggacagagaaagaaagggggcgactggaggaccctacaacattatatgcaagaatataacatatcgtgtgtggcaccagaacactagaaacaatctaaatatccgttaacagaggattccaaattatgcgctattactctgtaacactgtgcagttatttaagttattgaggtagatgtatatatatgtatgtggacatggaaagatctctgtgttttgttttgttttgttttgtttgtttgtttgttttcagacgagtctcgctctgtctcccaggttggagtgcagtggcgcgatctcggctcactgcaacctccgcctccctgattcacgccattctcctgcctcagcctgccgagtacctgggactacaggcgcccgccaccacgcccggctaattttttgtatttttagtagagacggggtttcaccatgttagccaggatggtctcgatctacggacctcgtgatccgcccgcctcggcctcccaaagtgctgggattacaggcgtgagccactgcgcccggccaatctctgtgttgttgaatgaaaaagaaaatcgcagggtatatcaatctataattttaacctgtaatttttaaaaaggattacaatcttcccaacccccacaggcatgtaaaacttgtataacattgcaaatatctgcaaaggtacaccagaaactattaatagggaagtgggtctgaaaatagtaggacaacttttatttttgattttttacacatccgtagtgtttgattaaaaacactttgtaggcccggtgc

SEQ ID NO: 1883811 - DNA, 4001 bp, Homo sapiens
cctcttgataaaaaaaaattcagacttttgtaatttgtgtatgctgatcttcatcaaaaggttcattctctggatcagagtcagtggtgtcagaatatctataatgatcaggttcattgtcactaacatctggtgttacagaagttgaactgctagcctctggatttgacggctcctctactgtttttgtgaagtacagcttcaccttaaaatttggagaaaagtatcggttggctttgtctttatttgctttgtcaagatcattttttgttaaagtaagtactagatactccttgtcattatctgcacgctctatactgcaaatgctatcaatttcttgatcacatagacttccattttctactttttctgaggtttcctctggtcctggtatgaagaatgtatttacccaaaagtgaaacattttgtccttttttagcatcttgttctgtttgtggaagaactctactttgatatcaccacacacaggtaacggctgagggaactcaaaatacatgaacttgtcctcccatcgtgtgggtcctgaattggaggaatacatcttcacctttagctggcagaccacaaactgaggattgcaagttccgccactgaacattggaatagtttcaaacatcatcttgtgaaacaacagtgccactggtctataatccacatgattctttaccaggtagctatagtaatacacatagcgcctctgactgggaatagttactccctttttgtctctggtccttacttccccatagaaatctagggcctcttgtgcctttaaaaatttgccccgatgtaataaatatgcataaatcattataccagttcgtccctttccagctttacagtgaattgctgcaacatgattgtcatcttcacttagccattggtcaagatcttcacaaaagggtttgataagttctagctgtggtgggttatggtcttcaaaaggatattgcgcaactctgtaattagatttggcggtgtcataatgtctttcagcacaaagattgtgtatcttgtaatggtttttatgctttgaatccaaaaaccttactacatcatcaatattgttcctgtatacgccttcaagtctttctgcaggaaatcccatagcaataatgtttagataaatataggtcaagtctaagtcgaatccatcctcttgatatctccttttgtttctgctaacgatctctttgatgatggctgtcctgtctgggagcctgtggctgaagaaaaaggaggagagagatggcagaagctgctggtggcggggctctgcaggatggaaatggctctggacttggcggtagctgatgcccctcgctcagccgctgcttggctctggaccgcagccgggtaatggctgcggcagcagctgctggatggtggcagctactgggcctgcttctcctcagcagccagaggcctggcagcggcggcagcggaatggggagaagacgaataatcctccgaacggctgcctcctccagcggcctccggagcccgggccacggggggtgcggcggcggcggacgagaggtttaaaaccggcccgggtccctccatgtgccgccgccgccgccgccgccgccgccgtgttggaggcagtagaaggggagagaccaactctccggcgttcccagccctggaaatggtgacaggcgactcagaccccctccctggagctgcagccgccggggccaccgggggcgccgccgccgccgcttctccccccgctccaggagggggaggtgccgccgccgccgcgcctcagccggctcccgcccaagcccacggcttccaccttccctttcaggagaagccgaggaagaggctgcacagttagaaaagacgaagaagaagcgagaaacgccgccgctgccggcgccgcccccgcggatgctcacgggttgctgagaggggcttcaggccgggccgggccgggccgccgccgccgccgccgtctctgtctctcatctccctcgcctgagcccggcctcgcctcacagcggctcaacattcaaacttccatcacggctgcagcttctgagaggagagcatcttctaggttcgtaatctatgttgatcttatgttaataccacactctgttgattattgcagctttatcgtatgttttaaaattggctagtgtaagtcttttaattgtgtttttctttttcaaaattgccttgactattcaagtcctaggtatcaccatataggtttaggatcagctagtcaatctctacaaaaggtactactagaattttgacaaggattgccgtgtacttattgataaatttggagataatttctatcttaacaatactgagtcctccatgatcatggaatgttttttccattctttttcatcttttaaaacttatctcagcattttatattttttctatgtataggtcttatatttctgttgtttaatatattgcaaagtgctattttctatactgcaactataaaaatatttttcttaatttcacttttggattattactagtattagaacacatatgatttttgttatacatactgtatcctgacatcttgctaaatggatttgttagttatagaagtttcttcgtagatttcacaggagttttgtttttgtttttgtttttcttacatacaggatcatgtagtcggagattaaaaagagttctactttttcctttccaacctggaagccttttattgcaatttcttatctgactgtactgtctgatatctccagtgcaaggttgaataaaagtagtgaaaacagacattgttactttgctaccaaaattataggcaaagcattcagtcttttgaagctttcatgtttaaggtgagtgttttttcatgccgttaatcaggatgagaaagttcagtctgttcataatttgttgagattttattatgattgggtacaggttattttgtcaaatttattttattgcatacactgagataatatgatatgttttttattctattaatatggtatattacgttagttgattttggatgtcaagccaatcttccactggcaggataaatcccacttggtcatagtatataatcgttttatatattgctaaatgaggtttgctaatattttatggagaccatagacatactagtttgtagttttcttgtgatttcttttattagtatcaaagtaattctgacctgttaggctgaattaggaaattgtggactgaactgggatgaatttaggaataatcttattctttattttgtgaaagtttttttttttgtaggagtggtattattatttaaatatctgatgggatttaccagtaaagtcagctagtcctgagcttttctctatgacatggagtgataaactattgctcacatgttaaagtcaagccatggcctatatttgtatgactcataaataaactaagaataaattttatacttttaaagtgttagaagacggaagaggaggaataggagaaaaagaactgacagaggttgcatatggcccaaaatatttactacctagctccttacagaaaaattttgctgacctcttctctgtatggtgttatttactaaaatacttctttacttgtaatatgtctatccagacatgtggctttttttctcagttactcttatgtctttctaggaatatgtctgcttcatccaagttgtcaaattcattgacatagtgttgttcataacatttccatatgtttctatagggttactaattgtattcttcattttcactcctgactttgcaatttctattttcttgctttttatcttgttcagtctgactaaagtgttatcaattttatagcgtttcaagtaaccaggttgtagttccattgattttctctattgtttttctattctctattgaattgatttttaatttgatctttattatttcttccttatgtttacttttggttgacttttatttttccagtgtcttcaggta

SEQ ID NO: 1883812 - DNA, 4001 bp, Homo sapiens
tgataacactttagtcagactgaacaagataaaaagcaagaaaatagaaattgcaaagtcaggagtgaaaatgaagaatacaattagtaaccctatagaaacatatggaaatgttatgaacaacactatgtcaatgaatttgacaacttggatgaagcagacatattcctagaaagacataagagtaactgagaaaaaaagccacatgtctggatagacatattacaagtaaagaagtattttagtaaataacaccatacagagaagaggtcagcaaaatttttctgtaaggagctaggtagtaaatattttgggccatatgcaacctctgtcagttctttttctcctattcctcctcttccgtcttctaacactttaaaagtataaaatttattcttagtttatttatgagtcatacaaatataggccatggcttgactttaacatgtgagcaatagtttatcactccatgtcatagagaaaagctcaggactagctgactttactggtaaatcccatcagatatttaaataataataccactcctacaaaaaaaaaaactttcacaaaataaagaataagattattcctaaattcatcccagttcagtccacaatttcctaattcagcctaacaggtcagaattactttgatactaataaaagaaatcacaagaaaactacaaactagtatgtctatggtctccataaaatattagcaaacctcatttagcaatatataaaacgattatatactatgaccaagtgggatttatcctgccagtggaagattggcttgacatccaaaatcaactaacgtaatataccatattaatagaataaaaaacatatcatattatctcagtgtatgcaataaaataaatttgacaaaataacctgtacccaatcataataaaatctcaacaaattatgaacagactgaactttctcatcctgattaacggcatgaaaaaacactcaccttaaacatgaaagcttcaaaagactgaatgctttgcctataattttggtagcaaagtaacaatgtctgttttcactacttttattcaaccttgcactggagatatcagacagtacagtcagataagaaattgcaataaaaggcttccaggttggaaaggaaaaagtagaactctttttaatctccgactacatgatcctgtatgtaagaaaaacaaaaacaaaaacaaaactcctgtgaaatctacgaagaaacttctataactaacaaatccatttagcaagatgtcaggatacagtatgtataacaaaaatcatatgtgttctaatactagtaataatccaaaagtgaaattaagaaaaatatttttatagttgcagtatagaaaatagcactttgcaatatattaaacaacagaaatataagacctatacatagaaaaaatataaaatgctgagataagttttaaaagatgaaaaagaatggaaaaaacattccatgatcatggaggactcagtattgttaagatagaaattatctccaaatttatcaataagtacacggcaatccttgtcaaaattctagtagtaccttttgtagagattgactagctgatcctaaacctatatggtgatacctaggacttgaatagtcaaggcaattttgaaaaagaaaaacacaattaaaagacttacactagccaattttaaaacatacgataaagctgcaataatcaacagagtgtggtattaacataagatcaacatagattacgaacctagaagatgctctcctctcagaagctgcagccgtgatggaagtttgaatgttgagccgctgtgaggcgaggccgggctcaggcgagggagatgagagacagagacggcggcggcggcggcggcccggcccggcccggcctgaagcccctctcagcaacccgtgagcatccgcgggggcggcgccggcagcggcggcgtttctcgcttcttcttcgtcttttctaactgtgcagcctcttcctcggcttctcctgaaagggaaggtggaagccgtgggcttgggcgggagccggctgaggcgcggcggcggcggcacctccccctcctggagcggggggagaagcggcggcggcggcgcccccggtggccccggcggctgcagctccagggagggggtctgagtcgcctgtcaccatttccagggctgggaacgccggagagttggtctctccccttctactgcctccaacacggcggcggcggcggcggcggcggcggcacatggagggacccgggccggttttaaacctctcgtccgccgccgccgcaccccccgtggcccgggctccggaggccgctggaggaggcagccgttcggaggattattcgtcttctccccattccgctgccgccgctgccaggcctctggctgctgaggagaagcaggcccagtagctgccaccatccagcagctgctgccgcagccattacccggctgcggtccagagccaagcagcggctgagcgaggggcatcagctaccgccaagtccagagccatttccatcctgcagagccccgccaccagcagcttctgccatctctctcctcctttttcttcagccacaggctcccagacaggacagccatcatcaaagagatcgttagcagaaacaaaaggagatatcaagaggatggattcgacttagacttgacctatatttatctaaacattattgctatgggatttcctgcagaaagacttgaaggcgtatacaggaacaatattgatgatgtagtaaggtttttggattcaaagcataaaaaccattacaagatacacaatctttgtgctgaaagacattatgacaccgccaaatctaattacagagttgcgcaatatccttttgaagaccataacccaccacagctagaacttatcaaacccttttgtgaagatcttgaccaatggctaagtgaagatgacaatcatgttgcagcaattcactgtaaagctggaaagggacgaactggtataatgatttatgcatatttattacatcggggcaaatttttaaaggcacaagaggccctagatttctatggggaagtaaggaccagagacaaaaagggagtaactattcccagtcagaggcgctatgtgtattactatagctacctggtaaagaatcatgtggattatagaccagtggcactgttgtttcacaagatgatgtttgaaactattccaatgttcagtggcggaacttgcaatcctcagtttgtggtctgccagctaaaggtgaagatgtattcctccaattcaggacccacacgatgggaggacaagttcatgtattttgagttccctcagccgttacctgtgtgtggtgatatcaaagtagagttcttccacaaacagaacaagatgctaaaaaaggacaaaatgtttcacttttgggtaaatacattcttcataccaggaccagaggaaacctcagaaaaagtagaaaatggaagtctatgtgatcaagaaattgatagcatttgcagtatagagcgtgcagataatgacaaggagtatctagtacttactttaacaaaaaatgatcttgacaaagcaaataaagacaaagccaaccgatacttttctccaaattttaaggtgaagctgtacttcacaaaaacagtagaggagccgtcaaatccagaggctagcagttcaacttctgtaacaccagatgttagtgacaatgaacctgatcattatagatattctgacaccactgactctgatccagagaatgaaccttttgatgaagatcagcatacacaaattacaaaagtctgaatttttttttatcaagagggataaaacaccatgaaaacaaacttgaataaactgaaaagggacctttttttttaatggcaataggacattgtgtcagattaccagttatagaaacaattctcttttcgtgaccaatcttgttttaccctatacatccacagggttttgacac

SEQ ID NO: 1883813 - DNA, 4001 bp, Homo sapiens
gctaccaagctgagaatcacatcaagaactcaaccccttttacaatagctgcaaaaaacaaacaaaaaaaaacaaacaaaacttaggaatatacctagcaaagtaatcaaaagacctctacaatgaaaattacaaaacactgctgaaaggaatcatagatggagccaagcacgttggcgcatgcctataatcccagctactcgggaaaccgaggcaggagaatcacttgaacccgggaggcagaagttgtagtgagccgagatcacaccattgcactcccacctcagcgacaagagcgaaactacctctgaaaaaaaaaaaaacaagaaagaaaagaaatcatagatgacacaaacaaatggaaacacatccccatgctcatggatgggtagaaccaatattgtgaaaattaccattctgttaaaggcaatctacgaattcaatgcaatccccatctgaataccaccatcatccctcacagaattacaaaaacaattctaaaattaatatggaaccaaaagagtgccatgtagccaaaccaaggctaagcaaaatgaacaagcctggaggcatcacactacttgatttcaaactgtacaataaggccatagttaccagaacagcatggtactggtttaaaaataggcacatagaccaatggaacagaagagagaactcagaaattaacccaaatacttacagccaactgatctttgacaaagcaaacaaaaacataaagtggggaaaggacacccttttcaacacatgaagttgggataattggcgagccacatgtaggggaataaaactggattctcatctctcaccttatacaaaaatctactcaagatggattaagaatttaaacctaattcctgaactgtaaaaattctagaagataacactggataaacccttctagacattggcataggcaaggatttcatgaccaagaacccaaatgcaaatgcaataaaaacaaagataaatagctgggacttaattaaactaaagagcttttgcatggcaaagggaacagtcagcagagtaaatagacaaatcgcagagtgggacccctgaccctgacccctaaccactgaccctgacccctaacccctgacacaaaccctaaccactatccctaaccccaaccctcaccctaacccaaccctaacccctaatccctaacccctaacatctcttaaaccctaactctaaacgttgactcctaacccctaactctgaccccaatccctatctccaacctctaaccctaaacttaacccctaacccctaaccctaacaccaaccttaaccctaggttcgttactaagtttgtattgactatgtcaatgttgattattatgatggctgtctttggactgcacggcagcgaggggattgcggatcttatattaatatttttgtattgaggcagcgcattagcattacaggtgcttgttacatgagcaatgggggtgtcatactttgggtgtcatgtctgcattaggaatgccgcatttgtcttccgaggctgcggtgtggatctcgcactgcggccgcctcgccttggctggggagaacctcggtgggcaggattcagaggggcttttggtttcccgttttccacactgaacccttctaactggtctctgaccctgattattcagggctgcaaacaggaaggattttattcaccgttgatgcggccccgagttgtcccaaagcgaggcagtgcccccaaggtctgtgctgaggagaacgctgctctgccttcgcggtgtcccctgggtgtgtgctgagcagaacgcagctccgccctcgcggtacccacggcccgcccgcccgggtctgtgctgaggcgaacactgctccgccttcgctgtatctccgaagtctgtgcagaggagaactcagctccgccctcgcgatgctctccgggtctgtgccgaggagaaggcagctccgccctagcaaaggcagagcgcccttcgcaaaggcagagaggcgcaggcgcggagggggtgcaggcgcggagggggcgcaggcgcggagggggcgccggcgcaggcgtggagaggcgcagagcagggcaggtggcaccaacagtgggtccctcaggcctcgagcgcaagcattccagcagccacccagaccatgctccgccgactgggcgcccaagctgcagtcgccctctgtgtgcaggcagcagctgcctggcaacccccgagctcgctcgcgctgtcagcatcgcagaactagggccaggtgtcccagtggctgcggccaagccaggcattctgaccggcggcggcggctgcacaggagcgagaactgagaagccgccgctcaaccccacacggggtgactgctgagggcccataccaacggccccgatctccctcaggtggaggactgggcgggaggcacagcctgggggccctcaggctgggcgcgctggcgatcccgaggccgaccaggccatgcacctccagcccgcctgggcacccaagctgcagccgccttctgtgtgcaggcagcaacctccaggcaactcccgagtccgccctcacttcccacatctcggaacgagggccagatgtccgtgtggctgcggccaagccaggcggtctgccctgcagcagctgcacgggggcgggaaccggccctcagccctatcccccgtggctgcagagggcccttggctagaggtgtcgagctctggcataggaggagccgggcgggggcagggtctggcgggctctcaggccaggagcacttgcgatccagaggccgcccaggccatgctcaccacctgggcgcccagctacaggcgccaggcaactcccaagctggctggcgcgcccagcctcgcagacccgggcctggatgtcgccgtggctgcggccaagccaggcggtctgctcggcggcggctgcaccggggcaggaaccgaccctcagccccatccccggtggctgcggacggcccctggagcggccccgacgtctcttcggaggagaagaggggtgggagtcacggccaggcaggccctcaggcgggaagggatgcgcgcctgcgattccgggacgtaccgcgccagcccaggagaacccggaagccagcagctcttgtttctctgtgtgtttctgtgaggaaccaccaaattgttttccacggcaagtgcatcattttctattcctagcagccagttcatgagggctccaatttctccacctccttagcaacattgattttctgtgtcgttgttatgaaagccttactagtggatgcaaagtggtatctcatttgggttttgtcttgcattttattaatgaataacagtgtttagcatcttttcttatccgtcttacacatttgtgtatcttcttcggagaaatgtctattcaagtcctttgcctattttttaattgggatgttagaaattctgatgttgagttgtgggatattaagcttttatcagatacgcactttgattttatcagatacatattttctcacatactatgggttgtcttttcactcccttgatagtatcctttgatgcataaaggttttttattttgattaaatctaatttacgtgtattttcttttgttatctgtgcttttctgtcatatttcaaaatacacttaaaactcaaaggtcataaaggtttaccttgtgttttcttctaagagttacatactttagtccttacatgtaagtcttttattaatttagaattaattttcgtgtatactgcaaggtaggggtctaacttctctcttgtgcactgacatccagctgttgaagagactgttctttcctcccttgactagacttggacagcttgttgaacagtcattgaccatatatgtgagcgctaatttgtaggatcttaaatctgttctattgtattggtctaaaagtctattagtcttatgccagtaccacactctcttgattactgtagatttgtagtaggctgtgaaactgaa

SEQ ID NO: 1883814 - DNA, 4001 bp, Homo sapiens
atcaaatcaaggaaattaagatcttcatcacctcaaacatttatcttttttgtgtgtgggcggcaagccacccaggcaccgaggcaagagacagaggacacgagctcttccagtataataaaatataaaacaagaatagttataccagatatagatcttagatatgattatatatgactatcattaatcattagtttgtagcaattactttttattccaatattatgataatcctcgctctataatcatagcctaggaaaaaccaggccatacagagataggagctgaggggacatagtgaggtgtgaccagaagacaagagtgcgagccttctgttatgcccacacagggccaccagagggctccttggtctagcggtgacgccagcatctgggaagacgcccgttaccaggcggatcatggtccagcagtagcaaaaggtgtcaaggaacaacacctgctacttagcagaccgggaaagggagggtgggggtctccctttccccgggggagtttagagaagactctgctcctccacctcttgtggagggcctgacatcagtcaggctcgcccgcagttatctggaggcctgtctccctgtgatgctgtgcttcagtggtcacgctcctagtccgccttcatgttccatcctgtacacctggctctgccttccagatagcagtagtcaattagtgaaaatactaatagtccctgatatgcagaaataatggcgtaagctgtctttctctttgtctcctctccctctctgcctccgctgccaggcagggaagggccccctgtccagtggacacgtgacccacgtgaccttacctatcattggaggtgactgacattctttaccctgccccttctgccttgtatccaataaataacagtgcagccagacattcggggccactaccggtctccgcgcattggtggtagtggtcccccgggcccagctgccttttctcgtctctttgtcttgtgtctttatttctacactctctcgtcgccgcacacagggagagacctaccgaccctgtggggctggaccctacagcgccctgtgtcacctcggcagcttaagcacgtgcaactggttgctctgtaagctgctcacatttggcaaggctgcgaggccacaccagcaaagccaggtggctggagatgctgacccagcagagcatcgcgctccccgccccgggccagaccctcctactaagcccagcaggccaaacacggacccgcccccctcaagtgcctaggtgtccccggggcctgaacacatcaagttacattttgatggagttagaatccggaaaatcaagagtgtggaagatcaggagcaattaatgtaaacaggaggaggatgaagctgggaggagcaggagctagcaagcaggagctagcaagcaggagcgtgagagtggcgctgggagaaggcctggatagggatagagtagagcacagaacatgggggtcaccctcaaccacccctaaacactctaagctcgagcagtccctcaactcctggtctgtaaagtggctgaaggaagtgggtggagcaaaacccatatgggcgagtgtcccagcagctgcctcagtttccctatctgtaaaacggggctggggacctgcagctctcacgggactggttacccgctcgcgggtgctcgccctgcatccgagacagcacctacaactccaaacccactcggggcgggtcgaggtgggcccttcggtcccttcgaagccaacatcccgattccccttcccgggaaggcacccccggaaacgccaaggtcgctccagcagtctcctcgggtcacccgcttccccgaagccgtcgtcctcgccttccgctctcgtcttcaccggcatactcaggtccccgctggggactgacactgcgggctcggtcgccgcaaggactggaaggaaggtggaagatgcggggcgaaagcggagcgagaagagtgggacgcggcggagcagcagagccgggactcagagctcccccctcgccccgcccctctccccgcccactctgcgagtcccgccccctctcgggcgccgggcggggccatcccggggctgtccgcggagacgcctatgcggtggaggctccgggcttcagctagggcgggggagcccagcagaaggaccgagcagcctggcaccccactttgccatcctctccctggaaatctcggggtcggcgggccggccgcttcgcgtgggcgaaatcagagacacgtggtttccaaggccccttcgggttcgggaaaattttatggttcgggtcacagtaggaagcggacaatgaggcgggagggcagagagaaccgcaacacctggtgccgggtcgggtcgtttccggggctttcagtggccggaagtcgcggcgcctgtactgactctaggaagggctggagttgttttgaatgggcgcccgtaagagaggtgggcaagtacgtgttacagacggccacgccgccctttaggcggtcaaggtggggcgaggagacgttcgcccccctgcagtcggccgggtcactacccaagagcctttggaggcggaagcatggaacggtctgcaaacgttcccgagcgggcctctgcggctctggcgggcgtttcgaacttgggcgccgggcacacgcccagtcccgagagcgctgagggttcccttagcgtcgccctcaccccggccaacccgcggggcgccagagtcctggccctttaaacgccgcgcgtgcctcggcgtcttcgtttcgcgcgcccgcccgcggcgccggcggagcgaacatggacccggctgcgcgggtggtgcgggcgctgtggcctggtgggtgcgccttggcctggaggctgggaggccgcccccagccgctgctacccacgcagagccgggctggcttcgcgggggcggcgggcggcccgagccccgtggctgcagctcgtaaggggagcccgcggctgctgggagctgcggcgctggccctggggggagccctggggctgtaccacacggcgcggtggcacctgcgcgcccaggacctccacgcagagcgctcagccgcgcaggtaaggcctggcccggccggggatggggatgctgatcagcgccgaactcgggactcctgggaacccgcagggtcaggagttgcctctgcctgcttgtgaccttgggcgagtgacttggtctgaagtctccgaaccctctgtattcttttgtgtaaaataggggcactcctgatgcctactacctggaattgttcgagttctcataaaatcgttcttctaccgtggttttttttttttttttttttttggtttgtttatttatgttttcgagacagggtctcgcattatcgcccaggctggagtgcgatcgcggctcactgcagcctctgcctcccaggttgaagggatcctcctgcctcagcctcccgagtagctgggactataggctcaccccactgcgccctgctaatttttgtattttttgtagagatagggtttcaccatgtcgcccaggctggtctcgaactcctggcctcaagtgatccgcccaccttggcctctgaaagtgctgggatcacaggcgtgagccactgcgcccagcctttaccatgttttaaggagactttttttttttgagacggagtttttttttgctctgttgcccaggctggagtgcagtggcgcgatctcggttcactgcaacctccgcctcctgggttcaagcaattctcctgcctcagcctccccagtagctgggattacaggcgcctgccacccagcccggctaatttttgtatttttactagagacgggggtctcaccatgttggccaagctggtctcgaactcctgacctcaaatgagccacccgcctcggcctcccaaagtgctgggattacaggtgtgagccacggagcccagcctctaccgtgttttaagacttttttgattaagagatgggagatcacagg

SEQ ID NO: 1883815 - DNA, 4001 bp, Homo sapiens
aggtgcaaactgggaagtactgaaacaatggccccccttaccaagacacaggaacagccatgggctggacaccaacatgaggagctgagattggatcatattgggtttcaggtatctgagagacatctacacgcaagtggactcaaacaagaaggcaaggttcaaggaaaagggacacaaacactctgaacaaaaccctgtccctgcctggtgtcctccgagggggacatgtagaatggtatgcagatccttcctccacattcagatctagtgccaccctctagaaggctcatttgcacttggagaatggtggttacgagggtgatgggtggaaagtgactacattggaattgtctatcttaaggaacagtaaccaaggctggcaggtggaactgggaacagacaccatctgtgttgtcctgagagttcaaggcaggaaccttgatgctgggtcagcgtcaaggaggcttccagcacagcttgggaagaacagtgggcacctgggctgtctaacgacagagcacacagctgcactgtaggggactctccattgctcgcagggctctcagggctgggggaattcctacactgccgccaaagctgaagaaggggatcccccaggttccttccaatgaacagaagttttttgttttttgtttttttgtttcttttttttttttttgacagggtctcactccaatgcccagcctggagtgcaggggtgcgaccacagctcactgcagcctcgacctcctgggctcaagtgattctctcatctcaacctcccgagcagccaggacaacacgcagacaacatcgtgcccgcctaatttttgcatttttttgtagaaatggggttttgccatgttgcccaggctggttttgaactcctgggatcaagcaatctgaccagcatggcctcccaaagtactgggattataggtatgagccactatggctggccagcacagaatttttgaaataaaaaacaatggctgccccaaatcccatggaagaaggcaggctctaaggaaagaggcaaacagcgaagaagttatgcaggcatgaagccccatccactcggagggtgtcatgctggtgacccatcaagacaactgtgataaaatagcaaccagaaagtttttctaatacaactctaaactgctctacaatgtgtttcccccagtttctgttctgcatgtctctttctttagggaacattctctcccttttatctgggtggagagtggtagctttttcatttctgccatgaaagaaacttacttctctgcagaatttggtcttcattcggaagcagggaaaggaacacacaatggctgatagaaccttgggagcaacaaaagagtgcagcctacttgggcacaaagcaaactgccaaggattcataactataatcataaactttgctgtgctgctataaatacggaacaaaccagcaagtgactcatccgctaagatggcactcaggcagcctgagctgcgccactctgggtttacagccaaatctaaccgctctttttctttctctctttcttcttttttaaacgagtacagaacatcgcacttaattcttcttcttaaaaggaaccctcctcactgtctgtgatattattcatccgatttctctgacagaatgcttctttttgcctcttaacacaaatctgctgtataaaacatgtcaaatattttgtaaacattttgcaaatactcacagaaactaaccaacaggtttttttttttttctttttttctctcaccaggtacagaccagtctgtacttcttacctggagcaatgggggttcccagaccctcaggagggccagcctcctctgaagacccagcacaaagtggcttcccaccggcaggaagaggtctcccacctaacagaggtggtgggggctgcttttctggctgttcatcccacttgcagagcacagtcactaacttgaccccctgacatgtctattgtcagtgcacctggtaaaaccccacaaggaagcctgcctttgaaccactgttatttgctattcttaacatttagctgcaagataaaaagagccccaagatgacacactttacaaggtctcaaggaggggtttcaagaagactcattgtgcaatgtataggaacaagcagggccagaaatcacttacatcaaacagtgcttgaaggagtgaattttaaatcttatttaattttaatgaactggaatgtaaatagtcctatggagctggtggctgctgtattggactatgaaggtctagatgctctgtgatgggactgcagaccacaggaggaaaatctgatgtagggcacgtactgttccctaagccccccttttcctttcaccaaagtgacagagccctggagtgtggcagcgtaggctgataatgtgctatttgcccagctggcctggaggctcctgaaacaacttctctgatttgctccggtgttcccctcaatgaccagccaaggatgtataaagtgtgccgctggacttgggaatgaatgcaagccctctaaagtgcctgcatgtcattggacagaatgcatccctccccacctggcactgattgcataaagagacagagggtgctgggctgtgagggcactcagaggctatccacctgccccatgccacagatgagcagctgggtgagtggtgtggagcgcccagactgcaagcaaggtgatgattccaaacctactcccacatgaattctgtgtgaaaaatgcacttttcgcttgtagatattctaggggttcaccctttaaatgaacgatggaataaacgtgttagtctagatgagtgctgctgacaacactttctgcagtgatgggaatgggctgtatctgtgctgtccaagatggaggccaacactcctgtgtggctgtcaagcaattcaaatgaggctcatgtgactgaggaactgaatgcctacatttttattattttaattaatttaaatctgaatagacaactggggctggtggctgctgtactggacagggaaggtttagatgctgtacaattctgtgatgggactgcaaaccaccacaggaagctctgacgcagcaggtgtgagtgggcttcccagagccctccaacgcttccctaaaccgttttctccttttgccaaagccgcagagcccccactgcagactcaaaacggctctagtcacgcatgcctgcactcctgctttgtatttctagatgtgcttgtggtttgaaaagctacaaagtcacacaaaggaactcacaatcatccactgtagccctgacaaaggggcagcaggctgcaagttggaacaagagatagcaatcatttagcaaaagcatcatccaagctcaggtcacaaggaaagaatgaccacagggattatttaaccagaggtgttaagaacacagataaactggaaaccatgtttgctgtgggcaaggacagaggagaggtagcagcctcacatacaaatgggaaggagatttgcaattcacctgcaaatgcctggagtccaatcagggtgcatttgatgctttcagcctaatagctacagtggtaaaaaatttacagattaactaacgtgcctgcttgctaatcctcagctgttaggggggccattatcttactatattttagaaatagtatggggcttaacagaatagatacccaatgactatggttgatttcctaacagttgatcctttactatcatgctttaacctaatttataatctatgtcttacctacttaaaaaaatgatttgcgagtttaccccaaaacgtacagatatgtaactatgaatccattaaaataagaaaaaaaagacccatataacaaaggcaaatgaggaagagaaggtcctatacaagaaatctgggctgagggaagtgaatacaattgagcctaatgtgcagttctgaactccctggtaaccaaggcaaaaagggaaacaaatgggttaaatatatcctattgaat

SEQ ID NO: 1883816 - DNA, 4001 bp, Homo sapiens
tctggatccatccttaggtcacagggggcaagggtccatcatccctgcacagcttttcagctcctgtgaaatcagaatgattggagggtaaacctcgtttgaaggcttgcacaagaattgatttcttcctgattttcactatgaccctaaccataaaaaagcaaaaccaaaaagccaagagacaatcatgcagggatgctcctcccccacccccaaattgctggaaaactaaacttcgtttagagagattcctttaaaaaatatgtgacttatttttggagtacatagggggcagaggattactgaccaatccttcggtggctttcaggagcacagcatgcagatggtggaaacaaatgggcagcttgagacagcagtcagcatgctggatcattaagtcaaatctaagggtgtctgtttacctttgctctttcaaagacagcccggagtctgcagggataagtattgtgtgtatgtgctggcctgaacacagaatgagcaatggaggtggctggtgagctctagctttactttatttaacctttctgaccaagtttctaataaattttgatgggccaactgccaatggtggcttccagctgccgactttttccacatgctggagaccctatgagtagtgaagaaggttaaaatccatctcttagctaacaatacacacagtgcaccttagtcaccttgggttgtgtggatgaagagtgcatagcccaacaactggatgcttgtctagggaagaggtgttatagtgtccttcagagaagctgaggagcactgcatttccaacaacataaaagcaagtggcatgaaagcaaaacaagttatcacactaagattttggttcagtacttcccagtcttcctcgttgccttcaaagcggatcctacaagcatccccgaaggaggctgccaaggtgaactggggcggacacaaactgtgtctcatcaaagcacgctccctatagtattatcactgctgtcaatagggcgcgaccagcattttttcctcctttgcgctgggacgcagagcaggaagcgcccgggtgtgcatctcttaggagatgagtgaatctgttggagagggtcttttctggcctggtggatggatgctggggagtgacgtcaccccgccccctcctctggtgtgtgtgtgtctgtgtgtctgtgtgtgtgtatgtgtgtgtgtgtgtgtgtgtgtgtgtgtgtgttgcctccttcacccacctctcctgcctgcccctcctttatccggctctctggccctttcagtgggtcagtggtccagattcagggattcgccagcgggcgcagcgggcccagctctccccgcgtccgggcgcacccacactcacactcacgcgcaggcaacgcgcacacacaatcccccagcgctggagcacagcaattccgtgggatccccagcacgttacgaggattttagaaatcacccacacaaggaaacaaagagagaagcctttccaatgactttcctgggctttttcgtttaattttcccccctccccaaaccacctcttctgcagccgtaactaccaggttcaagccaggtccaaagactgggctgcaccggccaccccacctcccggccctcgactctgctcgggccctttcccaggcgtcgcctcgcacccctctccccccacgagcctcagtttctggttacctcgcgtgcgcttcacttttggggggaagaagagaaggggagggaggcaccgaggggggcagccgagttgctatttgtggccaaagaatccgctttaaaagaagaggcagcaggaaggaggaaagaggagaggcggagggaggagaggagacgcggccccggaccccccagccgcgagcggcggagcatcgaggagcgggaggaggaggaagaggaggaggaggaggagggggaggagacaaacagcggcggcggcggcagcgagagaagcgggcgcagggcgagcaggaggagcgggaggaggagaaaccgccgcggaagccgcgggctcagaagggccaagaggacggcccgggaagaggaggaggaggcggaggaggaggaaaagggggtaggggtggagggagggcggggggacgcgctgccttggatgctggatttcgggtttttggactcactcgctgactctcttccacttcctcgctctggactgggctggccgcacgagggctgggcggcggcggcgaccaggggggcttcggcggcggcggccgctgctccgcgggattaaattggccgcccggaggcggcggcgcggccgtggcggggcgcgaaggcgctggaggaaagtgttggcggcggcgcgggaggcggtggcggcggctgcccggggccaacatgaccaggtgagtccctggaactgaccccgtccgccccgcggtgtcttcccctcttgctgctccggaatcgccctgcgcccggctccggctgccggcgcctcccgagccagagcgacacgctcgcgtttccgcgagcccggcgcccgggcaccggagcgcacagtttgctcctctggacctcctcgggcagaggtcctctcctgctgggttcacttctcgcctgaaacctcagacccgggagagaggcgactctagagaatgggggtgtccgggtatgtgtatttgtgcgacccccgctctctcctcctagggtgggcgtagtattgggggcaaatggtggagcggtggggcaatccacccttacccagggatcctgccaccgccttttttaaaggcagggattactgttttaaggagggctgactacggtgagggggcgatttctttttctttctttcctctgaactagtggggagaaggagaaatagcaggaatcaaagtctacgcagctgccatagaggagggggattgtttgggagaccttcccgtggcagaatcaaagctcgtagttcagctgcgggaatctggtgtacttaacacacacattcattccgtagggaagggaacgcatcttttataatgaagagtcaaagttgtaagaaacaatttaaaaagaaagccacgaacaaaccaaagattatttgctttcccatagatttattgtagcttttatgtgggtgtgtagaaaacttgcattgcttctctggacgttgattttcatttaaaagcactagcaagtgaagtcagtttttaagtcttatgcttaaaaaaatcttgaacaccaagtgtgagcttggctttcattaatttggtgttccaggattccagatagtagttccattctccaaaaccaggactatcacaatccacttttattgtttccagttcgcctcccagtacgctacttgccaaatgtctcctccgttttctaaaattctcagagtaatcccccagcctcatctacagtttgcaccttaagtatctaggaagattcctgagggctcgttctccttgtatttcctcttaaagttatatatatatatttacatgtgcaaagacacagtgccagtgacttaacagagtgtagctcacacagtttgaacctctcagaggctagtaactgcttatgacttgaaataggtttgctgttaaatttactgagctacaaatgtggactttatcctttggtgtattcttttctaaccatcctgtagcgcatctctggggacttagttcaaccatagatacttctgaccattttcagtatttttttctctgtttcaaagtgcacacaccaaccactcaacttgagtaaaacaaggatgatataccaaaacttgaaacattctgatgtaaagggatctgtagagataataacttaagattaagttgtatatgtaatataataatacccagtaaaaggcttagtatcttacttactttgaacatatattctgctttatgctacagacactatagcaaaaagagaacacattttcaatgttccgtgtctgacttatggaaacagacatcctaaatggacaataaaattttccctacctccca

SEQ ID NO: 1883817 - DNA, 4001 bp, Homo sapiens
cgctcagctgcatcttgttaaaagcttcctgcgggttggcagaatgaaatctttacttaaaacacacaaactattgtcaagggaaagatggaaaagagaatacagtaaaagggccaaatgctttgcttaacccaccagaagcagtagaaagggagaggtggtcacgttgtctttgcaacaacaacaacagaaaaggtgactaacacaaccacatcagcctccatctgctcttcccatggtttcaagatgcattatttcttttattattaattacttgtgtttctgagggaggacaaatatattattgtgactagcaagagaggaaatcatttctgcttctacttggcattaagtacagtagtgtatgtaatgactgagggatggcaggaaacagagcggcatcattgagaccagcctccctcctaccaatccactccaactcgcccttggtagtcagaggctgcctaacagaaagttcatgtaaaaccattattgaacactgacaggaaggaactgagacaggagtgagtggtgtgtatttgtgcagaaagggagaaggagggagggagagagagagaatatgagtcagtcatcatcatcttggggagacagcaccgtaagaggggcaagtgctttgtataattacaaaaatatgtacacatgcacacacacttgcacatatggtgtaattttttttcgttcatatcttgtcatttccaagaacctttttaagtgatgatgactgtttgtgcatgggaaccttcttggatgggtaggctccgtggctttagggaggctgagcagggaacccggcagcgcgtgggttcaggagaagggtcccttttaaagagcaaagggacacagcaagcagtggagaaggtatgaaaagaaaaaggtgaagggaccctggggaaaattccacctatagtgactaagctttatttctcttcgggagaaagtgacatttctgcgattagatcattgacatataaggaaagtagatggataactggtttttcgttgttctttttttatttgttttcttctacagtgcttacagaacctttgaccagatggtacctggaatgctctgtgttgcatattacaaacaggataattattttggctttttagaaaacgcaccgacatggtgacattgctctctgtttatcaagagacagagcatttgttgcctatagctgtatgctctgatgagacatgaaagatagtaaaatgacaaaaagcttcctgctgtttttctctcatcctgccccttcttctccccccagctccaaaccttatttctagtttcgctgggggtctaagttcctcctcccctgtctcccgagtctgtggtacaccacatctgatgcactccgataccccactctaccttggggtaaggaggaggtggggaagaatccgctccctgcatccatgtcctctcctctgcagcgaggcatattctcagcaactcttgtacaggttttcccttctcagctaccaccttggcagagctctatccctccctcaagcccagccagactgccaagcgccccgactgaaaactccatccagctcagccgaagtacaccccctccgccaagcaacccctgtgcccctgcccttcacctccctaagtctgctcttcataagcatcgattccattgcaaatcaaatgtacgtcccccagctattaacacccactaccccttaggtgttaccgacagcctccctcggaaaataataataataataataaccgaaagcacgcgaacacctgaagaagcacagatcgggatccgcatctggaccagtcctctgtggctatagtgatggggaatagcctgtgcctgacatatcctcctgttcccgcgcgaaccgctttaccctggatccctggaatcgtgcctaggcacccgggcggcggggtccgcccaggccgcgtcaggcagctctgggccggtgggtgccgggtctcccctcctcccgccccatctggcgcgcccgcagcgccgccgccgccgccgcttctctccccagcgggcgctcggagcatcccgcgccgcgttctccccgccccggcccccgcccgccggagcggggcccacgccgctggcagccatcaagtggctcgttaaggaaatgcaggtgagtgcgtgaggccgagcggcagctgctggagacgtggggtgtgtgcctgtgagtgcgagcgagacgaggagggagcgccagcgagcgagcgagcgagtgcgggagcggccgcctcggctccccgcccagccgcgcccgcagccggcggccggagcgcgtgggggcagcgcctcgccccgacagagcctcgcctcctccttgccgtctcggctgcttctccgaggagccgggagccgctcatcggcctccccaaccctgcgctcccctcccagcccgagtcctcccgctgctctttctcctcctcctcccgagcctcctcccctccggcgcggcgccgccagccagcctcggcggggagagtgcaggtactttgccttcagaataattagcaggacccaagccggctttccgagcgcgctttctttttcttcctttgccccctccctccggaaaagaagatcccacttttgaaacaatcagaaatcgaagcaccccaccaaagccaaaccctgacgggctgctgtgcatgtgccatccctttttgcagtttattctgggcctgtgtggaatagaaagacaattctttatttgactggtaggaaagaaaagagaagactcctcagggtttccaaggaggactggagcggctgctttagtaagtaaactgtgcttctgtctttcttttctctaaagtgaagcatatgctgatgcttttcaatgcccaatgtccaatgctgtggacagtttattcattttacctgggaataacttgacttatataacttcagtagctcctatttgagaagtggttcgctaagcatttttttcttttttttttttttttggaagagcccttagaagacttcgatatgggatcagtatgggcagccttactggaaaactgatttttaaacgtttattgttcaagggctattggaagcctgctttgttaaacattggttggttctaagatttaagggtggttatctagaaaaagcttgaaaaatctaaccctactggctcacttctcctgccaccttcaacctcagccctaatccatgctaactcccaccctactctgacttcagttggttggttgttttatctttagttctgaaaagctctagaaaaaaaaagggggggggggcggaaaagggaaagttaataaggatggtttgaaagaccagatgaaaattctgttgcgatttcttcatgcctgtaaggagataataattggaggaaaatcctggaactagaatagttggagaattagaatgaacttaatttggagagagaatgtgaaaaatactttggagagggcagggctgagactgtgactttgacacagcgggttataaactctgacagggctcagcagccagtgacaggtttaaggtgtctcctaaggctgaatatctctgcatcaaaaacttttgcaggcagtattcctcttggggctaacatcaccatgtcagtagctgtagcatttctttttacagaagtaggacactcttctttctacaaaagggttaataagttcattatacatatatataaaaaacatgtagtctaacatttgccaatattttgtaatatctaaataaaacctttgtgttatgtcaggaaaaatatagttgactcagtttgttttgcacaagagggagagaatcaataacatttcagcatttttttctttatcactgccaaatggattctgaatctaattcttcttgcattgttacatatacagtagatacagtaggagttgcaacttagacaaaacagacctgatttttaacaaatcctaagttttttgacatggtagtacttatactgactagagtcta

SEQ ID NO: 1883818 - DNA, 4001 bp, Homo sapiens
gtaccagctcgtatgttttgttctgtggcttcttcagaggtgttatgaagagcaccttggtaggagccgttttttgcccaactggaatttcgaacatgatcagcagtattggtcccattttcctcttctcttttttctccttcttccattgaaatatcatggtctgtgacattttcaatgcaagggaggtctgaagaagtgatcacaatttcttcaggctcttgcatgaacaaaggtttttcctcttgttggatccattcttgatatacttttaccacttttctcatagctgctgcttcacaaattggtaataaaaatgcctgacgaaatatctctgtcacaaagtttacattactccttttagaagaaaaaactctgcgaactatttcaatgtctgtgagatgttcttcatcaatactacagagactagatgagctaggttctcgctccgtgagagtgcttgtattggaatgagactgttcgggttctgtagttctgtctgctttatcagcattatcatttttgctttcttctctggatactaaactagcagctgctctctgaatattctttggcaagacttcaccttccatcccaggaatatgaggtcctgtatgtggttttggctccagccagaaagaaaccagccaacgaatgacaataacacgagccttaatgaaaggctcctttgtacaatagattgcttcattggtttcagcatctttctttatcatgacataatgtggctttggtctcatctgcgggatgtcaagtataggatgatataaactgttttccttacagatgtttggaaaaatataaggcaagtaatatttcttaaaatgtgaaaacaaaaatgaaaatcccctttcttggttttctttgttcttccattctaaactttttacctgaatgactatgtattttagaagtgcttcaagaaaatagcttgtgagatcttcttgccctttatctcctgattgtggggggacaagaggagtgatttcttctatagtgacttgagtttcttaaaggttgagtggaggattaatgagattatctaaagttcgaggtccatgttcagactgtggtgctgaaaatccagggattaagcatgaaaacatccagagctgttctttgctacagttattctgaagagcttgcaaccatagtaagaaaagacgaacaccttcccgcctaatctttaaggagtctcctgtgtgaagtagcttctttaaatcaatccaatattatgaaactgccatggctgatgaattctttctggaagaagttgtaaaattttctcaaaaataaaaagtatagcatccagttcctctctttgagacttgtgacctttctgtttaagactagcttcgatagtcacaaaattttcaaagaacacatagtatatatgtaaaaaatgttgtcgaaaaactgtttaagatcaatagattctgcattctttttttcactaaataaacatcactttccaaaacaaatacgcatcaggaagacagctcgagataaactctgaactaggattcaggcatctggatgaatgcatcttcttcagccagttccaccattaactcgatgacgatgcgcaggtgcttgaggcgagtcagtgcgtccttcttggtgtctagcaccttctgggtggacttcttcacgtccccgtgcggcttcttggagaacatcctgccgctgccactgccactgccactgccactgccacagccggctcccagcggcagaaagtggagggagtggacggggaggagactagccagagaggctcattagctccccagccttgcgggccagggcagagccgactcctccccgatccaggccagggccgccacctccacccgcctcgcgccgcggctccaaggcaccttcggccccagctccaatatggcggatccctctcccggccctgcacggagcgaggtagacccgggctggccgcctgccgccgccgctcgtctccagcggccgccgctcgccgccacaggccggggccccggatccagagccacgaaggtggagctctcggaggcagcagcacaactctctccctctgtgctggttttcaaagtgaatgcttccagtttttgcccattcagtatgatactggctgtgggtttgcataaacagctcttattattttgagatacattccatcgatacctagtttattgagagtttttagcatgaaggggagttgaattttgtcaaaggccttttctgcatctattgagataatcatgtggtttttgtcattggatctgtttatgtgatggattatatttattgatttctatatgttgaaccagccttgcatcctaaggatgaagccgacttgattgtggtggatagctttttgatgtgctgctgggttcggtttgccagtattttattgaggattttcgcatcaatgttcatcagggatattggcctgaaatttttttttgttgtgtctctgccaggttttggtatcaggatgatgctggcctgataaaatgagttagggaggagtttgtctttttttattgtttggaatagtttcagaaggaatgacaccagctcctctttgtacctctggtagaatttggctgtgagtctgtctggtcctggactttttttggttgctaggctattaattactgcctcaatttcagaatttgttattggtctattcagggattcgacttcttcctggtttagacttgggagggtgtatgtgtccaggaattgatccattctagattttctagtttatttgcatagaggtgtttataatattctctgatggtagtttgtatttctgtgggatcaatggtgatatcccctatatcattttttattgcatctatttgattcttctctctttttttctttattagtcgggctagtggtctattttgttgatcttttcaaaaaaccagctcctggattcactgatttttttaaaggtttttagtgtctctatctccttcagttctgctctgatcttagttatttcttgtcttctgctagcttttgaatttgtttgctgttgcttctctagttcttttcattttcatgtcagtatgtcaattttagatctttcctgctttctcttgtgggcatttagtgctataaatttccctctacacactgctttgaatgtgtcccagagattctagtacattgtgtctttgttctcattggtttcaaagaacatctttatttctgccttcatttcgttatttacccagtagtcattcaggagcaggttgttcagtttccacatagttgtgtggttttaagtgagtttcttaatcttcagttctaatttgattgcactgtggtctgagagactgactgttatgatttccattcttttgcatttgctgaggagtgttttacttccaattatgtggtcaattttagaataagtgtgacgaggtgctgagaagaatgtatattctgttgatttcgggtggagagttctatagatgtctattacgtccgcttgatccagagctgagttcaagtcctgaatatccttgttaattttctgtctcattgatctgtctaatattgacagtgggatgttaaagtctcccactattactgtatgggagtctaattctctttgttggtctctaagaacttgctttatgaatctgggtgctcctgtgttgggtgcatatatatttaggatagttagctcttcttgatgcattgatccctttaccattatgtaatgcccttctttgtctcttttgatctttgttggtttaaagtctgttttatcaaagattagggttgcaactcctgcttttttctgctttccatttgcttcgtaaatattcctccatccctttattttgagcctatgtttgtctttgcatgtgagatgggtctcctgaatatagcatactgatgggtcttgactctttatccagtttgccagtctgtgtcttttaattggggcacttagcccgtttaca

SEQ ID NO: 1883819 - DNA, 4001 bp, Homo sapiens; identical to SEQ ID NO: 588789

SEQ ID NO: 1883820 - DNA, 4001 bp, Homo sapiens; identical to SEQ ID NO: 588794

SEQ ID NO: 1883821 - DNA, 4001 bp, Homo sapiens
ggaaagaaatagctatgttccttttcaataaattagattctgtcttggccttgttcaaagaaatggtgtcattgcttttaggggatgtagacttctatctcaagattcttgtccttgagtcatctccaaatgattcacattatttcagatcatgatgtagttttatcaatatttccatacatttcatcaggaaaatagataagaaacattgtcaagttgaagtaagaaaaaatttaaaaggatatttttattttcttcagattcctgatagctcctccgaaagatagtaacaaaaaaatatgagacagaaaataccagataaactcactctgcttttttctaaagaatgttttccgctgggcacggtggctcaacctgtaattccagcatttggtgagggtgagccaggtggatcacgaggtcaggagttcaagaccagcctggccaagatggtgaaaccccatctgtactaaaaataaaataaaggccgggcgcggtggctcacgcctgtgatcccagcactttgggaggccgaggcgggtggatcacgaggtcaggagatcgagaccatcctggctaaaacggtgaaaccccgtctctactaaaaatacaaaaaattagccgggcgtggtggcgggcgcctgtagtcccagctactcgggaggctgaggcaggagaatggcgtgaacccgggaggcggagcttgcagggagccgagatcgcgccactgcagtccgcagtccgacctgggcgacagagcgagactccgtctcaaaaaaaaaaaaaaaataataataataataataataaataaataaataaataaataaaataaattagccgggcgtggtccacctgtaatcccagctactctggaggctgaggcagagaattgcttgaacccgggaggcagaggttgcagtgagccgagattgcgccactgcattccagcatgggcgacagagcaagactctgtctcaaaaataaaaataaaaaagaatgttttcctaagtcatccaatagccatacatcaatgaaagcatttaagtgcatagatagatgtaagatattgcaaaggaattgactcagaaagagactggtcttggttaaaaaagaaaacaaaacaattgggctatataggagctaatgcttaattaactcctactctgggcctaacattccatcaagtgctgtaacataattattttatttagtccttaagcaaaggcaggtagtatatattcccactttacaggtgagaaaaatgagcctctgattggttactaccccaagacaccccacaatcctgaaccacatctgtctgcctaattccaagccgagatgtatctgctccactttttctcgaagcacctgtccttcaagtcctgctccttgttttcctgcctttttgccccgtggaaaccatcccttcactcctgttagtgcttcatgctttcttcccatcagaacttattttccatattaagttatttatatcaaaatgcaggtaatgacattgctttgccttgcatttgtaataggaatcaaatcttcggctaaagagactcctccaaggtggaatttcaaacatcagagaaaaggtcgaggaaattttagggatgggaggtgggggaagaagaaagggaaaggagtattttatgatgcttttatatcttaccaatgcagtgttgttcattgcataaaaagttgtccaacttctaatcccccttcaggatccccatgactctcctgtgtgctttgcattccatatctgttcaagtccagtctgctttgcttacatgctgaggtttttcttgtttaaaactaaaacaaattacagttaagtaggccactaaaatgttttttaaactatcaatttggcagagacctcatttttttctgcctctgtaattccattctgtacaccctcaatgaatgcacacacaaaaagtgactggcagatagaatttagaatccatgaaaagaagtaaccattgtctcccttctatcagagttcaggttctttattgtaaagttggtgtttggtccttagattttcaggccacagaagcccagttctacccacaaataaaggtactagggccctcctccttcacctcaccagacgtcaggattctcttttggtcttagtggttctagttgctccttaaagggtagccacatggtgatgacttattaaagatggttggatgagacaggcattgagtgcagactgggcaaattcccacactattaaagtcatgtcagtatcagcacaggcatctgggtgtaggtttataacatttccactaatgcaaagtcatgaggacatctcctatattatcatctggaaacgatgttgtcttgcctttcacatttaggtctataattcgtctgtaataattaacttacttatgttgtgaggaagaggtaaaatttcgttctttttttccattgaatatctctttgatccagttccttctattgaaaagactatcttttcccttccttcctacattgcctcttttatccacattcaagtgtccaaatatatgtgtgtctgttcattcactccctctgtcctgccctgtttgtctatactcattggatgccatactcattggatatcatatagaatgaatcccgactttgttatgcatctttaagaaaatcttggctatttttagccttttatatttaaaaataaaattttagaatcagcttatctagttccattaaccaatctgttgagattttcattgagattccattgaatctatatataaattttgaaagaattataatttgaataattacattttcagtttccaatatatatgttcataggatacttctccagttacccaatatgtagtttttttaatccttcacccctttcccaaccttcccctccaaggcctcaaagtccattgcatcattcttatgtctttgtgttctcttaacttagctcccatttataagtgagaacatgcgatctttgttactgagttacttcacttagaataatagcctccaactctacccaagttgctgcaaaagacatttcatttctttttattgctgaatagtattccatggtgtatatataccacattttctttacccactcgttagttgatgggcacttatccaatcctttattttctttcttgctttgctacaccagcaagttatgttaaaaagcataatgttgaaaagagagtacatttgccctcttactgatcatagaggaaacactttcaactgtttattctaagaatgttataaggatttcttttctttctgcatcattttttaacaaatttttattatgaatcaatgttaaatttgatgatattgtatcttatattcccgggaagatataacctggtcataatgctttcttatattttatttaaaacttttgcatctatattcatgaatgaaaatggctggtagcttttccttctgttattgcatttgttagcatttcttatcaagattatgctagcattacaaagtgattttaggactgcacccattttttaaagtttttaaacctgtaataatttcttccttaaagttgatagaacttaccattaaaatcatctgggtgggtttagagttctatttgtggagaggattttaatcattgtgtcagttttatgggcctattaacagtctccatttcttaaataatttgcctaagaatttctccatttcatctaaatgtttaaatttgttgacataaacttgctcatagcatcctcttttcatcttaatatctgtagaatctgtagcaatatccttttttcattcttcttattgattaatgggccttctttctccttttctggatcaattctgccaaggctttatttgttctatcaacttttccaaggaactaacttttggctttgctgatcctctctattgtatgtttattttatttttttaacgtctgcccaaatcattattcatttttatttcttatttatctg

SEQ ID NO: 1883822 - DNA, 4001 bp, Homo sapiens
atgtgatgaatggaaatggtttcatgtcagggagctcttgatctaactagacagatgacccagtgtatcccaattaagagaccatggaaggctctgtggaacagaaggaatacctgcctgcctggtgaagtcatggaagacaaggatggggaaaggctgttcgacagaaggtatagagacaggcaaaaaactggtgaaatcaccaccctgcctcttacctgattagtagcatacttaaccttgctgaattgcagttgcctcattctttgaaagagcttaactatattacccttttgggtcattttaaccattcattaatttcattcaacaacgattcattgagtgcctgctatcgccaggcgccacgtgctgtgctaggctctgggagtaaaatggtaaagaaaaaagagaggtggctcctgcccttgtggaatttaggaccagcctagctcaagggtctccaacacccggccacaggccagcaccagcctgtggcctgttaggctccgggccacatagcaggatgtgggcagtggggccagcaatcattaccgcctgagctccgcctcctgtcagatgagcacggcattagattctcataggagcgcgaaccatattgtgaactgtgcatgggagggatctaggttgcacgctcctcgtgagaatctaatgcttgacgatctgaagtggaacagtttcatccggaaaccatccctccaccccgcttcgtccatggaaaaattgtcttccacgaaaccggtccctgatgccaaaaaggttggggactgcttgtctagtggtattgaagaaagtgaaatagcggcactaaagaataaattagaagttgaattaagggttccgaatgatgggaacacacttgagctgagaactgaaggtcgtgtagaacccagtatgcagaaagggaatgcagcggcatgtcagggagagtcagtgtaatttcaactgtctggcttacagtagtagctgctcaagttaaaaaatcactagagtccgtcggggtggcacgtgcctgtaatgtcaactacccgggaggctgaagcgggaggatcccaggagtttaagaccagcctgggcaagagagcgacccgccgttccaaaaaaaaaaaaatcactaataagtaggcacggttctaacttgagtgatcccatttaatcatcatagctcttgaagtaagtgcttatcttcattcctcagagtggaaaggaaggcacggagagagaactaagtttcacaaggtcaccgctcttgagtacaggaggcaggattctagcccaagcagagtccatatgttgtgtaccagctacacagtgaatggtggctactatggcgtttgccaaagggagagggaggtagaagaggaggctgtttcaggaatgctccatatttggagtaatgagcacaaggacttcatagcaaggccaagaacagcgtaaagctgcccgcgcatgaaaagcagccgcgttgaccgggcgcggtgtcacgcctgtaatcccagcactttgggagggcgaggtggactgatcgcttgacaccaggcgttcgagaccagcctgggcaacaggtgaaaatccgtctctacaaaaaatacaaaaattagccaggcatgatggcgtgcgcctgcggtcccaactacttgggagcctgaggtgaggcatcgcgtgagcccggggaggtcgaggctgcagtgagccgtggtctcgggaacaaaaaacagccgcgctgagaatgagccccgtgtggttggtgcgcggacacgcactgcctgcgtaactagagggagctgacggatgacgcccccgcgccacgccgctcagcgggatacgcttcttggcggactttggagtgggaagcggggaatgtctacgtgcgtatgcacgtggcactctctgcccgaggtccggggactttcccctaggcggaaaggggaggaacagagtcctcagtgtgtagcctaggatacaggccttcagcacgaaccacgtcctcagcttcacagagtagtattttatagccctaaagaaattgtgttttatgattagggtgagaaagttggtggcgtgagattaaaaaaaccgttttcgggcataactttctaagactataggctttcagaggcattgtggctagcagaatagctaatagacacgaaatgaacaaatacaggaaagctagaatgacactatcttatgcaaatatggtctggccccgccctacggggagtgggcgtggcctccccggagccggccggcctgctcgcgtgcgcgtgcgcgttggggcggccggccaatgccggaccgcttcggcaccgcccgcccgatccctccacccgtgggccggcaatggcgggcgcagtttcgctcttgggtgtggtggggctgctgcttgtgtctgcgctgtccggggtcctaggagaccgcgccaatcccgacctccgggcacacccaggtaccagctagggctgctggaggagggctgggactgcgcacgggtcccaggccccagctcggctgactcgcctgtatcctccctccgcagggaacgcagcccaccccggctctggagccacggaaccccggcggcgaccaccgctcaaggatcaacgcgagcggacccgggccgggtcgctgcctctgggggcgctgtacaccgcggccgtcgcggcttttgtgctgtacaagtgtttgcaggtacggggcggccgggggtaggggtgcccctgcaggtgcgggaccgccgggcgtggggatcccctgagcccgaatctcccatgggggtgccagggtaccaagaacaagacacagcttccctgtctgtaaaataaagacagtagtccgttggccttccaatattatgaggttattttgaggatccagggaggtaacggatgtgaagagcgtgtggtgaactgtaaataatgactatcacatttagttctcctacaatccagtgaggagtagtcacttgctcgaggtcacccagcgctggcaactgctggagctgggatttgaacccagctagcagtgtccatgctacaagagtggggccagccttggcacaggaggttgattgctgcagccagtgtttctagagttccagatatgaagtggtctcatgttctccttgggaggaggccctgaaatgtaagttgacagtacattttgaaaaacagtaccttccagggctgtgtctttagccgtgaccctattacgtacttgcattataaaatagaaccgatggaaccagtttagatatatgaaactagaagagatagctaataatgaccccaggtagatgtgacaggctaggatgaatgactgaatttaatgatgaactttgagaaggatagactagtaaattctgttcttggacctgagtacagtctgggagaaacataatgtagcaggaggtcttatgaaagagagttaggcattccagttgactgagttcactgtgggatgtgacaagccacttcccaaatcagtgctgggaacatggcactgtgcttcacctgccaatcagaatgcccctggagaattgtattctcctcagggcattgctttaagagcactacgtgttcaggaaacaaccagagaaaaccaccgtcaatgagcactgactgtaaagactgacgttaataaaccagaaaaaactcaggaaagtgggtgagggtgtgaccattgccttcaaattcctgaggggctgtcaccttgaggagacattattttggaaggctccagtaagcactatggaaagaagatacataaaggacaaattttggctttgtgcatgaactgtctaacaaccaaagtttttgtttttttcgagatggagtctcgctctgtcacccaggctggagtgcagcggcgcaatctcggctcactgcaacctctggctcccaggttcaagcgattctcctgcctcagcctctcaagtaactgggattacaggcacctgccaccacgcccggctaatttttgta

SEQ ID NO: 1883823 - DNA, 4001 bp, Homo sapiens
aagtaggctaaggacgtgaatagacaattctcaaaagatatgcaagtagccaataagcagatggaaaagtgctcaacatcactaagatcgggaaatgtaaatcaaaaccatgatgccattactgcctcactcctgcaagaatggccataataaaaaaaaataaaaaatcatagatgttggcatggatgcagtgaaaagggaacactttacactgtttgtgggaatgtaaactagtacaaccactatggaaaacagtgtggagattcattaaagaactaaaagtaaatctacagtttgatccagcagtctcactactacatatctactcagaggaaaagatgtcgttatacaaaaaagatacttgcacacgcatgttgatagcagtacaatttgcaattgcaaaagtgcggaaccagctcagatgcccatcaatcaacaagtgggtaaagaaaattggtatctatataccatggaatactactcagccacaaaaaggaacgaaataatggcatttgtagcaacctggattgaattggagaccattattctaagtgaagtaactcaggaatggaaaaccaaacatggtatgttctcactcatatgtgggagctaagctatgaggatgcaaaggcataagaatgatacattgtactttggggactcaggggaaagggtgaggggtgacgagggataaaagactacacattgggtgcagtgtacactgcttgggtgatgggtgcaccagaatttcggaaatcaccactaaaatatttattcatgtaaccaaacaccacctgttcctccaaaacctattgaaataaaaaaaattgccctctgtactgtataatgtgaactatattgtaaaaacacttcttattatagcatacattatttagtgctcttactgtaattcattgagagtcggcagttaggaacttagagcatatgactttcacttcttaaaaatttagaagaatgcattgcagaattatattgtcatttagtatcacccttcagatcagtcagtgtctacacaaacatttctgtgacaaagtaaaaaaccttatttgtttgtttatttatttattccttttttaagacagagtctcgctctgttgccctcccgagttcaagggattctcctgcctcagcctcctgagtagctgggattacaggcacgtgccaccacgcccggctaattttttgtatttttagtagagacaaggtttcactgttttagccaggatggtctcgatctcctgacctcgtgatctgcctgccttagcctcccaaagtgctgggattacaggagtgagccactgtgaccggcctatttattaaaatttaattacaattaatttgtgcttttaaaggctctttatctgtgaaaaatttttttgtatcctgaaatttcctaaaataatgaacttttgtattgtttatttaaaaacaagaacctttgacatagcttaagagttaacattaatttctcttagtattcttgtgttcagcattgttgcagtagctatggaaataaaaagaaatataatttaacaaacatgtaaaaaatacccatgtatgctgggctggcccagtgaagataaaaagagtttgttaagatgaaaaaagacacagataaataattgcaaggtagttggagaaacagggaatacatatatatattaggtattgaaatgataaattgaatattatagacaaaataaattttactgttctttcattcaacagtggcctatttaattcacatagtactttagtaaattcctttaactcagtgttctgtgttatatattgattgccatataaagctacttagttctttttcatccattgttttctttttatttatttatttattttgtattattattataaaaacatggaacgcttcacaaacttgcgtgtcatccttgcgcagggccatgctaatcttctctgtatcgttccaattttagtatatgtgctgccgaagcgagcacttcatccgttatttatttaaggaatatgattgttaacaaaaggactgtgtattttcattatactttgtcttttttccatgggactgtcacagagtatgtttataatgagtggcatatagaattaaacttatattaccgtatatttatattcctagaagttgatgcatcaataactgattgaaataaattttacctggaggatattatgcttttattcactttatttccaatttatgtataactcctaagcaagatcattttcaaattctggctgctacatagattttaaaatttgtctgtcctttaaacattgaggaataaaataagtagaatgaagctcaaattttataacagtgtctccatgagacagttctttatgccatagaaaaccattggttgattaccgtctcagtcaatgttgctcttcagttgttgaattatatgtattcttataaggataaaacatttttaatttggtaagactagctgaatttgctttttgtgcttatgatgtaaagacaagatttaaattaacaccaacagcagaggctcttaaaaatgtagaatgttatactatgaatttaaataatctttctgtgcttgtcattttacattgatagtatcataagacaagtaatgacagattaagacctacctagcagagggaaaactaaattacatggctttattaaggcgtaaataaacctattaaccattatctggaataccaattagtagaaagagcactgacaattttatttatcaacattaaacacaattattaattacagacctgatgaatctagcagtaagcaggccatgttggatatgctgggaccttaagtccattatatgagaaggatgattaccaaaatcctgtggggaaataagtaattgtagttgtaaaattttaattgccttggaataaggcaaattatattttcttgtctgagaatataaatagtatggcatgaaggtaacaagctttggcagttgtaaatagaaaatggatttatgttaggttttaaaacaaagaaaagagtgatgaatttttagtgtcatgctattccatgtgaatggcatactgtaaatacatgcagattttttttgatgtattctttagtaggtgagctattctctgaattcctttttttcatagtgaaaataatgtgggaaggacctttttgaatgaattactacaggtgaatgggaattatataattaaaaaatattttcattatgtgattagcagtgttgtgaaatgcacaagagacaattcacatttttgtgcctttttttctttttctttgaagatccaaattccagaatttgtggacatttactcataggtgcagccaagaattcttttgcaaaactcatggataaaattagtctggtaatggaatgtatacctctgcacagtagcaggagtattacatatgtagaaaaagattccctggttcagaggctggcccatggacttcataaagtaaacacactggccctgaaatatggtttgcgtggccatgtgcccattacggtatgtatacactttcatttagtagtaacctaagaacttgtaggtttaattttgaattagcctaatttgtagtttaaattattagttgtacatgaatgtatctggattttctttatagttcatgtaaaattttaatacactaaattacttccaaataagtgtccaaaatatctaaatacaaaaatcactggccgggcgcggtggctcacgcctgtaatcccagcactttgggaggccgaggcgggtggatcatgaggtcaggagatcgagaccatcctggctaacaaggtgaaaccccgtctctactaaaaatacaaaaaattagcccggcgcggtggcgggcgcctgtagtcccagctactcgggaggctgaggcaggagaatggcgtgaacccgggaagcggagcttgcagtgagccgagattgcgccactgcagtccgcagtctgccgcagtctggcc

SEQ ID NO: 1883824 - DNA, 4001 bp, Homo sapiens
caaccgcttgaaagtaccacacttacgcagggaaacgaatgctaagacaaattgcaaatagattcaaactggcaaaaggtcaaaatccacagtaataatcacatcccactgggcaggcacattgagcttcctacgatttcgagctgtgaacaatgaacagcaaagagcaaaggtggagaggacctggatggctgcttagactccttaggttgagcaaagggttttttccttatgcctatttcaaggtctctctgtttttcctgatagtcgactcttctgtcaaaagcttggtgagcaggagggagggttcccataaggtcttttggggagggaaataccagaatatggggtgaccccgaggggaggggctctaacagatgaaggccgcttggtagcttcattgtcggggtgcagggggcgagctgggctgcggtttccagcctccaggctgagccctcacctggatcggcccactctctcctaagggatgcagccaggctgtggctttaacgtggctggtgtgctgactgcgcagtcctgagccctggagcggcgcgcacttggcctgcctattttccacatcccaggcctcagtgccgggccctccagctcccggggcctgcgcctcccgcagccttggctgtttcagcaggtggcaccgcgtccttccccggagggggactgacaccctgcagttacccctgaccctgccctccacggctgttggcacatcttctccagaacccagggctctcagcccctccatggtgcccgcacccggcctccggcctcgccccgccgcagccgcgaaggtcttcccgctgccatccttgcccgctgggctgttctcagcgtggccgccagggatgtcctttgagctcattcggtcccgtccctcccctgcgggaggttctccaaggtctcgcccttgccgagggtcgaagctcaggtccttgcacaggtccctggggccccgggccaaacgggtcgtcccctgatccctctcctggcccctggctcccctccagccccgggaccttgcggggccctccctgcgtctcagggctccgaggtcctcgcgccgccttggatctggacttgggtgtggacctccccgtccgccctgctcgctggagcgggtctccacggggctcggggcggaggctgtggaatggccgggaatgcgctccggccgggcagcggcttcgctcggtagctgccgtatctccgggccgtgcccagtgcttagttttctgtgaatgaatcaatgttgagcggaaacttccgtcaggctttgaaccaggccctgaacgtttgcgatgctagggacgcgcccgtcaacccgccgagccgccctgtgcctcatgcggcgaccgaggcgccctcgggagacgggccctgtcgggtgtcgagacgcgaacacgacccaatgccaagaacgggcggtgaagatgaacggaaaagccccaagcagcggcggaacggcgcgcccgtgcacaagtgcgacccgcgcccgtgtcccaaggaaagaagataaaagataaaacgaaaaatgccccggggctttgcggtgactcacgcctgtaatccccgcactttgggaggccgaagcgggcggatcacctgaggtcaggagttcaagaccagcctggccaacatagcgaaacctcgtctctactaaaattacaaaaaaattagtcgggcgtggtggcgcgcgcctgtaatcccagctactcgggaggctgaggcaggaaaatcgcttgaatccagggggtgcaggttgtagtgagccgagatcgcgccattgcactccagtctgggcgacagaataagactccgtctgaagaaaaataaaaaacaaaacaccaaaaaaaaaaaaacgatggttagatgccacgaagtaggtggcaatgccttaaccgtatgcgtgttgtcaggcccgagggcctcttccatccttgtcaaggggagtgctaaccttctctcctttcatacaacacgcctcggcttccctgcgcactttatttaaggacgaaagctccactcgcctttcggtgagggtgacttcttgttcgctatccatggaggtacatttataaaaatgtcacggttcagtgggaaaccacaaatgttcgcattcaattaatcgtcttttttaaaatttgaacgtgtaagaaaaaaatctaccacttttcgtgccctaatatattcataaaagtagccaattagaagctgaggggaacaaacggaagtcccgagcgtccttcagagaagtagattcccccggaaacaaaacagggcgggcgcgcacctcctgcggcgacacgcctagcagacggcggaaggcgggaagaactgtctacggaagtggaaggttggtaacgaatcagagaacaaggatcggaagatccgttccacggacttccggacgcggccctgccccgggaactgcgggtgttcaggaccctgtggtgcgcgggacgccgcccgcgcatgcgccgcgccggctcagccccgttttcgcaagctctgcgtggtcttgggtggcgagttcgagccttagaacggccgagtgccctggaaccggtttcggctctggcgtcctcgcgtgtcctccggctccaggttacaacgtcagtattggcgccttggcgcggtcccgtcctgctctcgtcctccgttccgtggaccccggggctgttctggcgcctcgcaggccgggcccctcccatcgactcgatgggcagggctctgcgaggctcggggaccggggacgcgcggccttcctgacaaggagcccgagggtctgcacagcctggggcaccacccggcctggtgaggatgatcgctgtgcgcgcgatgcacatgcgccctcaacacctctgcacattcatgcacgtgtccatacatgggtgcacacacgtccttacacgtatgtacatacgcatgtgtacacacgcccatgtctacacgcgcacatgtctgcacacgagtcacacgtgcaagtgcacgcatggatggtggacacgcgtttacacacgtgaatatgtgtatacacatgcagacacatgtgcctgcccacatggatgtgtgcacaaacaagcacagaggtcctcagtggctcactcctggtggccgtgtgctgtgggctgggaatggccatactcatttctcagagcttttgagttgtgtgtgtttccagttgtgcatattaattagaaaaaacaaaagtgaatttgtaggttaaggcaggtccttaagtttccttaatttcctctccctggagacctggcaggctgggccgggcactgctgcggaaggccagccgcaccctgagtcaggtcttctccagaaggttcagggcaagctctggattacagataggaaaccaaatgcatgaggaaggcactgctcaccctgcaatgacggtcaaggtgtggggtggggagcagcagcctggaggtcagagccaggaccttgggggctgagagtggtgtgcttgcctggtgatcttcagcaatgggaggcctggtgtcaccctggggcccagactgtgaaggactggtggctttggggatctgcgtgatccagggggcccaagcatctgcccagccggcattctgtgcactgcccacctgcctgtgttgtcaacgaggacggggtttgctaaaatgcagattcttgcctcttccctagtctgagtccagggtctgtggtcaggcctgggaatctgtattcattgaggccctttgggtcccgccatcatagcagcctgtctttactttgggtggaggtcggaggtctgcacatcacccaggaggcttaccagtggtaacccaagaagagggaagatggcaagagggtctttgcagggttgggagggcaaggatggaaggacctgggaggccacagcaccctctcggacttggcgcagaacccgtggaaacagcctgcgatgcacggatggaggtggctttgccctgtgtctgctggtgcctctg

SEQ ID NO: 1883825 - DNA, 4001 bp, Homo sapiens
ccatttctcttgaattagtaaggtggctacaccgccaatttgagctgttctccttcagtcctgtagtccatcgccaggggagtctccaaatgctaataaaaatcaatttcccagacaaaagaacatatacacgtttttttctttctttctttcttttttttttttttttagaagagggtcagggagcatctgacggacgtttttaaaggaaggggacagctacttccatgggactgcattttagttgtgctaaaagtgatgaaagtgggtttgcattattctaccaccaacacccaaaccacctgcccacggaaacccccgccggagaccgaagtttacccaaatagcgctcggcaaagcgctgccataaattcaaaactaactctgccgggcccgcgggggttgcgagacagggaccgaacgtgaaacccggggagccccgcgtctcttgcctccgaaggttttccgtgatcagtgtccccttctctgctggagtcggaagtgcctgtcacctgcggatctgcccgactctcccggtcggcccttcttctctgcccagttcggacagtctcgaattccccgtcgcagccccggccacctcggactccctggtccccagcccccgccccaccccccgcctccaccacgtcccctccccgcggtcccagcctctccaggcgctgctgggctctgattggcggctgcgctgacagcaggcggggcctggaagtcgcggccaagcccgccctcgcgtataagcccctctcagcgctctctctccatctctcccctctctttctctctcgctgctcccttcctccctgtaactgaacagtgaaaattcacattgtggatccgctaacaggcacagatgtcatgtgaaaacgcacatgctctgccatccacaccgcctttctttcttttctttctgtttccttttttcccccttgttccttctccctcttctttgtaactaacaaaaccaccaccaactcctcctcctgctgctgcccttcctcctcctcctcagtccaagtgatcacaaaagaaatcttctgagccggaggcggtggcattttttaaaaagcaagcacattggagagaaagaaaaagaaaaacaaaaccaaaacaaaacccaggcaccagacagccagaacatttttttttcacccttcctgaaaacaaacaaacaaacaaacaatcatcaaaacagtcaccaccaacatcaaaactgttaacatagcggcggcggcggcaaacgtcaccctgcagccacggcgtccgcctaaagggatggttttctcggcagagcagctcttcgccgaccaccttcttcactcgtgctgagcgggatttttgggctctccggggttcgggctgggagcagcttcatgactacgcggagcgggagagcggccacaccatgcgaggtaagcgagtctgcgggcaccgaggctccccgagtccggccaactccagccagacggggagatgggggaggggagggcacccagcagaaagggaaagaggttgcccaggcgcagttccccgaattcgctctcgcaggtggggctgcaaatggcctgggcgtagaaagttgcgggaaggtgttgatgtctttcgggagttctggagggacgcgggagggcgcttttttggagaggggagacaggctagttggttcttaccagtccttgagttgcactgaatcttttttgcttgtcgctctcgggtgcggaagcggacgcgggatggagaaagccgaaagagggatgcctctggacaggagcagtttggaagcgcccggcgcgcagtggtcgccggccgggtttgggcgcgcggggcgcaccggccgggggcagggtggacacgcgcgggcacacactcgccaggttacgaggcccactaagcgtcctggccagcaggcatgtcccttcgctggagtagcaagcagaagagcagtgctgcgaggctggacgcggctgaggaaacagttagttccccggcacgcggctgaggaaacagttctgcggcgcgcgccttcgtgccggcgctgcgccctggccaggtcctcgtgcccgagcccgcgcggcccagggagtagtgcgaccccggaaaagttgtaatgagaaagttctggaggcttggaaaggccacactgctcacagtcggagagtcatgggctccggctcttttgtcagataaagggccggtagtggaaggaggtgctggtgcaccctcgggccaggaccctcgcagtcgcaggcggtggcggcggcggcggcgggaccccggggcgagctggggtctgcagggatgcgcgccagggactgtagcgttacgcttgctccggctggactctgggcctctcgaagggctggagggtgggtttcggggagtcacttggtctcctctcctgccttgccggagacctcaggtttccttcgcgctgtgctcggcctttcttcactcttttactgaagagccaggcgggtgtccgcttgacatggggatctgtgcaagctctgggcacccacccccactcccagtccctcttcctggccacacagcggttaatcgggggctcttctctatccttcgcacgtacccctgggtcttgacaacagaaagttagtaacggccagctccagaccttcttgcatcccagacccggagagaggtggtctaggcagggagcacttgggagagttgggatgcaatcactggtctcctccttccactgaaagtgatcctctcccacccagtccccctacgcccctagaggagcaccccaggaggcagcgggtctcactcccactccctcccgcacccggtgagccccgagcctggactcaagggtttgctggctggacgctgggatgtgtcaggaaagggaaggagaagaaggaacggagagagactgtccatgggggagggggttgactgtagataagaaacaaggacgtcctgatgggatggtcttgattggccggctcgctgggagtggggcacccgtgtgtgtgcgcgctggctccagctgattgtcccggttgggggttggttacacgctccactgtctaaattctttcaagaaactatacttgggcaattggagagtagagaaccttggcttagtaagagacgcccggtcttttgtttttctttttctagcccatctcaccatcccatccattctttcggtttcccccgtcccagtccagagctgccagttcgtccctccccttcttcccttctaactttccccctgtggctgggttcatactttctgaacgtcgtaaactatgcgccacctcagctcggacccagcactaggacctagggcataaaatccgctcactccttacatcgtagaaggagtgcggcgcggggtggggatgggttgtagcttgatctagcatctcctgaaggagcagtttgcagatgactgtcctggttcgccacggcggtcgctttgaggactccagaagctggaaggattgaaagccaggcgctggtcctcatgctcaccttgagaaaaccagtttaagcccacagacctatcaaagagggcgccagcctcgccaggcgccctaggaccccttacaacttctaacttgaggcagctctcaggcggccttaggggaatgcgctggagaaaatgtaagcttaaaagatgaccaggtcactctatcgccattcctggttgccctttcctgacccctagtgtctttccttactacctcttcatattttccccggacagtgccctaccacagtatgagaggctgttccgtaagaatgggattgagaaaagatccaggctactctgacgtcttgtggagttgggagttgaacttgagagtgaacttgagaagtgaaagcgggaaaagaatcagctttcgctcgtgcagggctactaagcaccctatgttgggagaggggccatttttgacctgggctttacggtgggcccactgcatttccctcatccacacgcgcgc

SEQ ID NO: 1883826 - DNA, 4001 bp, Homo sapiens
tgtagaggcaggagctgaggagtgtgatagggagaatctgtgaacaatggtttagtttagactgatcctaagacagagggaagcagaacatgacttttagtgtgatttgatcagattggcatttgaaaggttatagcagcacgaaaaagcagtagagagagactagtgtcaaatctaaggctgggagaatagagttggctacacctgtgcaggtaaggggtcatggcttgcattcagtgggaggaggggtaaaaatggattgggagagacttggtaactatttaggtgtggaaggtgtgaacgttgatgtcagactccaagtcagaaatttttagattaattattcaaaaactaatagactctactttttagagcagttttaggttggcagctgctgttgctgtatagttctatgggttttgatacatgcataatgtcatatattcatgaggacagtatcatacagaatagtttcactgccctaaaaatcccctgtgcttcacattcatccctccctccgacctccaacttccccaaaccctggtaaccactgatctgtttactgtctccatagttttattcagaatgtaatataattggaatcatgtgttatgtagccttttcagactggcttctttcacttagtaatatgcagttaagtttcctctaggtctttttgtggcttgatagctcatttctttttagcacagaatagtatggcattatatggatatacaacagcttgtttatcccacctattgaaggacatctcagttgcttccacgttttggcaattctgaataaagctgctataaacatccatgtgaaacaaaataaaaataaaataaaatagaaataaaacatccattcatccattccatttgcattcagtgggagtaggggtaaaaatggattggggtaaaaacaaataggtttttttttttttaagaaactgatgtttattttccatcaaccatttttccatgttgcttaagagcctatgcaagaacagcttaagaccagtcagtggttgctcctacccattcagtggcctgagcagtgggagctgcagaccagtcttccgtggcaggctgagcgctccagtcttcagtagggaactgctgaataggcacagagggcacctgtacaccttcagaccagtctgcaacctcaggctgagtagcagtgaactcaggagctggagcagtccattcaccctgaaattcctccttggtcactgccttttcagcagcagcctgctcttctttttcaatatcttcaggatctctgtagaagtagagatcaggcatgacctcccacgggtggtcataggaaatcgtgctacacatgcgcagaacttcccgagccagcatctaccacatcaaacccactgagtgagctcccttgttgttgcatgggatggcaatgtccacatagcgcataggagaatctgtgttacacagagcaatggtaggtaggttaacataagatgcctccgtgagaggctggtggtcagccctggggtcagtaaccacaagaagccatggctcccggaaggctgcctggatctggttagtgaaggttccaggagtgaagtggccagcaattggagtggctccagtggcagcagcaaacttcagcacagccctctggccagtattcctggaggatataacactgacatcagcagggttttcaatggcaacaatagcactagctgccagcagaagcttctcccaggtcctcttcagatttatgatatagatgccattacttttccttttacagatgtactgttccatctggaagtcaagattggtgccacctaagtgggttcctgctgcaaggaacttaaggacatcctcctccttcatttgcaggacatcaagggctccggacattgtgaaagtttccctttaagttacgacgggaatccagaacaacgccgtatgggcccctctgtaggtagcgcggaaagcaaaaacaaataggtttttgtgtggataaaagttttcacctcatttgattaaatataagtgagcacaatttctggataacatagtaaaagtacgtttagttttataagaaactgccatattatcttccaaggggctgtaccattttgtattcccaccaacaatgaatgaaagttcctgttgctctacatggttgccagcatttggtgttgtcagtgttctgaattttggccattctaattggtatatagtagtatctcattgttgttttaatttgtatttccctcacgatatatgatgttgaacatcttttcatatgcttattcagatcttttgctcattttttaattgagttgcttattttcttattgctgaattttaagaattcttcagattcatttttcattgcttacttagaataagccttcttttccctcacaagctgccagttctactttctctttagtcttatttgtgatccttctttctacagagacaaattaaaccagagaagtggactctttccctacaggcagctgaaaggatgtgcaagtgcagttcagagggggaaataaaaaacacgttttagaatacttccttggttaaaagcagtaagtttggcaaagacacatagactctcaactctagatttactgagaatgctaggtagcatatttttggagtcaaatgaagaagaaaaattataaatcctatagcctacagaataattattgaattatttgaagcatatgctttggcctctgaagcaaggtggaggggtctgctttgatcaacagattgagtacttgatgggagttcttagaagtacaactcttggagggtttattcttcagtcagaggggaggagccattgaacgctattgagcggtggtggaaaatgatcagaattcttccttcttgggaggccgaggaaggtggatcacttgaagccaggagttccagaacagcctggccaacatgatgaaaccctgtctctattaaaaatgcaaaaattagccgggcgtggtggcataaacctgtagtcccagctactcgggaggctgaggcaggagaatcacttgagcccgggaggtggaggttgcagtgagccgagattgcgccactgcactccaacctgagtgacagagtgagactctggttcaaaaaaaaaaaaaaaaattctttcttctatatcctatgctgataacacagtaattacccatatgacttgacatgtaaatggtagttttaaagattggagcctgactgctccatcttaaacattctacaagactctcctttttttttttaaatctatctatttatttatgtattatttattgagaaggaatcttgctctgtcactcaggctggagtacaatggagcaatctcggctcatagcaacctccgcctcctgggttcaagcgattcttccgccccagtctcccgagtagctgggattactggcattcactgccatgcctggctaatttttgtatttttagtagagaccgagttttgccatgttgtccaggctggtattgaactcctggcctcaggtgatccacctgcctcggtctcccaaagtgctgggattacaggcaagagccactgcgcccggcctatttatttttttagtgaccgtgtcttgctttgtcattaggctggagtgcagtggttcaatcacagctcactgctgcctcaaattctggggctcaggcgatcctcactcctcagtttcccaagtagctggggctataggcacgagccaccaccacctggctgagacagagtctcgctctgttgccccatatggagtgcagtggcgtgatctccagctcactgcaactgccgccaggttcgagcgactcttgtgcctcggcctccagggtatctaggaccacaggtgagcgccaccactcccggctaatttttgtattttttgtagagacggggtttcaccatgttgcccaggctggtctccaactcctgagctcaagtgatccaccggcctcagcctccca

SEQ ID NO: 1883827 - DNA, 4001 bp, Homo sapiens; identical to SEQ ID NO: 588829

SEQ ID NO: 1883828 - DNA, 4001 bp, Homo sapiens
attacacaactgcactccagcttgggtgacagaacaagaccctgtcttaaaagaaaaaagaaaagtgtctgacatccagttctcttatttggacaatgctcatttagtttgatcaggaatgcaataaaggagggaactctaatacctgaattaatatctgctaaaccaaatttttctttcagtgtctcaggaataaaaagtaacactgattttctggctgcttaaccaaattcaagcaatgctaaagcatgttgtggaaaacatgtactaaaaataacattagcaaataacttcagaatttagcttgagtgaaatgagttctgtaatgctgagcaatggtagtattgtgtggtcacttaccagtaaaaagcagaatagtgttaagggagggggctggttaggaaaatcaagttcatgaacaacaatgcatctaatcacttctgaaatattttagacagcaaaaagaacaaaacctatgctcagtgataatgatatgatattgcagtgtgttctaatattcaaaaaaaagaggaaactcagctaagcaacaaacaacactgacaaaagtattttaatatagtataaacactgggtacatttatctaaccatgtaatggttaatctccaaaatttctcaaatgtatcatttgtatactttcaggtaatgtttaaagaatgggaagtgggttctaaaccacagatgtaatattagctaaataagtttatattaaatctattctcacttttgaggaagaccaattttgctttaaccataatttttattatctgtagccttctttatcccatattacccgaggtaatcaataattaactgtatttcgcttaggatcccaacaccattgagaaaatatttgtttttgattttgttttttgaaacagggtctcagtctgtcactcaggctggagtgcagtgatgcaaacacagctcactgcagcctcagtctcctgggctttaagtgatcctccacctcagcctcaccagtaagtagctgggacttcagagacacgcccccatgctcaactgtttttttaatttttttgtagagatgggtttcgccatgttgcccatgctggtctcgaacttctgggctcaaatgttcctcttgccgaaacctccccaagtgttgggattacagacatgggccactgtgcccatccaataactgatatttaagtatactcattacagtcttttctcacctcttctaccagatgatcttgctctttttgaaatggatcactttttttagctggcaaagaccctccaaatgcactactctctgtattctttgcaacatctgataatggagaattttccacttcaaattctggtattttcttagaaattgcttcatttttttctttgggagttcccatctttgtgtcctgaagaagacagatatgtaatgttaaacccttaataatcatggctgatcctgaagctgtcttcattagcagttcactggttatcatgaacctataaaaggttgttaatactattgtgaaattgtatgtcactggcagaattaactaattccaatattcccacttagcaataaggaatataagtagatatggtacaaaatgtacaaatagtagaaaatgtgaaattagaaattaaatttaactgtggtatcaacaaaaataaataatattttataatttagtatggtccagaattaattgagacttattttaaaatataccttttcaagtactgtaacactgtttctatctgatgatgaaactgactgcgacaagaaagaggcagggctaaaaggaaaaaagacaacaaatccaagttataaggagaaaagaattccattccctttacgagtctattctaaaatctgtctgccccgtatctgtccgttacgatttcactcaattcgtcccggtcatcaaaaggcagtttattctagggaggcatggtgacaagtagagcagtatttcagcccaatttgtgtatcagcctcccaattatgaagactttacttaccacatactgagtcaacaatattttgatttgaaagagttaagtgacttaatgaatactccacaacttgaacacaggttaaaaacagattcaattaactagaactgcattattacaatgtcacaggttccaaatcacagtttctttgtagcagatcctttattttattttttttttttttgagacggagtttcgctcttgttgcccaggctagagtgcaatggcgcgatcttggctcaccacgacctccgcctcccaggttcaagcgattctcctgcctcagcctcctgagtagctggaattacaggcatgcgccacaacacctgagtaattttgtctttttagtagagatgggctttctccatgtgagtcaggctggtctcaaactcccgacctcaggtgatccgcccaccttggcctcccaaagtcctaggattacaggtgtgagccaccacacctggcccagcagacttatttttaagattctcttgatacttcatatccaaaatcaatttctcatatgctaaattttactctatagcaaacatgttacagtttcacagtaatgtcataaggtcagagttttagtttgccacattctgttgtatttgttaatcttttgtattcccttgcccttttggataaatattaaaatttatgcagcttttcatgctaattataaaatgttattaaattctaaaatcttcaaagaaatggtaacttttttactttggtcttaaaaacctttaaaagttaaaagcctaaagcttttctactctagttactataagacaggattatcaaagactgctttcaacagcatgcatgttggtactttcctttcttcttataactagaagtacaaaattaatagcactgcaaatattttatatcatagtaaatgtaattttcaaactttttcaaatatgcactcttagagtctttgcctacgttccaaacataattcaaaatcactgcaatcactcaagcttcaacgtagcattgacaaaatataatccagatatcaaaggcaaagaattgatcatctactagattttgagggaaacttaacattaaaattatcaaaaagccccctgaaacagagccagcaatctatggaccaatgccactaaggtgccaccaccacaagaaggtaaggacaaaggctatgtctttccctaaggctattcccagaggctaacacagtggttggtagtgcaatacatacatgttaactatttgatggattgatggaatcgatgagtaaatgccacttgagaatggggttctataggtgacaagtgtttccatttgaatgattcttgtggaaccttatagcagagaacaatggaaacattctgtaccctcccctctctcatttctgaactggcaacatgctattaaacctgctaacatcataatctaagacaagtttaaagcagccctggctcagtctttatacttcgtccatttgccatgccaagattgaggcctatgaaatcctagcactgtaacaaaacagaaggatggtgatccccttgtggaaatttatcctaagggaagaacagagagaaaaaagaggaacacactttttatagtagtaaaaaataaaattgagagaaaattcaagtctacaaataaatgtagtgttacaaagctattatcaatgaaaattggttaatatgttatttaaacatacagacagccaaaaaaaaatcacaaccgtttatactatgttaatgttttaaaattttgggctgggcgcggtggctcacgcctgtaatcccaccactttgggaggctgaggcaagcggatcacctgaggtcaggagttgaagaccagcctcgccaacatgatgaaaccccatatctactaaaaatacaaaaattagccaggtgtggtcatgggcgcctgtaatcccagctactcgggaggctgaagcaagagaatcgcttgaacccaggaggcagcagttgcagtgag

SEQ ID NO: 1883829 - DNA, 4001 bp, Homo sapiens; identical to SEQ ID NO: 588860

SEQ ID NO: 1883830 - DNA, 4001 bp, Homo sapiens; identical to SEQ ID NO: 588866

SEQ ID NO: 1883831 - DNA, 4001 bp, Homo sapiens
aggtttactaatgccatttcccagtcagtaaggggcttgcccaagggcacagtgggcagcggccgggtcctgaactcaggccttctgaagccatcaagaccacaggggaccgtgaatggtggctcacacctgcaatcctagcactttgggaggccacggcggaaggattgcttgaggccaggaatttcagaccaacctggccaacatagcaagaacctgtctctatgttttattatttatttgtttagagatgaagtctccctctgtcgcccaggctggaatacagtggcacagtcttggctcactgcagcctccatctcccagattcaagcgattctcctgcctcatcctcctgagtagctgggattacaggcatccaccaccagacccggctaatttttgtatttttagtagaaacagggtttcgccatgttggcaggctgctctctcaaactcctgacctcaagtgatccacccgcctcaccctcccaaagtgctgggattacaggcgtgagccactgctcctggcctctttttttttttttttttgagacggagtcttgctctgttgcccaggctggagggcaagtggcgcaatctcggctcgctgcaacctccccggcctctattttttaaacaaagaaagaaaaaatgaccacaggggccatgccgtgacctgaggatggcactaatgggccatggaatcctggcttggggcccgttcctaagaagagacatttcttcttcttttttttttttttttgagagggtctcactttgtcactcaggctggggtgcagtgggacaatcataacctcactgcagcctcaaactcctgggctcaggtgaccctcccacctcagcctcctgaagtgccgggcttacagggatgagccactgtgcccaacctcaagagacatgttttttcctagccactcatctttggacccttacagctaagcccattttacttacagatgggcagagtcgctgggtaatgagcgtgccgagattcattcccggaattggccgctaggtggcagcagcaggccctgttgccatctcctacgaggcttggcgggctctggcgccctctggtggctgcgggaaaacacgccaagaagtctgacggagaaacattggggaaactgaagtggagttgttacctcttgggagagagatactcacggggagaagctgggcctaggtggtgtcccgcggtggcctcaggctgactggccattctccagcctgtcaggtctgattagcactcgggaggcgggtgtaggctcctccccatctgcagcagccccggggaaagagccctagtccaggactcaggcccctgttcccagcgcggtttagctgccaaccggatctccttctgcaagaggggaaacagaaggaaactttattcccgagtctgtgaagccaggaaaaggggcaatgcctggtgggtgggaaggcatctacacccggggcctcctaagtaagaccaggacctcgaggggaggctggaggaggagccacagcccgcagtcactgggctgagcaggaggaacattcaaaaggcctgggagcacagggtggggtgctgggcagtgagaccttcccctggcctccatgtcatggacagaaggtggacgccttgtcacaagctgaccacatcagatgctctctttcgggactttgggactgagaaagagagaggtgagtcagtccccgtgtgcagctggaaaggcatcaggtaaccctgggtggggtctgaggatggcaggaaaagcctgtctgtgaagggaagggaagtgagagtggggagcagggatggagggatgctgggatggaggatggagggcacagggatacaggaatggagggatggaaaaatagagggatgcaggaatggagggatgaagaggtgcagggatactggggtggagggatgcagagaacggaggcatgcagggatgctgcgatggaggaatgcagggatggagaatgtaagggtacagggatggaggatggaggggtgcagggatgcagagatggaggatggaggggtacaacgaaggaggggtgcagggatggagggatggaggggtgcagggacagagggatgcagggatggagggatggaagggtacagggatggagggtgcagggatggaaggatggaggggtacagggatggagggatggaggggtacagggatggagggtgcagggatggaaggatggaggggtacagggatggaggggtgcagggatgggggacggaggggtacagggatggggtacagggatggaggggtgcagggatggagagatagaggggcacagggacggaggggtgcagggatggagggatggagaggtacagggatggagggttacagggatagagggaggctcctccttcagtgccccatggtattcctggcctagttcctgccctgctgagggaggtaccctgggtccctggagcaaaggcccctcaggactttagacctggccagtgaagtggaaatgccgttctggacacagtggtggctctgggtgccctgatacctgttggcctctcagaagcggctgctgtgactcctaaggccacagatgggcacagcctcaggcctggctgcctcctctaccctgcagcccaagtacctggagttaacacccacagagggcacacagtgggggctggctgaaggactgtggtgcatccaggcggcagggcactatgcgccatgagaacaagccaatgtgacatacgccgacaggcagacgcccaggatggggatgagaacacagccggtggcagaccaaccccgtgggaaaaacggaggtcaccaactgcacagccacctgcttccaaacgtcacactccctgcctcgagcgctcacttctaccttactcaaatggtagctattacaggaacatgagttattttgttttaaaaatactaataaagaaaataaaactttaaaagtttcctggctgggcgtcggggctcactcctgtaatcccagcacttcgggaggctgaggcgggcagttcccttgagccctagagtgcgagaccagcctgggtaacacagcaaaacccaggatctacaaaatataaaaaacaaaaaattagctgggcatgttggtgtgcacctgttccagctacttggaggctgaggtgggaggatcacttgaacctgggaggtcgaggttgcagtgagctatgattgcaccactgcatcccagcctgggtgacagagcgagaccctgtctcaaaaaataaaaaaaaacaacaaaaaagtttctcaagagggtatggggacgttgcccagtccccccagtcggaagggccagtgggtggagttgggctcactggcctctggagggtccctagcaggccaccccacctcagttaagtcgggactggggagccccatcctgggtactctgtgcaggaaagggggtcccacccacaacccacactcaccctggaaggcagagcctcttctcccataaagcctggcccagcctggagctgaagcccggggccgccacctgagagggcttggttctgtctgtagagcaggggtctgaatagcctggtgccctggaccaggtgacccggctctgtgcactgcacctgctcctatcactgaactctcccacaaggcggggacagacgaagaaactgaggcttgatgagtgaccccactgcagagccccaccgtgggtagggtgccccgacctgcactctggctgctgggctccacggcccagctgtgtgccctgagtggtatcctggggacgatgccacacaaagcctgcggagccgtaccgtgcctgacacctgggaagccccaggccagcggttagttaccacaagggctggcacagcccaagcctgatgcctcccttgaccgccagccccacgcagcactcagccacacggagctccatgagatgcctgccatgacaggcgccacaaacctttcctt

SEQ ID NO: 1883832 - DNA, 4001 bp, Homo sapiens; identical to SEQ ID NO: 588867

SEQ ID NO: 1883833 - DNA, 4001 bp, Homo sapiens; identical to SEQ ID NO: 588869

SEQ ID NO: 1883834 - DNA, 4001 bp, Homo sapiens; identical to SEQ ID NO: 588872

SEQ ID NO: 1883835 - DNA, 4001 bp, Homo sapiens; identical to SEQ ID NO: 588877

SEQ ID NO: 1883836 - DNA, 4001 bp, Homo sapiens
gataaagaagtttgttctttggggctttggatagggtgggaaaaaaaaaacataaggtacctatgagaaatcaaaactgcagccctgcaacagatctaaatatacaatatttgcataattcaggagccacaaactgagaaattatcatttgaaaatgcttcagatctttaagagctacggtatgctggcagaagcaaatgcataattgtctaaagggactcttttgcaactaagggtgtaagagagtcccataaacaaaaccatcccactgaagaagagcaccacatgaggaaataaatcactgagtaagagtcagtggaggtcgtaaacaagagttaggaactgaaaagctaaaaataacagaactaacagaaaagaagataaaataaagacatataacttgattaaaaggacaaaataatagaaatcataatgaaagaagaggcagaattcacaaagaaccaaacagaacatgtattttagaaaacaatattgtcactgacattaaaatgaatgggtctaaccagtcccactgggtgaatgaatataataacctccttttctattcctcattttaaattatacttagctgtgtttctttgcaagtttgtcaaacaggttatattcggtgaacccacagttcaaataatatggcgttagaaataaaatacagtcatgcgttgcctaacgacgagatacgttctgagaaacgcctcattaggcaatttcattgttgtgcaaacatcatgaagtatacttaacacaaacctacatattatagccttatgattctagactacaaacttttatagcatattactgtactgaataatgtaggtaactataacacaatgttgtgtttgtgtttctaaacagaaagggtagtatgttgcactacgatgttacaacatcactaagcaacaggaattatccattataatcttaagggaccacagtcacataatgtaatcagacattgaaatattatgtggtgcacgagtgtattcaaaaagtgctgccaggccactgccctccagcctgagacagagtgagactccttctctgaaaaaataaaagtgctgctagtcaatccaatgtaaaaatataaacttcctgtcattatcaattcatttccttgaacctaaaaataatctctcaacaaaatgagtcttccttacttctgcggtaaagtcctttctttttttcttgtcctttgttccaaggagaaaggattcactcgggtccctgtgagaagagcttctttagcactctaaaattagaaaagtatacccaggagagagcaggttccttccagttccctaggagagtagagcaccaaatatttctcctaggtcttgctttgtggctgtatgtgtgtccttgctggtactgatgatgccttccatataaggactcagactccactagctgccagatttctgcttgaaacactgcccgctagcgttgaagctttcaaacgattttaatccatggtgatgaagcaagaacagtgttttctgtacactgcatctaccctatactctctgtttctacccctcacatctccaaattagggggcttcactggctttgtgccttggttttttccactcacctgtgtgatctcaggaggcagagtttcaagttagtcatcagtgatttcctcaagtccatttgtcttatatttagcagcaattccttagtgcttctggcacgcaataagactaaaactgagagatctccacctttataagcatttttcattttaatcaatggtcttaatgggagtagttagatctgcacattcttctaaccacccaggagtccttatccaacaacagtgcacttgtgtatgttttcatccatgtgacgtaagtgtatcagctagttgttaaagtgcaaagactaacagtctgtcttaacacatatttccataccaaaaaatcactttatttcacaacgtgacaaagtccacattaggatttgttggcaaattaaaattctttactcacaaaatgataaaaggaaggagacacagctcaaagttaatgtgtaagagttaacagaatcaatacaagtgaatagctgtggagcccaggggatgcaggaatcaaggcagacaaagatatctgttgaattaaattaatgttaggtcactacccatggttgacatcacagaagtggataagcataccagagtaaacaaaggaatcctttcttaaacaaaaaacccatacaacttattttactcccttatcgagaaatattttcaaaatataagcccattcctggtaggttaagaccaattcagatgactgcattgccattccagggccaagaaagcaactttaaaaacatgacctacgctatggtctaaatgtgtccctcaaaatgcacattttgaaatcctaactcccgaactgacggttttagcaagtggcatcttgggaagtgaggaatgggattaaggtccttataaaataggcccaagcgagggcctctgcctctccaccatgcgaggacagagccagaaggtgctatccactaaagagaaagcacccctccctagacacaccttattctgtgacattccagccttcagaaatgtgaagaataaacttctgtggttcataaactacccagtctaggatattttgttatggaagcccaaaaggatcaagccattccaaaatagcattgttgcccacaccatctttttgaacctcacttagggtaacaccatacccattcggagttaagcccttcctaactcttaagtatcaacgtgcttggaaacgtgagcaatcctgacacgttttttcttcctaaagaacaatacatactaataataggatcggctaataatactagattctatgcatgaagcctagtatttaaaagcatgcaatctggagctagaccgcctgggaacaaatcccagcttactagacaagctgtttaaccttttacttggtctcatttaactcatttgtaaaacgagggcaatttctgatttcatagggttgctacgtggattttaaaaagccccttgcaatatagcctaatattcagaactcaataacatgaactgtcttaaaaggtttccagaaaaaatccccaacaggttaggtcggcttatcattacaacgctttccggtataagggagatgaatagctatttagcaccacacaatttctcctctgggctcggaacagctctcggtagactacgatccctttccgacgtggaaacttcagataaaaacgctccccgaggtccgaggccagtacggggcggagccaggacgcgggccagagtcccccgaaggacggtgcctctctggccccaagaagtacagcttttattttgcagcaatctgagccaacccgagaagattctgaagcttccaaaacagaaccgacgagaacactcatagaatgcctctccacttcctaactgtcgctttgaggagagaaaagtaagccacagccagcaccgcagactggagaaggcggagtctgcagtgtgcctaacgcgaactagagggaccgaggcggggcggggctggcgaagcgcgaggacccggggccgaggtgtggggctgaccatagagtgccggacgccggtgtgaacatacactatctgctcctgtagtgcccaggcccctgccggggagtccccggagctaccattatcgagactctcattctattgccctgcggctttaatccttcgagtgtaggggaaaaattgaaccctaaagacaggcagctcctaggcaccagcacaggaaataagcaatggaggtggggtcctttgctcgcgccgaaattcaaaggaataaatagttccggcgcgggtgttgagagcggtgtggcaggtgttgtagccgctatggtgaagttcgctttgtagcggccccggctagagagttgttctgttccctgcctttgtgacccggaggagcttttggggtgcgtcaagcccctggcctgaggcag

SEQ ID NO: 1883837 - DNA, 4001 bp, Homo sapiens
cacttggtgccctctaatccattttccacacagcaaccagaattattatttaaaaactttaaggccaggcacagtggctcatgcctgtagtgccagcacttcgggacaccgaggtgggcggatcacttgaggtcaggagttacagaccagcctggccaaaatggtgaaacctcgtctctactaaaaatacaaaaattagccaggtgtggtggcatgcacctgtaatcccagctactcgggaggctgaggcagaagaaccgcttgaacgagggaggcagagtttgcagtgaactgaggtggcactactgcactccagcctgggcgactgggtgagactctgtctcaaaaaaatcaaataaaaaaaatcaaataaaaaaattaaaagctttagtcagaacatggccctctcctgcttaaaactttgcaatggcttcccattgctttaaaaataaaattcaggcttttccacgatggacaaggttctgctctgcaaccttgttcactgctctgcagcaacactggccttcccacctcagagcttttgtccttactggtatgttccagcaaaattcttttgcctggggtgctcttttctcagatcgtcacagtttcttctcgtccttcagagtttatcttaaacaccaccacctctctaagaggccttccgtacctcccacccatcaggttcattttgttttcttcctaacacctgtcacagtctgacattatgctaatcatttgttgtgtcagccttaagtagtgaaattcagaaaatatcattaagtatagagtttattctaacgcaaagcttgaggacagccacctggaaacaccaactccaaacaaatagggtcaatgttccaaagtgaagttaaggtttcatttacacaggcagaaacagagaaggttcagcaggagtacattttcaatacaagagcagtgcataaattacagcgattagattagttatagatagctacattccaaggaagataactatattaatttatgaagggggtagtgatctgagggggtcttacctctgtctctgtttggtcttcctgattataggaaaaaacaaggcagacattgcagctgtatgccatgggactcaggccccatcgccacattcttcgcaaggctcagaataatttaaagttccaacagctttaagtttgaattatttaatttcacagttgattcacttgttcttttcctgtctcccacaatagaaaataagctcccagggatgcaaccttggcaggctcctaaactgccacggctccagtttcttgtagattagatattcactgttggttaaatgaaagaagttctagacaggcctcggtgtgctgcctcctctttaacgagagggcttactagatgaatgtgagcagacggaagcagaacaccctcttaatgaaggcagcgcattccagctcagggatttctagaaacctcgggggcggaagtttaaccagagaattaggaggcaaggggaagagtagcaatgaggttaacctgtgcagtgtagtcatttcacgagtttgagaacgcctagcacgatgccttaacggagcgtcgggcacagagtcatttgggaggatttctttttcggatttttgagacaggaacctgatttgaagcaacagggaagaacaccaagaggacgaagagccaacgacgggcgtgcccgggagctctcacctggaaggggtgggagcaagcagggcctgacgtcctcccgccttggcggccgtggacgccccaggtgccacccacagcagcctcccaccacacatgactgaggctcgggaagcaataaagtggctttcaaaatactaaacgcaattgagattttttcctgagttaaaacaaaaaaaaaaaggaactgaatgccgaaatatacggagaagaaactccagttgccacgtccccgaacgtctccacccagtcctgcctgctgtttcgccctcagtctgggcctcgcacagcgcggcggagcgcgggaggggcggggcgggcctgctgacgtcgccggacctgaactgcgcaggcgcggcgcgagatcgcgggagcgagcgcgcggtaacagttcgcggcagttcgcgcgggagcggggcgcctgggtggatgggcgcttgggcgcctgggctgccggacggtgggaacggaagtcgctgtgggacgctgaggaagccaggatggcgactccgagcaagaagacgtcaactccaagcccccagccttccaagagagctctcccgagagacccttcgtcggaggtcccgagcaagaggaagaattcggccccgcagctgccgctgttgcagtcgtccgggcctttcgtggaaggctctatcgtccgcatctcgatggagaacttcctgtaagttgcccggaggccgcgccgcgggtgtggaggtgtgctggccagcaggccccggggctccggcagcgcgcgggcgtgggcgtgtgggtgtgtacctggcttgtgggtctggccttgaattcgtgccggggttcccttgaggattttcctacgtaggctgtggagattgacgtgtatgatgtaggagatgtgtgccttgggtgatgtggtttttaaatttagtcagccaaggttttccaaaggtgtcatgtagcaggtagtggttgtaggagggagtaggtctctgcccgctgggagtcgcgatccatagcggccctggtctggaattcacagaagtattgtccccgggaacttaagaggaggcaacagttaattcggcgtgatagtgatgctgtggcggattcttagggtaggcatttgccagagaggagtagataagacggtaaaggttgttcgggaatggaggttacaggtacaaaaaaattaaacacttactggcaattgttggacctccctacaaacccttgaccccactaaacccagttttcttccctggttcctccctctccccttcagacaactagttaccgctttagaatttagtaagttttaaatatatcatgtatttgcctagcaccttccagttcatttgttccaggtctttttttttttttttttcctctttttttttgagacggagttgcgctcctgtagcccacgctggatggagtgctgtgccgcgatctcggcccactgcaacttccgcctctcggtttcaagcgattcttctgggtcagcctcccgagtagctgggactacaggcgcgcgccaccacgcccggctagtttttgtttttgagacggagtgtcatactgtcgtccgggctggaaggtagtggcgcaatctcggctcactgcaacctccgcctcccagtttcaatcaattctcctgcctcagcctcccgcgtagctgggattacagccagccgccaccacgcccagctatttttttttgtattttagtagactcgcggtttcaccgtgttgaccaggctgatctggaacttttgacctcaggtgatctgcccgcctcggcctcccgtagtgctgggattacaggcgtgagccaccatgtccggccggaagtctttttaaagcttgcacatagtggcataaggataacagaattgtaataacaatactacctttttttttcaagcacctattgtgtgccaggtacatagtgcactcattctttcttcataacaactctatcttgataatttccattgctgaaagaagctcagtaggttattttgcccagttttacgcagctgttacatagttgcattgctatttgaatccagatcaggaaagataaatgtaatcaaatgagttagataccataacaacatatatcaggatccttcacaaaggatgaagtggttagttttgtctacgagtatgagaaagggctttgtaaagaagatatgaaagtctttggtcttgctctgttgcccacgctggagctcagtggcatgatcagggctccgtgaagcctggacctccccttctcaagtgatcctcctacctcagcctttcaagtagct

SEQ ID NO: 1883838 - DNA, 4001 bp, Homo sapiens
gaggccacaggcacagcagagcaactgtctgtggtgccaacaggtccaggacagcatccgcagggcagccgctcacacgcacccggcaggcagggaaggagggcaagcctccgcctcacctcttacctggatcagggctggtgctggtcagcctggtcactctggccagtgctcacactggaagtccatcacaggcgaagtcacctccttcccgtgttaaataacaagaatgcttggcaaagaatcaagaacacaagcggctgccgttactgctattaaccgagacgccagcaaacccttccccagtcctgtcctgcgtgatcctgacacggtgtacggcatgatccagcgcgtacctcacctgacctgaccgatcctcacaggttcttaaaactcactcatgaaggctgctcctggtgaaggcaccctccaccttcccactatcccttcagacccctagaggccagcctagcccagcgcgagagttagaaagcccactcacagggcccaccctctctcccagataccagcgaaggaaaacagatgcctgtccacaaaacaggagtgtgagactatcaaacattcaaacgttcacggggcagaacgctgagcgtagacatagcctctctaatctctgccacctaatgacacagatgtgacacggcagccacagctgcaacgcctctaggggcagtgtcctgttgaagactaaataatccgtttttactcccctggagacagcttctagcctcaatgtgaacacaagaccgactggtccctccagtcacttaagatgttgcacaggagggcttagttacattggaggattgaccctgttccagctccaatgcaccaacttacccaacaccccacgcacgtgtcatctccagtgagcagacgtcctagagaaaaaaagaaaccgcaattttgtataaatcttgcaaacaccacagaggagcatcacataaacactgcgttttttgggaggccgaggcgggcagatcacttgaggtcaggagttcaaaaccagcctggccaacacggtgaaacccgtctctctaaaaaaaaaaaaaaaaaaagttagctggcctagtggctggcgcctgtaatcccagctactctggaggctgaagcaggaaagtcgcttgaacccaggaggcagaggtggtagtgagctgagatcgcgccactgcactccagcctgggcaactgagactctgtctcgaaaagaaaaagactgcgttttgctgcatctggtctccaggaaggcggaccaaagaagctccctgccaccaaaaagctcactgtcacaagggccgttctagaaaaatccgacccatgttactctctccccttactctacgcttaatttgcgggaggggaagttggagttacaacacagtggccacgaaacgcgggctgctgatcccctgcaggtatcaagggaccaggaccacgaggcggaatgcccaccagacaaccgagcagtcctcctcccgccagaacagcctcccgctgagcagccacagtgacaaggaaaccacctgacgcagcataagaaatcaatttttcaaagatgccgacaaacatcttcccacagcctgagcgactcagggaagcagcggcaggagcggaagggtcgtgggtgaacggggtgcctttctctaagatccgaattcgcgcactcagctctcaccaggcttcccgaagcttcctggctggaaaccgcgcagggccggcagcgccctctccaccaagggacacaccagcggcgcctcctccgcggcccgggcccccatcccgcggctcgcgcggccaggacgccccaggtcggagcctgcccccaccccgcacccggaggccagcagcccagtcccctaggccgcgcagcgccagcgagagcgaggctgcagggcgaggcccggtgaggcgctcgagaactggccgggaggagaagtcaggcggcccacccgccacggcagcctccggcgcacgcagaggacgagaagggaagcgccgcgccttttatagcgcgtacggcggcccgcaagagtcaatccgccccgcccaagcagcgccccccagcggtccccggccgttcagctccccgcgcccgcacgtgggcgctgctcagtggctggcgggcgggcgtgtgggttcgccacgcagagcagcggcagcgccgtgacccgtgtcctgcaccgcgaccgccccacggggccagcagccagggccgcgccgtttccgacccgccgggtgccgggcacgccacggacacgcgcggctccccgttttcgcggaggattcccaggccgggtcaggaggacgctccacgagcccgtgggtcccggtggtcccagccattggggcggctcccgtgactgtcgagcagcgcccaccccgggcagcatggggctcccgcgacgcgctccgtcccttccccaccaggggctctgccggtgtcggccatgggcgcgggtacacaccaggcgcctaatgagtgctgaggcgggcgagggtcccggcaggcgggattaccgcggccaggcctgactagcgccctgtctgcgctgtgtcctgggacctcggtcaccgcgcagggcgggacaccgaggcctcgcggccaagcgactcgccgcggtcgccgggctgcgaacggtggagccgccgggactcggaccaggacgcgagctccagagcaggggatgacaggcctgagccgcaggggccgggaggaaggccgcgctgctgtcctggggctgggcagcctccgcattgcacagcgcagaccgctctagccttaggcctggaggggacaccaggagatgaggcttctggctcagcctgctctctgcagccacaggcaaaggccaggaaggccggggtgcgggagctggcataggagctggctccagctcgggtactggcttagagggagcaggagctggtgataaattcaactcaaattttcattgcctttgcaaagccagaaaacaccccagggctcctaagaaaagccccagcgcaggaccccaggacactttgcaactgggctgcaactgcgcggtctgaggctcctccctgtgtggccccaccagcaggctgggttctagctctggtgttggggctggagctggcaccacagcaggctccacctccagagatggtgcaggctctgtcctagcactgacacggttgttggagacaagctggctctgccccggggaccgatgctctggagctgcctctagctgtgttgctgttgctagtctttgccctgggaaaagtgtcagagctggtcctagctctggatatggtgctagagctggttcttgattggatttcgctctagagctggcaggaactctggctctcgttctgaagctggtgcaggtctgagatggctgtagctctggagctgcctctaattctggttctggttgtggaatcagccatcgctttatatctggtgccagctctggctctggaggtggtgctgcagctggcccttcctctgaacctggcactggcttgaggtctacacctggaactggctgaaactctggaagtggttttggagccggtgcccgagcagtcaccggaggtggcaccagatttggtgatagagctgcctctgtttctggagtaggtggtagagctggtgcggcagctggagtgagatctggagttgtgctggctgtggccatagttcttgagctggtacaggaacccgcactggtgtgagccgcggtgctgaagctgggcctgtagctgatgctggccctggctctttttctgaacctgatgctgatatttggccctaaccatgcaaatggttttggaactggtcctggctagagggcggatgctggagctatagtggagccggcacagaagtgaccagagctgcccctgtctctgggtgtgctgctggagctgttgctggagctggctctgatcctggaactagcacccgagttgtagccggagctggctctacc

SEQ ID NO: 1883839 - DNA, 4001 bp, Homo sapiens
ggaatacacagcaacacccaggcaggggcagcggctgcccccatgccagcctgcccatccctgtaatgacagcagggcaggagatgcagctgtggccctgggggcaggtgggctctgaggctgcaaacaccctgagtgccagtggtcccagagggggtgaggcctctatctgtacctttattccagccagcctcctggcacagggctgggcccacatcctggcctctgcatctgaaaaacaaacaaggacagtgatgcagaccagggttctttaacccggattcaccaaatgaccctcagggaacccaatttatgaaatcccgaaactgtacttttttttttttttttttttttgagacagagtcccactctgttgtccaggctggagtgcagtggtgcgatctcggctcactgcaacctctgcctcccgggttcaagcgattctcctgcctcagcctcccaaatagctgggattacaggcttgcgccaccacacctggctaatttttgtatttttagtagagatggggtttcaggcagttggccaggctggtctcgaactcctgacctcaggtgatccacatgcattggcctcccagagtgctgggattacaggcctgagccaccgcgccaggcctccagaaagtgtattttgaagttatctttcttgatactgtctcttagcaggagtctgacactggcactgctgacatttgggccacatcactcttcactacggggcgtcccaggcactgcaggacatgcagctgcgtctttggcctctgtacccccattgctacccattttggggagaggattcctgtttccaaagtgacccagacacatctctgggcaaggcagctcctgacccctacccagggcccttcctttgtgcacaggagttgcagccccgcccccgcccccctgggatgactagtgctggacaaggaacagcctgtttatccagctcgactgttcttaatcaaacttgcctaaggcctcccagacagacctacagaatcgtttccagaacgaggcctgggagtgagacgcacactcctggtaaccccacaagtgcccgagcttcagatacacacacagctcatttatacatatctacacctcagggttcccagcgatgttgctgcccctccctcatggagcaaaccaggtaaggtggtttccaaaagcgaaaatccaaatgctgcctggctttggttgcaagtaatgtcaggccataaaccattctcagtgcccactggttcccgagcactgagtgtagaaatcgccactttctctttgccccgaggccacaggcacagcagagcaactgtctgtggtgccaacaggtccaggacagcatccgcagggcagccgctcacacgcacccggcaggcagggaaggagggcaagcctccgcctcacctcttacctggatcagggctggtgctggtcagcctggtcactctggccagtgctcacactggaagtccatcacaggcgaagtcacctccttcccgtgttaaataacaagaatgcttggcaaagaatcaagaacacaagcggctgccgttactgctattaaccgagacgccagcaaacccttccccagtcctgtcctgcgtgatcctgacacggtgtacggcatgatccagcgcgtacctcacctgacctgaccgatcctcacaggttcttaaaactcactcatgaaggctgctcctggtgaaggcaccctccaccttcccactatcccttcagacccctagaggccagcctagcccagcgcgagagttagaaagcccactcacagggcccaccctctctcccagataccagcgaaggaaaacagatgcctgtccacaaaacaggagtgtgagactatcaaacattcaaacgttcacggggcagaacgctgagcgtagacatagcctctctaatctctgccacctaatgacacagatgtgacacggcagccacagctgcaacgcctctaggggcagtgtcctgttgaagactaaataatccgtttttactcccctggagacagcttctagcctcaatgtgaacacaagaccgactggtccctccagtcacttaagatgttgcacaggagggcttagttacattggaggattgaccctgttccagctccaatgcaccaacttacccaacaccccacgcacgtgtcatctccagtgagcagacgtcctagagaaaaaaagaaaccgcaattttgtataaatcttgcaaacaccacagaggagcatcacataaacactgcgttttttgggaggccgaggcgggcagatcacttgaggtcaggagttcaaaaccagcctggccaacacggtgaaacccgtctctctaaaaaaaaaaaaaaaaaaagttagctggcctagtggctggcgcctgtaatcccagctactctggaggctgaagcaggaaagtcgcttgaacccaggaggcagaggtggtagtgagctgagatcgcgccactgcactccagcctgggcaactgagactctgtctcgaaaagaaaaagactgcgttttgctgcatctggtctccaggaaggcggaccaaagaagctccctgccaccaaaaagctcactgtcacaagggccgttctagaaaaatccgacccatgttactctctccccttactctacgcttaatttgcgggaggggaagttggagttacaacacagtggccacgaaacgcgggctgctgatcccctgcaggtatcaagggaccaggaccacgaggcggaatgcccaccagacaaccgagcagtcctcctcccgccagaacagcctcccgctgagcagccacagtgacaaggaaaccacctgacgcagcataagaaatcaatttttcaaagatgccgacaaacatcttcccacagcctgagcgactcagggaagcagcggcaggagcggaagggtcgtgggtgaacggggtgcctttctctaagatccgaattcgcgcactcagctctcaccaggcttcccgaagcttcctggctggaaaccgcgcagggccggcagcgccctctccaccaagggacacaccagcggcgcctcctccgcggcccgggcccccatcccgcggctcgcgcggccaggacgccccaggtcggagcctgcccccaccccgcacccggaggccagcagcccagtcccctaggccgcgcagcgccagcgagagcgaggctgcagggcgaggcccggtgaggcgctcgagaactggccgggaggagaagtcaggcggcccacccgccacggcagcctccggcgcacgcagaggacgagaagggaagcgccgcgccttttatagcgcgtacggcggcccgcaagagtcaatccgccccgcccaagcagcgccccccagcggtccccggccgttcagctccccgcgcccgcacgtgggcgctgctcagtggctggcgggcgggcgtgtgggttcgccacgcagagcagcggcagcgccgtgacccgtgtcctgcaccgcgaccgccccacggggccagcagccagggccgcgccgtttccgacccgccgggtgccgggcacgccacggacacgcgcggctccccgttttcgcggaggattcccaggccgggtcaggaggacgctccacgagcccgtgggtcccggtggtcccagccattggggcggctcccgtgactgtcgagcagcgcccaccccgggcagcatggggctcccgcgacgcgctccgtcccttccccaccaggggctctgccggtgtcggccatgggcgcgggtacacaccaggcgcctaatgagtgctgaggcgggcgagggtcccggcaggcgggattaccgcggccaggcctgactagcgccctgtctgcgctgtgtcctgggacctcggtcaccgcgcagggcgggacaccgaggcctcgcggccaagcgactcgccgcggtcgccgggctgcgaacggtggagccgccgggactcggaccaggacgcgagctcca

SEQ ID NO: 1883840 - DNA, 4001 bp, Homo sapiens
gccagggcagttccccaaacacagcggcttctgaaacagtcaatgaccagtaccccccaaacctgggctgtgcacaacagaccaagaaaaaggtgttccagtaagaaaacagatatatgcggtattttaaaaactgattttacaaaatccagccatgagatgtacaactcattccctaggaaacagcccaggaatggccatcttctccagccccgtacgctctccccagtagcccagggcacccagcaaccatcccctaggagaacaggcaaggaccctcgtgggaagatcccaccacagcaacacctttcttcagggcgggctctgctccgcaatgtgtgagtcaagacaatccattccattcaagaccaatttactctcaaattttgccaacacagaaatattatccttaaagaaatgtgcatttaaatcttttaattcacttcatcctgtattttaaaataaatgttttccatatagattttccccttgggggggaaaagaattcagggtcttaggttccaggcagttcaaaaacagccacgcggttcttttttctccaccagaataccacaatagcagaacttaagaatcgggatatgaaaagggaggcgtggtcctggcagtggcccctggccggcaggaatacacagcaacacccaggcaggggcagcggctgcccccatgccagcctgcccatccctgtaatgacagcagggcaggagatgcagctgtggccctgggggcaggtgggctctgaggctgcaaacaccctgagtgccagtggtcccagagggggtgaggcctctatctgtacctttattccagccagcctcctggcacagggctgggcccacatcctggcctctgcatctgaaaaacaaacaaggacagtgatgcagaccagggttctttaacccggattcaccaaatgaccctcagggaacccaatttatgaaatcccgaaactgtacttttttttttttttttttttttgagacagagtcccactctgttgtccaggctggagtgcagtggtgcgatctcggctcactgcaacctctgcctcccgggttcaagcgattctcctgcctcagcctcccaaatagctgggattacaggcttgcgccaccacacctggctaatttttgtatttttagtagagatggggtttcaggcagttggccaggctggtctcgaactcctgacctcaggtgatccacatgcattggcctcccagagtgctgggattacaggcctgagccaccgcgccaggcctccagaaagtgtattttgaagttatctttcttgatactgtctcttagcaggagtctgacactggcactgctgacatttgggccacatcactcttcactacggggcgtcccaggcactgcaggacatgcagctgcgtctttggcctctgtacccccattgctacccattttggggagaggattcctgtttccaaagtgacccagacacatctctgggcaaggcagctcctgacccctacccagggcccttcctttgtgcacaggagttgcagccccgcccccgcccccctgggatgactagtgctggacaaggaacagcctgtttatccagctcgactgttcttaatcaaacttgcctaaggcctcccagacagacctacagaatcgtttccagaacgaggcctgggagtgagacgcacactcctggtaaccccacaagtgcccgagcttcagatacacacacagctcatttatacatatctacacctcagggttcccagcgatgttgctgcccctccctcatggagcaaaccaggtaaggtggtttccaaaagcgaaaatccaaatgctgcctggctttggttgcaagtaatgtcaggccataaaccattctcagtgcccactggttcccgagcactgagtgtagaaatcgccactttctctttgccccgaggccacaggcacagcagagcaactgtctgtggtgccaacaggtccaggacagcatccgcagggcagccgctcacacgcacccggcaggcagggaaggagggcaagcctccgcctcacctcttacctggatcagggctggtgctggtcagcctggtcactctggccagtgctcacactggaagtccatcacaggcgaagtcacctccttcccgtgttaaataacaagaatgcttggcaaagaatcaagaacacaagcggctgccgttactgctattaaccgagacgccagcaaacccttccccagtcctgtcctgcgtgatcctgacacggtgtacggcatgatccagcgcgtacctcacctgacctgaccgatcctcacaggttcttaaaactcactcatgaaggctgctcctggtgaaggcaccctccaccttcccactatcccttcagacccctagaggccagcctagcccagcgcgagagttagaaagcccactcacagggcccaccctctctcccagataccagcgaaggaaaacagatgcctgtccacaaaacaggagtgtgagactatcaaacattcaaacgttcacggggcagaacgctgagcgtagacatagcctctctaatctctgccacctaatgacacagatgtgacacggcagccacagctgcaacgcctctaggggcagtgtcctgttgaagactaaataatccgtttttactcccctggagacagcttctagcctcaatgtgaacacaagaccgactggtccctccagtcacttaagatgttgcacaggagggcttagttacattggaggattgaccctgttccagctccaatgcaccaacttacccaacaccccacgcacgtgtcatctccagtgagcagacgtcctagagaaaaaaagaaaccgcaattttgtataaatcttgcaaacaccacagaggagcatcacataaacactgcgttttttgggaggccgaggcgggcagatcacttgaggtcaggagttcaaaaccagcctggccaacacggtgaaacccgtctctctaaaaaaaaaaaaaaaaaaagttagctggcctagtggctggcgcctgtaatcccagctactctggaggctgaagcaggaaagtcgcttgaacccaggaggcagaggtggtagtgagctgagatcgcgccactgcactccagcctgggcaactgagactctgtctcgaaaagaaaaagactgcgttttgctgcatctggtctccaggaaggcggaccaaagaagctccctgccaccaaaaagctcactgtcacaagggccgttctagaaaaatccgacccatgttactctctccccttactctacgcttaatttgcgggaggggaagttggagttacaacacagtggccacgaaacgcgggctgctgatcccctgcaggtatcaagggaccaggaccacgaggcggaatgcccaccagacaaccgagcagtcctcctcccgccagaacagcctcccgctgagcagccacagtgacaaggaaaccacctgacgcagcataagaaatcaatttttcaaagatgccgacaaacatcttcccacagcctgagcgactcagggaagcagcggcaggagcggaagggtcgtgggtgaacggggtgcctttctctaagatccgaattcgcgcactcagctctcaccaggcttcccgaagcttcctggctggaaaccgcgcagggccggcagcgccctctccaccaagggacacaccagcggcgcctcctccgcggcccgggcccccatcccgcggctcgcgcggccaggacgccccaggtcggagcctgcccccaccccgcacccggaggccagcagcccagtcccctaggccgcgcagcgccagcgagagcgaggctgcagggcgaggcccggtgaggcgctcgagaactggccgggaggagaagtcaggcggcccacccgccacggcagcctccggcgcacgcagaggacgagaagggaagcgccgcgccttttatagcgcgtacggcggcccgcaagagt

SEQ ID NO: 1883841 - DNA, 4001 bp, Homo sapiens
aggtagttagtcttttccacttaaggcagttctccaacctgaggtgacataaaagcactgatctagagacactggcaaaaactaatgtgcaaagaaatgagtcatataggggaaatcaatttctctgggctacaacttccaactccctttactccagtacccagaatcctctcccaggtggtgcttcaagctgctcaggagtgctttagggttcatcgcaaaacaaaagggagtgatgaacacaggctctataaagttcatcagaaggaacagaactgtgggaagatgagacttgagaaacgtgagacagcagaaaatactttaagccacatgagttcagaggaaaggttggagtaacagtttatagttacttcaacagatgatgtgaacctcactttcacaggaccaaagaattagtccaggactcggagagtggtcaggtcagtggttctgagccctggctgtgcactggaatggctagcaaaatggatcctgggcccccaacccactcataacttcagttggtcggggatggagagctacactccccatgtgttccggttttgttagagcatttcttaggaaaggcttcatgatagtctacaaaaagtgcttcctggccaggcatggtggctcatgcctataatcccaacactttgggaggccaaaggcaggcgtatcaagaggtcaggagttgacctgaccaacatggagaaaccctgtcttttagcacgtgcctgtaatcccagctacttaggaggctgaggctggagaattgcttgaatctagaaggcagaggttgtggtgagccgagattgcaccattgcactccagcctgggcaacgagcgaaactctgtctcaaaaaaaaaaaaaggaaagaaaggcttcctttctgagctcagcccagcccatacagggcagttttgttacccaccacaaggtgcttgttacttctccacaggttctgccaccctgaccccactgaccaccccacaaaggagctagctccctcaaggaagacgccacaccagaaaatccaccagttgtcaaatgatcctttattgaaatgttttcctttgtgcttaactctgtgggaaagaaaaaaaaaatcagtaaaaagtttaaaaggattatcccaccccaccagtaaccatttccaaaacttcccagcttatctctgtgaatacactgggtggcccccctttcacccctactgtaacaatgaaaatgtcacttacggctgggcattccacagcaccactgttgatgtcatcgatgatgtcatgaggatggcggccatcaacattacagcccactgactgggcagtccccaggatctctttaatggttcctttaagtaaagaaatggtggcattggaggtgctggctcagtccctcacaatctgcagatactggggaatactgaaggggttcatagcaggcaatggaaggaatgaggttcctgctcccctaatatagaatatagagttccatctagttccataacccggaatgcaaagcttccatgggtccttgatgcccagattaaacacatccaatttacgatccatcctttcagtcccagaaaactgcaccccatcttgggtctcactgagcacccttcaagtaagaagaatgttatcactcagtgaaaaacacaactacagttatggcggttacatgttgtcctgctcttaccagagagttctctggctaaggatcggtgccgcatctgtcgagcaatgttgacaatctcatcaaaagtgatattcccactgtgtttaactgcagaagaggaaacagcaaaagctcttttaaagtctgaagccaaagcagatcatgtgtccttcatttcatttctaggctgttcccatgctttcggcacagagtcatccacatgaagaacaaccctgtttcctaagctggggtttactatcagctcaccactggattgcaccagccaacagagacctggtcaggtgcagtggcgggtggctgagggcaaaaccaagccttcacaaatctgacatggcagaaactgttttagagaaatgacaagcttaaattgccagggagttaaactgcccagtacctgccacctgtatgtggtctcctgattataggtcattattgctgacatcttcctcccacatgcactgattggggcctgccccacacagggactacatggcacttttttttttttttttgagacggagtctcactgttacccaggctggagtgcagtggcacaatcttggctcactgctacaacctccacctcctgggttcgagtgattctcctgcctcagccgtctgagtagccaggtctacaggcgagcaccaccaggctaattttgtattttttggtggagatggggtttcaccatgttggccaggctggtctcgaactcctgatctcaactgatccacccgcctcagcctcccagtgctgggattacaggtgtgagccacccagcatacgtggcactttttcatactacctggctctagcagccctaaccatatcaacacccaatacccatgtcaaccccaggtttcctttaagggaaaacacagccacatatatcaaacatctcacaaaccattaccaaaaccaaactagggaaaagacaacttactgtttttctgtttctttctgtctcttggtggttccttgagggctttgatgatcagggcagaggcagaaggcaccacctcaatctgcagaagagattcctgagtgaatactccacctccagtgaatactgccatgcacgctggctctcaaaaatcatggccacacactgtccaagtctttgccctaggtccgtactcttgacaaagcctccccaacaaggtgaaatcactctcggctcaccactggtggcagaaatactcttcaggaatcccagagggttgctacctgtccccccaccctcctctcccgaaaccaagcacaagcaaatacctgggcctgtctgttctgaatggtcagtttcactgtaatcctcaggcccttccagtcacccgttgccttggcaatgtcatcaccaactttttttggagactagaaataaaggcatgtaatcaacatggtgtccagaggtgaaccacagccttgaaacctgcccaccacttctcacttggcaacaaaggaagctatctcaagtacctaagggcaccttctcaatcagagcacagctatcaccatagcataaattgggggttggggttcttgtccagaactgtaaactgcagacttggccacaatgtaacctagaccccctcctaagtgcccatgtgcttaaggagggggattttcagccctgctgacattagaatcacctaaggagctttcaaaatactaggctcccatgtcagaccacccacgtccatcttcctggatggaggtctgattatttgctactctgaagttctcctcctctagtaatccttagcctcaacaggaggctaagtgtcccttaagtgccagctaacggccaaggaagaatagttaagatacaggttaaaaaagaccaatggggaagagcatttggggcaggggagcactgtgcaaggattaaataaaggcctaatgaaattcagagaaatccaagaggacagaatgacggggaagccagcagttgctcagcaggcatgagacacagcctgccacattaactgctaggtttacatctacaacacagctggaaacgctcactggatcttcacccacaccccgtttaatctcccaacaacgccatgcccacttcctgacgaggaaatacagatgttggctgcccaatgtctctaagccagtcctaacttcaaaactcccccttgggcccacccctcaggtacactaaagcagcagtggagacacatggagctaattacaatttaaaggcaccaggttcgatttttcacacacgaccttcctaaggtacctagtacttgttcagtggctcaggcctactgagggtgacagtccaagcca

SEQ ID NO: 1883842 - DNA, 4001 bp, Homo sapiens
agctttctttctactttgggaaggacaagactatatatgtacacagcatatgtatgtatgcatacatgtatataaatatatataatgatatgctgatatatacatattttcacatatatatgcttatgtggggatatatatgtgtgtgtgtgtatgtatatatatccacatatcttctatatatagtcatcttgagataagtaacccagcttgttgccgtttccatctcccacatggtgaaccagtctccaagaggtaaaatggattacttaggatgacaccatcctaataggagaccccatcatttgtaacactagggaagggattagcaatattcttctggctcctaaaaggaagtctctcttcttcctcttcttggttgcttctccttcttgcacctcttccttgcccccatctcttctcttacctttgataaataaaagtgtaatgtaacgacatgagggcttccctcctatgcttgtttctctcctatgcttgctgtactccaggactgctgggcctaaaggcacaggcagggcctttctgcctgattctgaaagaccccactgcagatctgtcattcagaccccactgcagatctgtcatttcaggctgctgaaagttggtgtttagggacttactttacccccaatcccctggttttgccatttccttacctcagacattaccctccctattcaaggatgtaggatgtaggtgatggatgatgcttctgagatcattggttctcatttgatagatgggaaaactgaggtccatctaagggcatccaattcaaatggcagatctgcagcaaagctttgaataaaatgcagggaggcccatttccagatcagtgctgtatcatctcttggagcatgctagctctgcatctctcttttgattcacagagtagtcttccattcttgatctctctgccttttttctgatctaagtttgtgccaccatgttaaatgatctttctgggaggaagactatctgggcatgacacttctcagttaaaagttttcagtggctccctggggcctcccagataaagtcccaggaccctggtgatctgacccatctcttcctctacagtctgctctttctgttcatgttcctttgttgccagccacttgaaacttctcacagttcctacaatgttctctccctgttgccttgggacctttacacatcccctttcccttgcccctgggttcactgatgagcttatcttcaaattcagctcaaatgtctcctcttgagggaagttctcatccacatcgtcagcacatttgaatgccatttcctctgtgatcctggaatatttgttcatatccatatttcagcacactcacagcaatcatttattgactgcttactatgcaccgagcaccattctaaacaactgatctggagtatctttttttttttttttttggacaggaagtagaatttattggtgagtattaagagggggcagcacagtggaagccctcatgagtgcagggcccgccacttgtccagagggccacgactggggatgtacttgaccccacagccatcagggatgagctgcttctcagccaccatgtcttcaaattcatcaacattgaacttggtgaagccccacttctttgagatgcggatcttctggtggccaggaaacttgaacttggccctgcgcagggcctcaattacatgctccttgttctgcagcttggtgtggatggacatgataacttggccaatgtgaaccctggtcacagtgccctggggctttccaaaggcacctcgcatgcctgtttggagcctgcactggggtagcgcaaggtcagaaacataaacatacatctgaaaggcctgtttccatggtcccttaaagcaacccatacaacaaacaggctgcatacactaccaagaaagctgctgtttgcagccattgcacaatgggcccccatgaggaaaggaacccagttggcttaattggctgcagatgatctggagtatttcaattattcttcacagcaatgtataagctgagaatgctcacataactatttcagagatggggaaactgaagcccagagatgtcaaataacttgccccaggtcaaagagctggtaagtatcagagctaagattgggttctggcaaatgtctcaaatacatttcatactgctgaaattgcctgtttactcaactctcttacacacaaccataaacttgttgaaggtattaatccctctataacctagcacttagcacagtgacttcattctgtacatggagtgtgcactttgtaaatggccaccgagtgaacaatacaagactctcttctattttattttatagcatgctagacaacaggatagcacagtggcaaaaaacacagactctggagtcagacccaggtcccaattgtagctctaccacttcctggtgcttaaagcaggtcctgttttgcctggtctgtttcacagggctaatgatgataccatatggaaaaatcatgtgtattaaataaagaaatccatagcaagtacaaagcatagcacttggatctcaatagacagtagatactcagtgtttgttataatggccgttatcattcactgtgttccttcccttacccctttctttctttcctctctctttcctgctcaccttaagcaagaggcgtcctctcagcaagactcgtttgggattcgcaaaagctgagagggagcatgacttctctggcccactgagcccagtgccctccttccccaccccatgctgccaccttccagctgtgaaatggtgtccctgctcaactgggccccaaagctgtcagggggctgccaatttcacagttcacaaggctgctgttccccccgattaatggggtgccagcagccatgggcagggctctgataccagtcatatgggctctctctcccctgcccacacttcctgaggaaaagagagcaggccagcctcatgcatatttatgtagggagagaaatgattttgtactgcatgccttccaaaaaaaaaaaaataataagatttcacccaagtcccaggcatttccctgagtgaactcagcatgcttcagggaagaaaacgacacagacacagacacacacacacacacacaaacacataccccacagatgcacacatggcataatgaaaaactgaaaacactttatataccactgatctgagcagagtgttctcacaccaaggatgacccaggagacacaggagatattaaaccctagagcatggacagaattattttgaaattaatccagttccaccctatagctctagggaaattagaacagataaggtccaaatgtagccgggcactcaaggcctgccccaccacctcctaatcactgcttttgtctacagcattcctgacctcagactaagctgttctctgttccttgtataagcaatcactttcggtggtatatgccatagtggggcagaagaaaagctttcatcttagggcaatcccagtccttctgttccagttacagaacgtcttaaaagccacttcagcttgcagtgtctcggtgcccccatctctgtgtcctagaataaactgacccaggcttcctcactgtgtttgagccacattggccttctaggccattaagcaagccaagtttttatttcaagagactcttcctcatattgaaacatcacgttgggccccacaaatacagacaattattatttgtcaattaaaaaataaaacagaacttttaaaaagatcactttctctgttcttcagttcatttggttgaacgctacatacccttctaattccagcttaaatcttccttcctcagaaaggccttcttgaacagccaaattgaggtcaagtatcccctttcttctcccagagcatgcagtatgtttccttcctggcagctttgtgttaattaaattagtaattgtgtgataagttggttcaagtctccagtctcaagtctgatt

SEQ ID NO: 1883843 - DNA, 4001 bp, Homo sapiens
tcatcaataaaccattacctaaacaaggttatagatttttcgcttacatttaggccacaaataattttattttcgtatatggtgtgagggaggggtacatggctattatttaatattcagtaatggtagagacaatgtttccaaaagtaagcaggaaaatcttggaaattctatctagtggtgcaaaaaactcattaataatctgaagaaaaatatctcaaagtagttaagaattttcttacctacactcacatgacagaaatcagttctcttgaagtaacttcatcttctctttgaggaaaactggtaaaacttaaaaaatcttaaagctaaaaagatgagaatctcacattcaaatatagattccagttttccattttaccctttttattgcttattcatgatttttatgaaggatgagccctatacctttctggtttagtccctaatgagagaagtcttaaagtgtctttttaaatgttttgctaataacctcatgcagagatacttgatcaatctatgacttaagtatctagtgagccacccttgagacctttccttctcaaagtctatttatatttacttaacaattctaacaaggtgggtgacgagctttccaagtcagtatcagatcagaaggggataaaattgctaataagggaacaacagagaagataaaaaatcttaagtactcaagaaccacaacagaccagggtaatcaactctacaggaaaagacacctacatacctcaaacagttttgaaagcatcaaaagcatcatagtctaatcaagttattgattcaagttatcatttaaaaaaaagtctgtgacaagtagtatctttcattttcttttaccctcattaatttttcagatgtgtgagtgcctctgagtttaatttaagaaaaaacaggacaagaacagttgggctgtttaactaactgaaatagctatttctgatcacagtatgccattaaaaggtattaaacagaaggtttaaggcattttagatcttcaactcttattataacctctagcctttcaaggaccaaaataagtgtttgtgcatttactgatttatttaggttcattgtgtaccttatcagaggccaactgaaacttatgggattgttatctgaagactaacagacctttagataccaacacattctaatctcttcaaggctggtcctactatggcccacatctatgggagcttattagagatgcagacttaccagcctcacctcgcacctacgagtcagaacctgcattttaacaagatccctaggggatgagcattcacatcaaagtctgaacatcaccactcttgcactgttctaacaattattcaggaatatctatctgaatttttatttttgagaaaataagatttaagctttctgagaagaggatcattccttttttttttttttttttgagacagtggctcactctgtcacctaggctggagtgcagtggcacaatcatggctcactgcagccttgacctccctgggttcaggtgttcctcccagtttagcccgccaagtagctaggactacaggtgtgcaccaccacactcagctttttttttttttttttttggtggggagggggtggtttgtagagacagggttttgccatgttgccctggctggtcttcaactcctaggctaaagcgatcctcttgccctgggctcccaaagggctgggattacaggcatgagccactatgcctggccagctcattcagcttttactgtgttttttagggagtctctactttccccaaagattaagaatcactgcattattacgtcaagcataaacactcagtataacagcattgactattcaggaagaatcatgtaccagcgaccgggctatggcagctgctgaggagaagcagcctccatgcataaatcacaggattgctatggcccatcgaatccactggagagctgtccatgcacaacagcatccagcaaccacagggcagggacagagcaggttaaccttgcacaacaaccttgttgtgcagagggatgccatcccctttgcttccctcttattataatccaggcccttgactcttcgctgctccacaactccttcaggtcaccttaacctcaacttcccgttcagcaatttcgagaccaccctccctgatattaactacatattattcacattacttcatattattttgcctcaatatattttagaaacgcacactaaaaccatgttttgtttaaaatttcataattccttccagaattgcttcccttttaaactactgtattagtggttccaatattcttcccattacttaggcatgacatttttgagtcacccctgacactactcagaagatacacacaaccaattaatcatcaagtcatgtggatcctacctataagcctatttctgttcccccttttcattctcctctaaatccatttctgtttctccttttattctcaggtcttcataatctattaagtcaaatgtaacctgaaagtgggaccgtctcaaacgtttcctcaatttagttatatcctattaacatagactccacaggtatactcatgcaaatgtacaaaatgtgtatacaatgacattcaccgaataattgtttctccaggcaaataactgaaaacaatctaaatattcatggtgactgaagtaaattacggtacatcaataaaataagtatctcgcagccattgaaggtaataaattaagacatataaaaatacgtattgcctatacataaagtcacagctatatcaatttatactatgtatatcattttaaaaagattttactcatttcaaacactacctcattcaaaaaggcgaccataaattcctgaggctggaaacgaacgaacggcaagccccgaagaaacacgctcttttaaaaattaaatcttgtgctactgtttcggggttgtaacgcgtgcgtgaccctcgtctttgagggccggatcctgcagggaagagagggcgtacctgaggggcctcgcgtgcctggacagccccgcgggccagcaagcctaaaagcaactcatccggcgtccacgctgcaaccgggcgcacggaggtgatgcaacgcgctgaaaatgcgggatccagtgaaggagacaggctccgcaccggccaatcagtgcgcgctgcctgacacctgccaacaagccaggcgccgattggtcgcgccggacatgattgcgcccactggctcggatggtgcgacagtggtgcttgctggttttgcgcctccacgtggaaaacgaaccagcgctgagggcggcgctgtgcgtgctgcttgtatccgttgcagtagtgtagaccgaggtctcactcgggttgtgggcacctccgggtaggtgacggcccactgggaaggggcgccgaggtcggggctcatgttcttcatcttgtttgcttttgtcagtatttatctgactggacacttcgtacctaaattgataacgacaaacagcaacttccggagaggtggctttaataattatacttttgggccctgagccgccgaccccaaagccgcttctcctatcataaatggctacgtgaaacgataataacaaaagggaaggaagggtctgacaaccagatttaaaagttttattgtattttacttaaaatgtttccggtaatgaaaacattgcacaaacgatttttttttctttttttgagaagcggtctcattctgtcgcccaggctggagtgcagtggcacggtcatggctcactgcagcctcaacctccccggatcagatgatcctcgcacctcatccctggccaagtagctgggactacaggctagcgccaccacgcccggctaatttttgtattttctgtagcaacggggtcttgctatgttgcctaggctgctgtcaaactcgtgggctcaagcgatctgcttgccttagcctccttaactgttgggattacaggcatgagccactgcacccgg

SEQ ID NO: 1883844 - DNA, 4001 bp, Homo sapiens
ttaaatcaatggagagacttttaaaatgtatacaatacacacatgtgcatacatgcacatacacacaaacacacacagtgcccaaatcccaatcccaaagatgaggacatgttttgttttagagacttgggaaatatcatcatcacttctgttgctgctgttatttactaggttcattattaattattatttggagacaaggtattgctgtcaacccaggctggagggccacagaacaacctcctgggctcaagtgatcctcccatgccagcctctcaagtagctgggattacagtagctatgattacagggcatgtgccatgacaaccagcttattttattttagcaagatgaggcctcgctatgttgccagactggtctcaaattcctggcatctcataatcttccagcctcagcctcccaaagttctgggatttacagggatgagccaccatgccatgcctggcctccccaatgatttttttttttttttttttttttttttttttttgagatagagtttctctcgtcgcccaggctggagtgcaatggcatgatcacggctcgctgcaacctccacctcccgggttcaagtgattctcttgactcagcctcccaagaagctgggattataggcgcccaccactacgcctggctaatttttgtatttttagtagagatggggttttaccacattggccaggctggtctcaaactcctgacctcaggtgatccacccacctcggcctcccaaagtgctggaataacaggtgtgagccaccgcgcccagctcccagtgatttttaaagattagagtagggtcgagaaccactgctctaatacaacgccacacaaacaattcttattctgccttctcatgttggtcattctcatgctggtcactacataaagcaacatatctgaagattgctgtaaaaactcaagtccttcttatcaattcagtggacacacatagatttcagcaagggcattacataattataccagtagcagagggaaaggcggaggaggaaaagactctggtgcgtcaattaaaaatcagggtttttattaggccttctcaaaatagagaagccttgggctgttctacttcaagcactgacaccacctcatataccaatgatactaaaaacaccaagtccccaagcccaacacatgatatggctacacagagtagaaaatactaaggaaaagtttaaatattcaattctcaattttatcagggtaaaacaaacgatttgactcgggagaaaattctgtttctcagcaataaatttcaggaaaaacacagcaacaaactaaaataattatccctagtaagagctgtagttctgcatccatagacctttctaacttccccttgccagctcagaacttcctgtagttgggtaggaacttcagttcaccattctaaagcaacattcttgtataagctatgatctaagcttatacttccataagcctatcttcacagccttcactaacagtttctgaagttccttctggatgggagcttaacacacattggaagtcagtcatacagtactaaatgacactgtttcaataaaaacacatccaaactataagggcctctgttaatcatttggcattttaagaaaatgtagcttattttacggtcttagggggaaaaaaaagcaaaaaatgtaagcgcctaggcagactcagactgtttttacatgattttatagcaagtcaattctgataaactttcgcatttaattggaaaacaagaaattgaatatactaactatagagacataatatgaaacaaaacacaaggaaaacatcattcagaagaaaggggtactttcaatctcaagagtgatcatcagttcaaagaatttgacaaaccataaaaaaatttttatctttgtccaggaaactcaggtagttaaattccacatggaatcatcagatatgtgcttggaaattaccacatcattgttttctggactaagatctactgtagaattttttgatgttttgttttagagacagggtctcgctctgtcacccagcctggagtacagaggcatgatcatggctcactgcaacctcaaactcctgggcacaagtgaccctccaacctcagcctcccaagtaactgagactacaggcacacaacaccacactcagctaatttttgttagtttgcttttttcgtagagacagagttttgcccagtctggtttcaaactcctgggttcaagtaatcctcatgccccagctcccaaagtgctgggattacaggcatgagccatcatgcccggccttactgtagatatttttatatttagaaagtaattataaagcatgtatcatattctagaatacatttgctaatgggtatatttcttaaaatcccacactgaaataaaagtgagttaccaggctctgaggagaacaggagttgacggcagtggagctgccagtccctggtgccatctgattgttgtgttgcgaatttgtgaagacaagggcttggccaaagccctgctgttgggaagtttcaaaggagttggcttctgaggcttgactgtgaggaacaggcttctggagcaaggctaccagatcaatgctaagcagacaaaaagcaatgaggaaccagtcataagcaaatcttaccaacaaatgaatgtgagaagtcaatcaatatatagtgaatttacattaaaaatcaaatgaggagaacctttggaaaatggggtttaagggggcaaaaggagggcatcatccacacaaaagaacataccaagccacagagactgaagcagggttttgcagagaagagaatcaaaaggtgtattgagaaattttcaaagtaatgactaacacattataaactgatttgaaaacctggagcaataaagtaaaattaaacaattttctcaagtttggttcattttacctagaatattttacccatttattacctaaaaccagagttcctaataaatccatatttctagggaatgaagacctcacctgcagtaagcaattcaataagtttcactttttttttttttctaagacagtgtctcactctcttaccaaggctggaatgcagtggtgtgaccctggctcactgcaacctctgcctcccaggcttaagcgattctcgtgcctcagcctcccgagtagctgggattacaggcgtgtgccaccatgcccagctaatttttgtatttttagtagagacagggtttcaccatgttggacaggctggtctcaaactcctgctctcaagtgagctgcctgctttggcctcccaaagtgctggaattacaggcgtgagccaccctacctggccaagtttcatatttatcttaaatttttacattctatcccataatacatttaagtgtgtgtatatacacacacacacacacacacacacacacacacgcccatataattttatctttaaaatattcaggaataaatgcacagtataataacaaatatactgttaaccagaactcttaaaacaccccccagacagatattccaatttggactacctgacaacaatgagctacaaacttcctgtaccaactcttttctaaacttacctagtgtagtaggacctgccagatgcaccgtattacctaaccttgtaatgaatgccattgaatcctttcaaaggccagttcccatcagttctcctaactgacattctcaccatgccaataagacaggcagattacaggacaattcaagactcattcctgacacatggcaaagttcctagcctgagttcctctcccttatagactatagccaagttgaatttcatgacaatgatcccagtaaattcactgaatcataaatacaatagagaatatgtgcatttaacaacaaactccaaacaatctcaaaacaatatactataagacataatcattaatcatttttatttccctacaatgaaatctcatcaccatctcatttagcatgag

SEQ ID NO: 1883845 - DNA, 4001 bp, Homo sapiens
gcaagatgtccccagatggtgcccaggaaatcagaagctcgaaccagatcatgccatcaagacatttcagccaagcaactctagattatcagacactaaaaatcagactgaagccccagctgcatgtgactaagctccaggctccccaagcatggcggaggaagaggaagccgcgcagacacttactgtgtgtgacgtgctcgaggagagggctgcatgtgcagagaggctgctctggtggctggagagcgaactagaagacaaaacagagcgccgtatgtccacctgaacaagtgactccagatgaacaagacgcacgtgggtcagtgagctagattcaaacttatcatagtccctagcacaggaccggcttcagacccatcctcattccttatccccacagagcccagtgatggggtcctggtggacgggaatgactcgccatgaggtctggaaaactccagagccagcttccctcaacgacatccatttgctcctcagatgcgaaaagtgaagacagagttgcactaagaacacggtcatccttgacaatcccattcaatctgtgaacgagggatcaaagttcctatgctcaactccacatgccaattcccatcaaatccacttttgctcctagctaaagagtgatggagaacactcctcagaagacacaggtagcaacgccacccattttcctacaccttgttctaataacatcgtttcttcagccatggaaagttcaagtcagacacctgctcagaaatccatcattctcattccacctcagtgacatgggcccagcgatgcccagagaggctaggctcaggcaccctctggagggtgaagacaggtaggagggagctgctggcctcaccctactcccaggggacccagtgctctgtgccagcagaggcggtacaagcaggcaaggtttccatatctggtggttttaaggaacaacctggccaaaacctaagctacagtcgtaatgcaaaagcccaggacatcacgtcagagacaacaagtgtgctctgttcatgaaagcaaccttctacaggagctccaggacttgccccaaggtacttctcactttgggcccacaccttccccatacctgctaagctgagagagagggctgctagtcaggtcgccagtgtgctgggatgtggacggcagaagtgcagtgcaggaggtggtgctgggcagggagctcacagacgggagggcagagggagggcctgttgtctttggagctggaacagatgaagtagctgtaagaagcagatctgtttatttctaaaaccaatcctaagtgcctgaaaatatgctcaatatcttgtgacatgtcagcctcagttgagacgtccataaagttacattccccaggaaaatgccaagcatatcgccagatagccctttgtctgtcaaacaacactatcaaaggacaccacaccatggtcagctgttcaagatgcagcaaagaataggaaatgacacctttataacccaacctatcctatatggggacatacttttcacacctaaaggaacctaagctgtagatgcatccagaaagaaaaacaggtgctgagcctaatatgtagaattataacgtgaggcaaactcctcaaagggcacagcaagggggagtaagaagctaacaggcaagaccacctacacgtgcttccgccaagtcaggctgactctaccaatgctcacggccaacgtaaggcagattggggttgatgcctatgttgtggagagacacagacacctaacatctgcagtccaactgtccaacacctacttccaaatgcacagtgagcatttccttggtatgtgcttgaatagatgtatctcagagcacataaatgagcttcgtaggcttcagaaaggatgtggagacactcagtcctagctgtggaaagactcagtctcagtgctgtccacacatacaactcagatatgtgcttggaaataaaacatcattgtcttttccagttaggaaagaggagcaaccttgacccttctaaaacccagggaaagcacttgagtctctaaaggaagggcaggtcaaaaacaaacataagcaatgaaagggtcaacttacacctaggtcagttcttacagaggccttctttttattggcagtctcttccatatataaaccttgttcatagataaactgtataaagacaccacagatacacctcacctaaaactaagaccccaaaacataccgccctgggccttgtattatgatgctaacagcttcacaggaagcctctctcaaacaaacaaacaaaatggggagggaaggggaggaggaagtgagggagaagagagtatgggaaatgaaaagtaggttaatgtacactgcttcccagatactttagttctcgacccatgcctagacaaaagaaacctgccactaccactgctagagtcaaaagttcctctgtcatccaacaagctcagaacgaccaacgaatctccaaacagccttggcagcccaacaataccagcaaatgtcaaaccaaaatcctggggctccaaatctgtcattacagtttcaactgaggctcacctcggtctgcttaagttcaatatccgcactcccaggaaatcctatttaaagagtctttctggcttccccacccatttgccttcctgaataaagaaagaaaactactataaaccatcagtcaagctggccaactacagaaaagaagcaattaacggatttacctgcactatctttggtaatcactgagctgttggaagtggcggggggggggggtctcattttctcccaaatgtccacagtgaacatttatctctctttctaagcaacagtccttcaggtcctaaagacaatgagcctatctttcctgaacaagaatagtaaatttttgatttagaagtagtttctttcttttttttttttcttttcagacggagtctcactttgtagcccaagctggctcaagcgattcttgtgcctcagcctcccaagtagctgggattacaggcacgcgccgccaccacacccggctagtttttcgtattttagtagagacagagtttcaccatgttgcccagggtggtctcaaactcctgagcttgggcaatctgcctgccttggccccccaaagcactgggattatgggcatcagccaccccgcctggcccaagcatctttaaaatgcatactgtatgctgcacttgtggtgcagtctgattagggcagaagaatatgagaccaccacctccttcttgctgtggttaagacatttctaataacaccacagccaacacctggtccaaaaacaaaaaagcaaaagggctgctttttaacgaataagccattgaccaactggtgttttccacatcacgtgagctatcctcttcctctgtttggttggcaccagccatgacaagagtagcttgctgctatacttactgtctagtgtctgctgacttcgaccaccaccatgtccattctataaggaaaagaagagaagagaatataaacttacaaaatgaaatcattacctgagtggctttttatactttctacaacatgtagcttaatcaagaaacaattatctcttttattctattttttaataaagggaagataaacaacaaactctcatgcaagaacaaaaatgttcaaaaaaattttttttcacatccccaggttcaggtgatcctcccccttagcctgcctaggagctgggactacaggtgcatcctaccatgcctagctaattcttgtattttctgtagagatggggttttgccatgttgaccaggctggtctccaactcctgggctcaagcaatcctcctgccttggcctccaaaagcacaggattacaggcatgagctaccacacccagacccaaataatttttttttaaaggtaactttttgagatggtgtcttgcgctgtcacccaggctggagtgcaatggcgcatcttagatcactgcaaac

SEQ ID NO: 1883846 - DNA, 4001 bp, Homo sapiens
tttatgtacagaaaactcaacagtgtacatttaacccagtttagtggcaagttctttagcctttgccttttcgagcttggcgatacgagccacagacttaggacccaggacattgccaccccagtgacggcggatctgaaaagacaaaaagaggcagttagcttggcttactgttttctgagattttcaaggttattagttgcgttaattctgtttggctgttccaagctgatcgtcagatagaacttctcataggttaagccagccagttatttgggagaaagatttgtgaatgacagtattttggtgtaaagctgcctcttacctcatcgtatctgtcattgtaattggtcctgatagcttccaccagcttagccaaagcgcctttgtcttccctaaaaggcaggaggggaaacaaaagtgggttttttgccttagtttcccttttagaatgcaaaaataccttttagctcaagacagtcttttgcctcagatgcaatgctgaccacatggtttattcaggtgaagaaattcttaaccatcattggcaaaagttcagataaatatatttcttaaactaaaagattggcctttaaggcaaaaggaaacaactgtgaggcatggattaaatgaactggggggaagtttggggccaggctgtgtacttacgagttcacctgtgtgaaggcgacagtggtgcaggtcttcctgtggactagacgtcccagtcttgcctttcccttgataatgcagtaagggacccccattttacgacacagggcaggcaagaagacaaccagctggaagaaagcattagctgaagactgtattttgaccaaaagcagcaaatttcagttagcttgtaacaattgctcagggttaaaaagctcatggattcgcacttcaaggttgaattcagtgagagattcacatcattgcaagagccacgcatgtgttggatctgtgtcagtactgccctcacccacttcggtcccatcactgacttggcattaggtctactctctcttcctggtactgccagaagcccttgggttagcagtcaacaggcaaacgcacctcgatgggatccacgtcgtgtgcaatcaccaccagctgagctttcttgttctccaccaaggtggtgacggtgttaactcctagaacacacaaccactttgtgagcactcacagggcctgctctagtcacaagaagctgctgggctcagctgctgactcagtgttaaaaagctcggttttactcttcacagtaatttcaggccaagaaattttacatcactgcaacagcccgcccccagtgttcaccctaaggtggggcctactcacctgctcgaaggacaggtggtctcttcgttgggacgtcccctttgccagcagccttcttctcggcccgggccaacagtctctgcttcttctcttgctttgtctctggtctgtacttgtgggccagcttaagcagctgagtagctggaaaaacactcttcagtttaggcttggagtcaaggttctaatccttgtcacttaacacttaataacaaatgctggactgcggtcctgctatatgactataatttaatgacaactgcagttcaagaagcctaagaccatccccctcatgttctggatgaaataaggaatccttgcctgagaaactcctttccacgccacagaacctcacctgtttggcggtccagggcctgggtgaactggttaatcgcaggaggcactttcagccgcttatagaggatggctctctgccgctgcaacctgatatagcggggccatttcacaaagcgggtgaggtctcttttgggctggatgtcctgtcctgagaagtaaagggtgacaccgagtgaggctcaaattccatgtcaagttcatgtctggggccactaggaagggtgttggtgcatcagcgatcttggtggtttaaaatgtcatcaccatctctcagatagcaaatattcttttacatcatctgcacacaaacacctgagaacaaagagcacgatgcttttcctcatctaacaagaagccaaggtgccacgaagtacagcagaattgcagtcctagtacctcgctgcgacactgctactgtacttgtttccagatggctaagctgaattcaaggccactaccatattgagctgaatgctcgctcagcaactcccaatgaaagcaagaagcatgtatcattgcccccgtctctaagagacacaaattaaggactgcgaccactttacacccactaaaacctacaagatacaacacaacccaattaccaccttcccttgagaaaaacatagaccgttttcattctgccgtttgttacttaccaatgccaaaattcttaggccttttctcaaacaggggattcaccactttcttagcctcctgcttcttcacgacagctggggccggagccaccttctttcccttggccttctttcctttcggctgggcagaaagaaaacgtcagttaaaccgccgcctccactcgcttcgtcgggggtagggctcaggctggctcctccaaaacaagggacgctgacagcacctgcctgaactaagctggcgagcagctttctgcaaccccccagcaccacccctcgacaggagcatctcacattcagccgcacaagcatgcagccccgggaaccccgagtggccagagcaaggctaagcccgagaccacgctctcttcgcgtcgcccacccaggagacaccccggactcatgactcctctgagtcgcggccccacaggctctagaagcaacaggggcgggctcagaactcgtcgctcacaaggcctctggagcggcccccagcaagcccgagagacgctagggctccgagccccgcactgcggtgctccaggcctgcgacacccagccctgcgacaccgggaacaacgcattccgctctcggccgcccggggctctagtccatctcaatgtctccgtgccacaccaagtggggctctaatccacctcggtgtctccgtgccacaccgagtggggctctcctagcgccaggaggagcaggaggccctccgaggccgcgcctggaggaggatggcagcggatacagccggaacctggctatagtgccacggaactacagctcactcaccatcttgggcggcgggaggagagagaaaggaaagggaattgtgggtaatatgtatgcggcctcggagatcgcgagagttgataccggcacgggatttcggatttaaagcaacagcattcctataaagctaaaaatcgaggcggggccgagaggctgcggcggctgactaggttttcggaccgcggcgcggcggggaagagagactgcggcgggagggccaggccgtgggagagacgcgggaaagtgcgggtcgcagaggcacttgaccaccccgccctaggccgacccggcggacgcggcgtctggtgtgcgggcgctggggcgggtatgagggtgtggtggggggtggggatggagggggggtgggtgtgtgggcgggagtgggggtgggtgggtgcgtaggcgctggggtcggagatcccctttcctgcgtgtgacttatttcccacaccccgccaaaaatgggcacaaacaatgcgagtgcgtccaggagtccgctcggtcgtgcgccagactccgaacctagggggccccgggccctccctgagcaccgcgcgcaaaggcccggccccagggccaggcaactccagcgccgaggccgtccagtgcggctggagggcagaggccgagaggcgcggcgcggaacttgagccccttgtcccggcgcaccggggaaccatgagggatgttaagcgagggagtggaattaccccccttttttttttcttttggagacgtagtctccccctgtcgcccaggctggagtgcagtggcgcgatctcggctcactgcgacctgtgcttcccgggttcaagcgattctcctgcctcagcctcccgagtagctgggat

SEQ ID NO: 1883847 - DNA, 4001 bp, Homo sapiens
tgccaacttccgtacgttgtggaccagcccatctcggaacaagtagcttttgtgaatactgtccttcctcctaaccctcattgcccagtcactactgtggcttatgttctcacatgtgtatatggcgggtgggaggaggcagcaactcagcaaagaacctaggcaagtactgagcggacaagggcggggatggtcacccaacgtaaaggccatacaggacttccaactggccacgcaaaaatgacagccactaggaagtggtgcagaggctggcaggccagtagggggtggacttgagtctgctgtctccacagagagcacagtccctggaggacccattggagggcaaaccagagttactctgaggaacgagcatctgcagtacatcgtgacctggtgagtccccagcggccctctggcttcctccccttcagcctagcagcctgctaatgctggcttgctttcaacccctaggtatggactctctgcagctacatcctacctgtggtttaagaaattcctacgtgggacacctggtgtgtgacagatcagctgctgaagccctgtccctggataatgcagtatttcaagactgcctttatgctggatcatgtgctactggtataaagttctggccttctaccttaaatgagctcatgactggttcatcataaaatcctggcttggtttcagtccaaagaactttcccaaaacttgatactcaagttacatctctagggaacaaaatgcctggtttaagaatgtatttaagggtgggaagggccgggtgcggtcaggagctcagaccagcctggctaacatggtgaaaccccatctctaccaaaaacacaaatatgggccagccagttgggatgctgaggcaccagaatatcctaaacctgggaggcgaaggttgctttgacatcacaccactgcactccagcctgggcgacagagtgaggctgtgtctcaaaaagatacttgctaaccccaagtaagattcaacccgagatactcaacagacactggctgaaggaaaatttgtattatttcaattatttttatgtacagaaaactcaacagtgtacatttaacccagtttagtggcaagttctttagcctttgccttttcgagcttggcgatacgagccacagacttaggacccaggacattgccaccccagtgacggcggatctgaaaagacaaaaagaggcagttagcttggcttactgttttctgagattttcaaggttattagttgcgttaattctgtttggctgttccaagctgatcgtcagatagaacttctcataggttaagccagccagttatttgggagaaagatttgtgaatgacagtattttggtgtaaagctgcctcttacctcatcgtatctgtcattgtaattggtcctgatagcttccaccagcttagccaaagcgcctttgtcttccctaaaaggcaggaggggaaacaaaagtgggttttttgccttagtttcccttttagaatgcaaaaataccttttagctcaagacagtcttttgcctcagatgcaatgctgaccacatggtttattcaggtgaagaaattcttaaccatcattggcaaaagttcagataaatatatttcttaaactaaaagattggcctttaaggcaaaaggaaacaactgtgaggcatggattaaatgaactggggggaagtttggggccaggctgtgtacttacgagttcacctgtgtgaaggcgacagtggtgcaggtcttcctgtggactagacgtcccagtcttgcctttcccttgataatgcagtaagggacccccattttacgacacagggcaggcaagaagacaaccagctggaagaaagcattagctgaagactgtattttgaccaaaagcagcaaatttcagttagcttgtaacaattgctcagggttaaaaagctcatggattcgcacttcaaggttgaattcagtgagagattcacatcattgcaagagccacgcatgtgttggatctgtgtcagtactgccctcacccacttcggtcccatcactgacttggcattaggtctactctctcttcctggtactgccagaagcccttgggttagcagtcaacaggcaaacgcacctcgatgggatccacgtcgtgtgcaatcaccaccagctgagctttcttgttctccaccaaggtggtgacggtgttaactcctagaacacacaaccactttgtgagcactcacagggcctgctctagtcacaagaagctgctgggctcagctgctgactcagtgttaaaaagctcggttttactcttcacagtaatttcaggccaagaaattttacatcactgcaacagcccgcccccagtgttcaccctaaggtggggcctactcacctgctcgaaggacaggtggtctcttcgttgggacgtcccctttgccagcagccttcttctcggcccgggccaacagtctctgcttcttctcttgctttgtctctggtctgtacttgtgggccagcttaagcagctgagtagctggaaaaacactcttcagtttaggcttggagtcaaggttctaatccttgtcacttaacacttaataacaaatgctggactgcggtcctgctatatgactataatttaatgacaactgcagttcaagaagcctaagaccatccccctcatgttctggatgaaataaggaatccttgcctgagaaactcctttccacgccacagaacctcacctgtttggcggtccagggcctgggtgaactggttaatcgcaggaggcactttcagccgcttatagaggatggctctctgccgctgcaacctgatatagcggggccatttcacaaagcgggtgaggtctcttttgggctggatgtcctgtcctgagaagtaaagggtgacaccgagtgaggctcaaattccatgtcaagttcatgtctggggccactaggaagggtgttggtgcatcagcgatcttggtggtttaaaatgtcatcaccatctctcagatagcaaatattcttttacatcatctgcacacaaacacctgagaacaaagagcacgatgcttttcctcatctaacaagaagccaaggtgccacgaagtacagcagaattgcagtcctagtacctcgctgcgacactgctactgtacttgtttccagatggctaagctgaattcaaggccactaccatattgagctgaatgctcgctcagcaactcccaatgaaagcaagaagcatgtatcattgcccccgtctctaagagacacaaattaaggactgcgaccactttacacccactaaaacctacaagatacaacacaacccaattaccaccttcccttgagaaaaacatagaccgttttcattctgccgtttgttacttaccaatgccaaaattcttaggccttttctcaaacaggggattcaccactttcttagcctcctgcttcttcacgacagctggggccggagccaccttctttcccttggccttctttcctttcggctgggcagaaagaaaacgtcagttaaaccgccgcctccactcgcttcgtcgggggtagggctcaggctggctcctccaaaacaagggacgctgacagcacctgcctgaactaagctggcgagcagctttctgcaaccccccagcaccacccctcgacaggagcatctcacattcagccgcacaagcatgcagccccgggaaccccgagtggccagagcaaggctaagcccgagaccacgctctcttcgcgtcgcccacccaggagacaccccggactcatgactcctctgagtcgcggccccacaggctctagaagcaacaggggcgggctcagaactcgtcgctcacaaggcctctggagcggcccccagcaagcccgagagacgctagggctccgagccccgcactgcggtgctccaggcctgcgacacccagccctgcgacaccgggaacaacgcattccgct

SEQ ID NO: 1883848 - DNA, 4001 bp, Homo sapiens
tgaggaacgagcatctgcagtacatcgtgacctggtgagtccccagcggccctctggcttcctccccttcagcctagcagcctgctaatgctggcttgctttcaacccctaggtatggactctctgcagctacatcctacctgtggtttaagaaattcctacgtgggacacctggtgtgtgacagatcagctgctgaagccctgtccctggataatgcagtatttcaagactgcctttatgctggatcatgtgctactggtataaagttctggccttctaccttaaatgagctcatgactggttcatcataaaatcctggcttggtttcagtccaaagaactttcccaaaacttgatactcaagttacatctctagggaacaaaatgcctggtttaagaatgtatttaagggtgggaagggccgggtgcggtcaggagctcagaccagcctggctaacatggtgaaaccccatctctaccaaaaacacaaatatgggccagccagttgggatgctgaggcaccagaatatcctaaacctgggaggcgaaggttgctttgacatcacaccactgcactccagcctgggcgacagagtgaggctgtgtctcaaaaagatacttgctaaccccaagtaagattcaacccgagatactcaacagacactggctgaaggaaaatttgtattatttcaattatttttatgtacagaaaactcaacagtgtacatttaacccagtttagtggcaagttctttagcctttgccttttcgagcttggcgatacgagccacagacttaggacccaggacattgccaccccagtgacggcggatctgaaaagacaaaaagaggcagttagcttggcttactgttttctgagattttcaaggttattagttgcgttaattctgtttggctgttccaagctgatcgtcagatagaacttctcataggttaagccagccagttatttgggagaaagatttgtgaatgacagtattttggtgtaaagctgcctcttacctcatcgtatctgtcattgtaattggtcctgatagcttccaccagcttagccaaagcgcctttgtcttccctaaaaggcaggaggggaaacaaaagtgggttttttgccttagtttcccttttagaatgcaaaaataccttttagctcaagacagtcttttgcctcagatgcaatgctgaccacatggtttattcaggtgaagaaattcttaaccatcattggcaaaagttcagataaatatatttcttaaactaaaagattggcctttaaggcaaaaggaaacaactgtgaggcatggattaaatgaactggggggaagtttggggccaggctgtgtacttacgagttcacctgtgtgaaggcgacagtggtgcaggtcttcctgtggactagacgtcccagtcttgcctttcccttgataatgcagtaagggacccccattttacgacacagggcaggcaagaagacaaccagctggaagaaagcattagctgaagactgtattttgaccaaaagcagcaaatttcagttagcttgtaacaattgctcagggttaaaaagctcatggattcgcacttcaaggttgaattcagtgagagattcacatcattgcaagagccacgcatgtgttggatctgtgtcagtactgccctcacccacttcggtcccatcactgacttggcattaggtctactctctcttcctggtactgccagaagcccttgggttagcagtcaacaggcaaacgcacctcgatgggatccacgtcgtgtgcaatcaccaccagctgagctttcttgttctccaccaaggtggtgacggtgttaactcctagaacacacaaccactttgtgagcactcacagggcctgctctagtcacaagaagctgctgggctcagctgctgactcagtgttaaaaagctcggttttactcttcacagtaatttcaggccaagaaattttacatcactgcaacagcccgcccccagtgttcaccctaaggtggggcctactcacctgctcgaaggacaggtggtctcttcgttgggacgtcccctttgccagcagccttcttctcggcccgggccaacagtctctgcttcttctcttgctttgtctctggtctgtacttgtgggccagcttaagcagctgagtagctggaaaaacactcttcagtttaggcttggagtcaaggttctaatccttgtcacttaacacttaataacaaatgctggactgcggtcctgctatatgactataatttaatgacaactgcagttcaagaagcctaagaccatccccctcatgttctggatgaaataaggaatccttgcctgagaaactcctttccacgccacagaacctcacctgtttggcggtccagggcctgggtgaactggttaatcgcaggaggcactttcagccgcttatagaggatggctctctgccgctgcaacctgatatagcggggccatttcacaaagcgggtgaggtctcttttgggctggatgtcctgtcctgagaagtaaagggtgacaccgagtgaggctcaaattccatgtcaagttcatgtctggggccactaggaagggtgttggtgcatcagcgatcttggtggtttaaaatgtcatcaccatctctcagatagcaaatattcttttacatcatctgcacacaaacacctgagaacaaagagcacgatgcttttcctcatctaacaagaagccaaggtgccacgaagtacagcagaattgcagtcctagtacctcgctgcgacactgctactgtacttgtttccagatggctaagctgaattcaaggccactaccatattgagctgaatgctcgctcagcaactcccaatgaaagcaagaagcatgtatcattgcccccgtctctaagagacacaaattaaggactgcgaccactttacacccactaaaacctacaagatacaacacaacccaattaccaccttcccttgagaaaaacatagaccgttttcattctgccgtttgttacttaccaatgccaaaattcttaggccttttctcaaacaggggattcaccactttcttagcctcctgcttcttcacgacagctggggccggagccaccttctttcccttggccttctttcctttcggctgggcagaaagaaaacgtcagttaaaccgccgcctccactcgcttcgtcgggggtagggctcaggctggctcctccaaaacaagggacgctgacagcacctgcctgaactaagctggcgagcagctttctgcaaccccccagcaccacccctcgacaggagcatctcacattcagccgcacaagcatgcagccccgggaaccccgagtggccagagcaaggctaagcccgagaccacgctctcttcgcgtcgcccacccaggagacaccccggactcatgactcctctgagtcgcggccccacaggctctagaagcaacaggggcgggctcagaactcgtcgctcacaaggcctctggagcggcccccagcaagcccgagagacgctagggctccgagccccgcactgcggtgctccaggcctgcgacacccagccctgcgacaccgggaacaacgcattccgctctcggccgcccggggctctagtccatctcaatgtctccgtgccacaccaagtggggctctaatccacctcggtgtctccgtgccacaccgagtggggctctcctagcgccaggaggagcaggaggccctccgaggccgcgcctggaggaggatggcagcggatacagccggaacctggctatagtgccacggaactacagctcactcaccatcttgggcggcgggaggagagagaaaggaaagggaattgtgggtaatatgtatgcggcctcggagatcgcgagagttgataccggcacgggatttcggatttaaagcaacagcattcctataaagctaaaaatcgaggcggggccgagagg

SEQ ID NO: 1883849 - DNA, 4001 bp, Homo sapiens
tatgggtgcctgagtgaccatgagtgactgtctttagtcaaaaaccctccccacctgaagtagcactttcattaccctagagtcaccatcctggtaaatagagggttcgttcccaggaagaaagtgaatcctgaaacccggcagaaaggccaggtaagggacatggactcttcctactttagagaaggctctgggagtccaccaggctccatgcaatctcacacaccttcctttatagattgagggagaagtggacctcattgggatggtgaggctgacagaaaccaggcagccttttgtccctgagaacaatccagaaaggaaccactggcattatcgagacctggaagctatggccagaatcacaggcgcagagcccatcttcattgatgccaacttccgtacgttgtggaccagcccatctcggaacaagtagcttttgtgaatactgtccttcctcctaaccctcattgcccagtcactactgtggcttatgttctcacatgtgtatatggcgggtgggaggaggcagcaactcagcaaagaacctaggcaagtactgagcggacaagggcggggatggtcacccaacgtaaaggccatacaggacttccaactggccacgcaaaaatgacagccactaggaagtggtgcagaggctggcaggccagtagggggtggacttgagtctgctgtctccacagagagcacagtccctggaggacccattggagggcaaaccagagttactctgaggaacgagcatctgcagtacatcgtgacctggtgagtccccagcggccctctggcttcctccccttcagcctagcagcctgctaatgctggcttgctttcaacccctaggtatggactctctgcagctacatcctacctgtggtttaagaaattcctacgtgggacacctggtgtgtgacagatcagctgctgaagccctgtccctggataatgcagtatttcaagactgcctttatgctggatcatgtgctactggtataaagttctggccttctaccttaaatgagctcatgactggttcatcataaaatcctggcttggtttcagtccaaagaactttcccaaaacttgatactcaagttacatctctagggaacaaaatgcctggtttaagaatgtatttaagggtgggaagggccgggtgcggtcaggagctcagaccagcctggctaacatggtgaaaccccatctctaccaaaaacacaaatatgggccagccagttgggatgctgaggcaccagaatatcctaaacctgggaggcgaaggttgctttgacatcacaccactgcactccagcctgggcgacagagtgaggctgtgtctcaaaaagatacttgctaaccccaagtaagattcaacccgagatactcaacagacactggctgaaggaaaatttgtattatttcaattatttttatgtacagaaaactcaacagtgtacatttaacccagtttagtggcaagttctttagcctttgccttttcgagcttggcgatacgagccacagacttaggacccaggacattgccaccccagtgacggcggatctgaaaagacaaaaagaggcagttagcttggcttactgttttctgagattttcaaggttattagttgcgttaattctgtttggctgttccaagctgatcgtcagatagaacttctcataggttaagccagccagttatttgggagaaagatttgtgaatgacagtattttggtgtaaagctgcctcttacctcatcgtatctgtcattgtaattggtcctgatagcttccaccagcttagccaaagcgcctttgtcttccctaaaaggcaggaggggaaacaaaagtgggttttttgccttagtttcccttttagaatgcaaaaataccttttagctcaagacagtcttttgcctcagatgcaatgctgaccacatggtttattcaggtgaagaaattcttaaccatcattggcaaaagttcagataaatatatttcttaaactaaaagattggcctttaaggcaaaaggaaacaactgtgaggcatggattaaatgaactggggggaagtttggggccaggctgtgtacttacgagttcacctgtgtgaaggcgacagtggtgcaggtcttcctgtggactagacgtcccagtcttgcctttcccttgataatgcagtaagggacccccattttacgacacagggcaggcaagaagacaaccagctggaagaaagcattagctgaagactgtattttgaccaaaagcagcaaatttcagttagcttgtaacaattgctcagggttaaaaagctcatggattcgcacttcaaggttgaattcagtgagagattcacatcattgcaagagccacgcatgtgttggatctgtgtcagtactgccctcacccacttcggtcccatcactgacttggcattaggtctactctctcttcctggtactgccagaagcccttgggttagcagtcaacaggcaaacgcacctcgatgggatccacgtcgtgtgcaatcaccaccagctgagctttcttgttctccaccaaggtggtgacggtgttaactcctagaacacacaaccactttgtgagcactcacagggcctgctctagtcacaagaagctgctgggctcagctgctgactcagtgttaaaaagctcggttttactcttcacagtaatttcaggccaagaaattttacatcactgcaacagcccgcccccagtgttcaccctaaggtggggcctactcacctgctcgaaggacaggtggtctcttcgttgggacgtcccctttgccagcagccttcttctcggcccgggccaacagtctctgcttcttctcttgctttgtctctggtctgtacttgtgggccagcttaagcagctgagtagctggaaaaacactcttcagtttaggcttggagtcaaggttctaatccttgtcacttaacacttaataacaaatgctggactgcggtcctgctatatgactataatttaatgacaactgcagttcaagaagcctaagaccatccccctcatgttctggatgaaataaggaatccttgcctgagaaactcctttccacgccacagaacctcacctgtttggcggtccagggcctgggtgaactggttaatcgcaggaggcactttcagccgcttatagaggatggctctctgccgctgcaacctgatatagcggggccatttcacaaagcgggtgaggtctcttttgggctggatgtcctgtcctgagaagtaaagggtgacaccgagtgaggctcaaattccatgtcaagttcatgtctggggccactaggaagggtgttggtgcatcagcgatcttggtggtttaaaatgtcatcaccatctctcagatagcaaatattcttttacatcatctgcacacaaacacctgagaacaaagagcacgatgcttttcctcatctaacaagaagccaaggtgccacgaagtacagcagaattgcagtcctagtacctcgctgcgacactgctactgtacttgtttccagatggctaagctgaattcaaggccactaccatattgagctgaatgctcgctcagcaactcccaatgaaagcaagaagcatgtatcattgcccccgtctctaagagacacaaattaaggactgcgaccactttacacccactaaaacctacaagatacaacacaacccaattaccaccttcccttgagaaaaacatagaccgttttcattctgccgtttgttacttaccaatgccaaaattcttaggccttttctcaaacaggggattcaccactttcttagcctcctgcttcttcacgacagctggggccggagccaccttctttcccttggccttctttcctttcggctgggcagaaagaaaacgtcagttaaaccgccgcctccactcgcttcgtcgggggtagggctcaggctggctcctc

SEQ ID NO: 1883850 - DNA, 4001 bp, Homo sapiens
acaagtgaagacatccaggctgtacgaggcacaggacatcagccacaatgactggcagccacactgacggagaagcccgcggtggggaggagacagggagtcaaggggagaggaggaggaaggagcaaggaaaggaggcaagatgacatggaaaagcaaaacacggcccaccacatatcagctcgccccaggcctctcctagagcacagttaacaacggactgaagagtgattcagagcaaactcccacccctccccgccccactggccccaaagcagacaagcaccaaacagctgcaggacgaaggctgcacacagggccaaggccctggctgtgagctgccagctccgcaagctggtacatgagctcacctgaagggctgcaaggagctgaagatctcctgggactgggacacaggaagcccacccctcagtccaagctgagcttgtgcctgcagagatgtgtgaagggagatcgggatctgctgggcagcggcggcctgtgaacgggaaaacggggtcggggaggtaaccgcaaggcccatccaggtggttcttcccctcccacctcccctgcccctctccacatggctgctggaacactgcccaaaattcaaatgccagcatgtcattcctgggcttcccttgctattgggataaagcctataatgaaaaactggtagcaaccccaaaccacagcatatccctaccctggaattctacacagcaacaaaaatggatcctagcacatacgtcaacagaggtgagttccaaaaacataacgctgaatttaacaatgcacaaaaagaaagatacatgcagtctgacccagttatgcaagaaccaaaatcttggtaaccaaacaatacagcagttaagaacatgtttttaaaaagaggtcagcagaggccacatcctccatcagcaagcctgcacttggagcagattctgcctggaagtccactgtcgtggctgtggaggcacatgggtctgaggggcggctagaccatcccaaaggcccagcaccagcattagaggggagacttccaaaaatcaccccttggcagcacagaaagtatgccagtcctgcataaataaccaacgcctgctcatttctaagactacctctttctaatgcatccatgcctgggagtttaggcctttcttctcttcatcagaaggatacctgatcaccaaagaaaattccattttagctaattccccggctaggacacaggagggagaactttgagaaaggaaaactaagcagagtctggagcagccaactccactcctcttccctgtctcgattattcgcttaacaaatgcctcctggctgccgtggcgggccaggtgctggtcaccacatgtgagggggatggaaaaccagacagacaatgagaaatagatgagcaagccaattccgccctgcactggctcctccccaccacccccagccaggccacctggctagctgctgtcacctgttggtaactctgctgctgaggtatcgtttgaggaaccagccggggctgacttgcaaacacatggccatccaggtacaggggcgggaggtggctgcctggaaacagagcggcaaaagggacgtagaagaggatcaagcctcactacttctcaatgtccctgagggaaacagtctacaggtctgctctacccaggggactcagtggggacgagggcgtgtgtacagaggctgctaggttccctgtgtgccggaagcacacgcctgctcacaacacgcctggcacgcacctcagggaacgtagggagggtgcagcgtcagacctaggaggagggaggaggcaggtgggctctggcctacccttcccacctcccactcaccaactaccccagacactcgaaggggcattctactttaaccagggctgccttggtctctcagtcactgtcctcttcatctccctgctattgagtccacagtggagggtcagaaggatctattggaattacatcactgagactggcagctgggccctcaaaacccccacgcttccccttggggacactggcacacgataaggatggcagcaatcaggacaaaagtagctgccagtgactgagggctctgttgatacaaagccctttccaggtaagacctggcctcacgggtgtggccaccccacggagtttcatgtaagagaggagaggacactgtggctcggcaagagctgctcaccagccgaggcgacacggctccagcacatgacccaggtctgactcaaagtcaagcctttgctcgctcctgtcaccagtaggcaggagtgcctcgctgttatcccccagttctgtttcccagcgtggggaagcaggacgtgcacattacctgcagcacatgggagctacgaccactgggcctaaaaacaagttgctacttctacatgctacttaagacaaggccaggaggtgacattcggggctgttaatccgtttttcttgataataaatggagaaggaccccaaggccttgctcaggggatgagatacctggcatagaagcagaaggtgctacagaggccacaggcatgggtggcatggacactccaccgaaggagctgtagttgaccccgctggaggcacccacagaggatggaggctggatgcctgagccagcgccgcctggagagctctgctccggcaaactgggggagttttcccaagccttgcgcgcagactccatcttcagaagcaaggggagggggagggatgaaaattactatcacgctggcagtggacagagccaatctaagctttaggggttcggggactcctcccttctgcctctttgtaagctaaggtactgggtgggccctcacccagctcagggctggtgttaccttcagagtaaggtcggcggtggggaaggacattggggagagaccgatggccctctggatgtgatggtcccgccgcaggatggggatactctgtgttaaccctgcctggagaggaggaaaaggaaaccatggaacacaaacaggtgcagagatggctttgcccaaacccatccatggctctcctgaacacactcaaggctcgtccaaatgtatctatgacttgcccaaacccatccatggcttttcccaaaagcacctacagctccgtgtctatgaattgtccaaatgcatcttcagtattggccacatgtacccaagaccacccagatgaaactgatggcagccaggaccatgactgatctcctggagatggctgcctccatcagtttcctccacacaagtctgcagagagccacccccatatccacactccatagtgccctccagacagggagagccatgtcccggcagtataaatatggactggcagcccgcacacaaacatctggttcagaaggcacctgccacctggcctggagatgccctgggccagacagggaaggctgtgcccctcagcaaactgaaaaagagggctctggtaacagaggctggaaatgcaacagtgcccccgcttcctgcagatccccggtgtccatctgcatgtgacagagaccgcagactctcgagtaaagaacctcgtagagcccagcacttccaaaacattgttttcattcaacacctatgaatattgtacagcactcacattccttggaatcctctgggaaacgctgcccaaatgatactcgttcattcagcatatgcactagcacccacccctgcaggtggtgaggacagagcagtgaaccagatgtcactgcgacagcctcagctgcagccccgagtggccacaacagatgcaactgccagctcctgagcccatggtagagcgccagcaggtcttctggatcacaacagttagattgcaggcggcagggacccttggatggtgagatggggcctcctgaggagggctctcctactcaatctgtgccccttacccctggccacagaaaaggcagcctgagtctgggctcgcacctggcacagaggagacaatggaaccaaa

SEQ ID NO: 1883851 - DNA, 4001 bp, Homo sapiens
ttattataatgattaaaaccaaaaccactctcctgactcctcactcccccaaatttaactggaacacaagtgcatcccagtgctgaaacaccacagtgacacatggcccatagagggaccaggtctctggcggctctccctgggcccagattcttctgagtcactgggccgcagctctggcaactgctcagctacacagcacgcagtccccagggagtggctttacctgtaggtctgtggcgatggcacggggcctcctgaagggacattctgtttactgtcggcaaagtggaagcctttcatctccatctgagagggctagagagaccaagcaggaacaagctgtcatttgaggccctggagacagctggaccacacacttactgaacaacccagggcagaggtggtgagggccatgggaattcccagggaggcatcttatagagcagtggtttttggcaccagggcccagtttcatggaagacaattttcccacagaccagtacagctctgcagcccggggactggggacccctgttctagagaaatctgcaagccctttccctctaagccagactcaagagggcttcttcttagaagcaagaaccatcacaatattttgttctttttaaagtgaagtgggagagccaatgaaacatggccgtccatagcagggcctcctggggagctggggaggaatgctgattcctggccctcagccctcgacatgttcagagtccccaggacctgcctctgtgatggccccacacatggtcaccttcctttctgccctggcagtcccacgccactggctctttctaccacacaggggtacttagcttgctagaaaaagttggtgacacaaggccccctccctagggtcagaggcagatggggtccccttacctctctgctggtgttcaggactggcggctgggacccgggcggaggaatccttcggggggccccaacggagaggctctgcccaggtggcagctgaatagactggggcaggatcagtggctgctgcccggagccgtaccgaggcagtggcatggtcagctgctgggcgacaatgacagtcaggagggggaatgatgctatggagaaaccccaaacgcaccaaagagcgaccgcacatgcacttcagattcatacacttcagaagaactaaagcaaagcctgcataaagcaggacatgctctaatttctactgcagcacaggagagatcgcccaggatttcacaccttcgatggcagaggcacgtcttcttgctggaatagagtaggtggtgagaaaacgggcaagactaagctggctgcaggcatgggaactaacagcgttaagtgtgtctcatccacatctctgctaagggctgcgtctatcttcagccctttctgcctttgtccagcaagtgcttactgaaagcatacaaggtgccaaggaagcggcagggccctgtccaacatgggcctgcacactgccaggatagtgtgtcacacactggacacagctgcaggacactcgggatgcagagcggcataggatctgtgggtgcacaccagatttatgggtgcacacggggcggggtgggcaaggagaggacgagtgaggaaagtcagaagtaatggcgaagccaagtcccaaaagatgaaagctgcatcggacgtatatctctgcattcctttgtacagcacacacgttcaagactcttactgttttgcatcaagtggtggtaaaaacaagactgggctggattccagactgtgggggtcctttgaagcatgctgacaggagaacagggtagctgcagggcctaactaactagaacaagatatgcgaggtggggatgtgggcccagagactgtaaggacaggggaacaggatggggtaggggggctgggccacttttggtctctcagtcactgtcctcttcatctccctgctattgagtccacagtggagggtcagaaggatctattggaattacatcactgagacttgtggtggccagagccgcaaaacaccatgctcctccttggagcaccaaaatggtgcaggatgaaaatgatgggaagatgctgccatttatagagtgctgacttggggtatgatctgacttgcagggaggccaggtaggagtccctacaggagctggacagcatgcaggggtgtggaggggatgagacacagctggattctgaatccttttaaagccagagctgacaggcctgctgaagggtaagggggtgaggtgagggggagcagggagccaaggaggatgtggactggacaagcagaaggaccgggaggaaaatcgagttttgaatatgatgagtcttgagatgccataagacaccatagcagacatgctggaaagtccattggatttgagattcaattccagggacagatctgagctaaagatgtccatttgggagtgaggagaagatgaaggaatttagagccatgactcttgaaacacacccaaagcagggcccacgggcatgctgaccattacagactgggaaggagaggggacagcaaaggagactgaggaggaggcctgaggcagcaggaaagccaggagcgacggcctggaaactgggtgaagaaagtggttcgaggggtgtggggggcgggattacggggtcagcactgcagctcgtctgtgtactgacgggaagggatatctgatgcatgaaagagagggagatgtgctggggcagggccccccaggggcacaggcagcacctaggcagggatgtggccacaggggcttggagactgtcactgctcctgtttcctgggtgacacagaaagggaggtcatgggtgggaggcagcgaggggcaagatgcaagtctgaaaagctgctaggagggtgggggttgactgggagccacagcttggatgaaatgcaaaggccatgtggctcggcagatctgctgatggggaggaagaagccaggccaagggggaggatgacaaaaacatgggtggcagagactgggtgtggtggctaacacctgtaatcccagcactttgggaggccaaggtgggtggctcactgaggtcagcagttcgagatcagcctgacatggtgaaacccccatctctactaaaaatacaaaaattagccggtgggtggtgggcgcctgtaatcccagctactcgggaggctgaggcacgataattgcttgaacccaggagacagagaggttgcagtgagccgagattgcgccactgcactccagcctgggcaacagagcgaaactccatctcaaaaaaaaaaaaaaaaaagaattttggagttgggtcactagagggagtgaattgaaaaagccagaggtgacaactgagagggacactgagagttgagattatgcgagagccacagctactgggagcagccaagcctagacaggagtgcacagagcaggggcccatgtgaacaagggcaccagtggcgaggagggcacaaactgcatggacagggtccatggcacagagacccggggtcatctctgcagacatcaaaaccactaggaactggaacaggagagtggagacagactgcaagccagaccagacaaggagggtgaccttcaaaggtgccaaatactgcccacaggttgacggagaggaagatttctcagcagacactggatgtggtgatggcaccatagcagagtgaagggcttgtcaggcacagtctatggtgtgggcttcaaagctggcgtttcagggaggaaggaagaagaggagtctagaagcatcaacaactacacaaagaggactcttaacccattccacaccctactgcacaagggcagggagaaaggaaggagcccccgtctgggggctgcaggagcaggcagtgcttaggggacagccaggtctcaagaataaagagatggatgaggggccaggggtggtggctcacgcctgtcatcccagccctttgggaggccaaggcgggcagatcactttgaggtcagg

SEQ ID NO: 1883852 - DNA, 4001 bp, Homo sapiens; identical to SEQ ID NO: 1883850

SEQ ID NO: 1883853 - DNA, 4001 bp, Homo sapiens; identical to SEQ ID NO: 1883851

SEQ ID NO: 1883854 - DNA, 4001 bp, Homo sapiens
gcagtggcgccatctcagctcactgcaagctccacttcccgggttcaggccattctccctgcctcagagagctcccaagtagctgggactacaggcgcctgccaccacgcccggctaattttttgtatttttagtagagatggggcttcaccatgttagccaggatggtctcgatctcctgaccttgtgatccgcccgcctcagcctcccaaagtgctgggattatagacatgagccaccgcgcccagccccctgacagcacaatcttatgttatttaacctctttgaatttcagcttggaaacagcaactacattgcaggtggctgtgaggataagaaataatacatgtaaaacattgaatgtagtgaatggctcataataatttattaaatagaagttataagtataaaggattatatcttaacttctttttattttatatttttggagacaagagtcactctgtcgcccaggctggagtgcagtggcgcgatctcggctcactgtagcctccatctcccgggttcaagcgattctcctgactcagccgtctcagtagttgggattacaggcatccaccacaatgcctggctcatttttgtatttttttttttttagtagagatggggtttcaccatgttggccaagctggtctcgaacttctggcctcaagtgatccactcacctcaacctcccaaagtgctgggattacaggcgtgagccactgtgcctggccaggtttatatcttaacttctaaagtacactgaaaagtatcttgaaaattcaaatttcggccaggcacgatggctcacgcctgtaatcccagcactttgggaggccgaggtgggcagatcacctgaggtcaggagtttgagaccagcctggccaacatggtaaaaccctctctacaaaaaatacaaaaattagcagggcgtggtggcacttgcctgtaatcccagttacttgggaggctgaggcaggagaatcacctgaactcaggaggcagaggttgcagtgagctgagatagcgtcactgcactccagcctgggtgacagagtgagactttgtctaaaaaaaaaagaaagaaaattcaaattccataaatttacatatagaaattcaatacagaaaaaaaatgacaatttcccacagtagaaaagaatgagacaaaacgtttggaatcaattatctacatttggtcaaaaatattctgcaataaagtatactcacacccaagataccctctaaactcttggtgtgctatgaaatgtttaccaagtacactaaaaactgggttcctcccaaaagaatagagatgatagaaacttatgagtcacatacggagtccaattaacaaaacagctggttaagatgttcaggatgaaactgagttagagacaacagcagtcagaaatgtaataaatgtacttacctgaggggtctcatggccttttctactataattttgtatgaagtccacaaggccatgaactactgttttaacagctaccattgcattttccagctgctcccaagttggtgaaacagcgtctaaaataagccaccaagggcatgggggttgggggggaagaatgttagcagtaattctcttgtgttattcacctcaaaagtagaaaaaaatataagcaactgagcatattcccacatacctggattagggtctatgtttgcaagaagctctaaatgaggcctcagtctatttaagttagctgggtcacctgttcgttgcaaaacaattgtcaattcctggacactctttgcaaatgactctggagactgtagctaacaaacagaaatgagaatgctttttactttggttcttatgacacatttatactcaaatactttcaatttatcaacatatttaatacgttttcaagtgtcttcagattccacagtaggagtatcagtgatgaattaaattttcacctcagaatctgccctatgaaattcatcattagacacttagaaaacttataagctgtattaactctctgaggtcagaatatagataaatttgagactttgtaagcctcactgcttttatgctagtatcatgtatttgtttccctgttgcatccctttattttgcaagtagaaaaataaaaagaaaataaggataatttataagagtctgacatttaaaaacataggaatctccaactgtttgtgtatagactctttagaatattctaatactcttcaatgtaacagcaatgatagaacatcagcatctctaatttcacaaaccttatcaatgatagactgcatgtgtgatttatgagccaaatcaccatacaaaagagaggaccactgttcaggtgaaatacggagtcctgcttccatggcaatatgaacaatttgggcatcatgttctctgcgtaatgcttcataactccgaaattcctccttcagctgcattagggaagagtcttcatctcttttggtaacctaaaaaatagaaaagagaaaaatcagaattggtctgtgctttctcccttcaactgattcgtttattcctttttcagggagggtgggggatacttacatatcagacaccacagaaataaggtacaaagataagataatgtcctgaccacaaattctttctggaacaaaacagaacttacataactaaatacataatccttgccttcaatgatttcagccactagtaagaaagagaaacttgtaagtagaaaattatagtaaaagttataaggcttgatggcaacaaagaggaaagggaattaaattagggagaagaaagggatttcagaaaaggcttctcccagctgaaagctacatgaattgatttgtgcacaataaacaggagtttcctgagcaaagaaaggtgaggaggccagggatggtggctcatgcctgtaatcccagcactttgagaggccgaggtgggcagatcacttgaagtcaggagtttgagaccagcctggccaacatgacgaaaccccatctcaagaaaaaatacaaaaactagtcaggcatggtggtggcaggcgcctgtactcccacctactcgggaggcagaggttgcagtgagctgagatagcaccacagcactccagcctgagggacagagtgagactccgtctcaaaaaaaaaaaaaaaaaaaggaaaaaagagaagggggagaaatagaatttttaaaagagaaacaagtggtgaaacagaaacatgaaaaagcagagcacatagggttaagatatgatacaggctagagaagaatacaggccattatatactacggcagggaatttggatattattatgaagggaatgtgaaaccactgactttttttgcaggggtggggatggagaggacagggtctttgtcacccaggctggagtgcagtggcacaatctaggctcgctgtagccttgactttctgggctcaagcaatcctctcgctttggcctcccaaagtgctgggattacaggtataaaccactgcacagagctgattgaggatttttaagcatagaagtgacatgatcagatttatgctttaaaaaacatcactttggtaacagtagaggataaagatagacaagcaaggaatccagctaataggtaggcatatattaccactaccacatgataattaagaaattttctagggaggctgaggcaggaggatggcctacgcccaggagttcaaggctgcagtgaactatgatggcaccactgcactccagcctaagcaacagagcaaaagtctgttgctttaaaaaaaaaatgaaaagaagaaatgttctgctaccagagaaattatcatcagggtatttacatagctttaatttctacttaagtagtaaaaaaaactacacattcaaaagatacagagttttacagggcctagtgaggttgtgtgtggaaccagagattaatttcaattgttgccctaagagcatgaaactaaacactatgactatgaggcagctagtgtccaagcctc

SEQ ID NO: 1883855 - DNA, 4001 bp, Homo sapiens
atcatgatgctgacccaggggactgcaggaagcaggaggtccaaagctgcagccaggacgagaacaaagaaaggagggtctgttagcctggcaggggtgggggcccctgaatcctgctacctgtttcacattgccccccacccatgacctcactatgcactctgtagcctctccccagtgcattcaattcacatacccattcctgtggggacccacgcccacaactatagcaggctacaaggaatccctgaagtgaatagaacgtgctaaaaaaaaaaaaaaaaaaaggggggggtgggaacaaggacagaaggggaatgattaatcaccttttcagaatagaaagcaacttcctttcctcttcggcttctctctggaaacttttccggtctgggaaagcagaacagtatgttatatgcaatgaaggtagaggcacatggctcatacagaagtcactctgtggaagacccttgggatattaaactctgatagtcccaagaatcagtagaaaagggcaaatagtcattgataatattcacaagttcacatgtgtatgtggcatcattagtaaagtcctttcacatacattaccccatgtgatgctcaaaaccaccacgtgaaacatagacatcagtggttacctccaggaggaatctgagcatcaaggaagtcaaattacttatgcaaagttgtgagacagaagctctgactccaagtcaaccagtagtccttcctcgatatctaacttggctgcctattgggcaacactcattgctcaggtccatcactaagtcttgcccatggatgggcagagcagggcctctgagcggtgtctcaggtcttatcgctttcccatgagcctgtcttctgagggctctgttttctgagactgtatctagtaactgacattctaagaagtcatgggactgagtcctcatgaaagagacaggaagggtcaccctgaagctcagatagagcaggtcgacattacctttatatgtcccacctttctttctcctcctggctctgccctgatgctgagaatgaaagaaagataatgagaggctaggactcacttatctcactcctctaggaagcacattcattcattatacaagaataatatgactctgtaattaatagaaaagtgttcctgttatcaatttttgaaggtgataaaatatttccaatttttccttctctgaaagactcaaagaggattttgtctgtgcaaaccacacttgatgtattcagttagcagtcctcaaggagggcacagactcagaggccaacagtcacatctgtgctccctcacaggacaagtgtcccgcagacagaactctggttccagcctctgctcagagactatcagcattactcctcttgtcagcccaacatgaaggaagacttggtcaagtgacaggtgacatgggaatctgactcatgatcaaactttaggagagactattctccttcagagagcccacattttctaaataattcaatccaggaccacagaattattgtgttttggattttatcctgtaactcttcaccacagccagataggtagtctatgagcttcatatggaaaccttagtccttctgaacccctacatctgcccaacctcttccatagaagaatgaagttctatcctctcttcagacttcccatctaagacatctctctgaaccacccaaatttatttagaaatgtggaaatgggattgggaaacaacaagagggaatctctcttgggtgttcatccacagttccttaccttttggatatcattatttttcccaagggttgacaaacacagcatcaataccacatagaaaaagtacagcataaacaaccccaacccactcaagtagatgcagttgtggtcaatatccatccaaacaaggtgagtcagggctaagccctgtctcagtatagctgtttagaaaacagaggatattctccatggtttgaatagcatggcttcctaaggcaactgagtgttgtaggtgcccagtcttaactataggcccagacctgcatcacagagcatggaagagtcatagacggtttctgagggtgggggtagcaagaagagaagggtgtgtccacagccctgccttttacccgtccagctgtctccacccctcctgggccctctaggtccctctgtcctaccctgacactctgtttcccaactccatcctttcttcatgtcatatatttaccttagtcgaattttcggtttgttccaacagtaaaccaggtattatccgagtccccctttactgtttggagcccttaacttggaccccaccaactacactgccttgaaagcctgaaatactgcctggaatatttgctgtacccaggctttgctactctcaggatcacatatgtcctcaaatccgtcttatctacagaatgtttttgccttacattaacccagatatgaaactttaatttcctttatacttacttcattttgtgaatgttgaacattacaccaacaaggagacaggagtccagctcagatctgtcccgtgtgctggctttcatgcaatctttttattagaaaaggtttaggaggtggcctctgggattagtaggtgatctgtggaaggaaagaggaggtctgggacatcctcaggcatgcacagttttgtttaacgctacttcatggatcgcatgtgcacattttgggggagttagtttgaaacatggtagaaatttggcctatgacttcagcaagcctgttctggccaactccagttggccttattagttttaatccattttagccggttttttaatcttacaagcagagacatttttggtgttttagcaacttgttgtttaatctgctatcctgtaaactgataatttttgttagtcattggctttttaactctctggggcatggtttaactaataattcattatttaacatcttcaaaactaaaacgagtataaaataaacatatataattaaaacttcaaggttcttgggggtgaatttataacacttatttttctgaagttagtgaagtttaaactgttcaaagacctttggaacatgctctatacacaaacacacatacgcatcgacccaaaaagaagaattcaggcaaaatcaatataaatagagaattcatttgggtgaagcttgaggatcgcaacctgggaacacagatgcaagtcaccctaaatatacgctgtaattagcaccagttacaaatgggtttttaaagttgaaaaagcggacaaggagtgggctgatacaaagttgttatcaggaattctcattggtttacagaagcgacattgattagtgattggctatactttgttaagctatagagtgtgggttatattgtcaaatgtggcattatttggttaatgtctagctacacgtggcaataccaagcagtttcaagagatgaatacatagctcaaggaggaagtagggccatgattgctgtctcattttaatgtctatctaggcctgataacttaaaaggactcacattcctcagataaaattcctttctttatagacacacccacgtacctatagtgtgacaaatcaatcagtattttcaaatccaaaatcaattagttcctcttttatttcaatctcttatttgtcatttggacccacattttctaactgtacctcaaatacacacagtcccagccctcctcatcagtttcataacaagtctatgactcccttcaaccagatacaagttacagtgtccttagctattgtgatgtgccctgtgctgtagctcagtagctaaggtattgccctttcacactggcagtcagatttgattccctacttagaaagtaagttctttctggtttaatatctacatgaccttgtatagtctcttctcctccacaggtgtcttaaattttcctttctctgagcacctgggaggttactttcagtaaagttcaaaagccagaaatatcagccatttggcctggct

SEQ ID NO: 1883856 - DNA, 4001 bp, Homo sapiens; identical to SEQ ID NO: 588916

SEQ ID NO: 1883857 - DNA, 4001 bp, Homo sapiens; identical to SEQ ID NO: 588917

SEQ ID NO: 1883858 - DNA, 4001 bp, Homo sapiens; identical to SEQ ID NO: 588918

SEQ ID NO: 1883859 - DNA, 4001 bp, Homo sapiens; identical to SEQ ID NO: 588921

SEQ ID NO: 1883860 - DNA, 4001 bp, Homo sapiens
ttttagaaatggggtctcactattttgcccaggttggtcttgaatttctagcctcaagcaatcctccctcattggcctcccaaagtgctgagattataggcatgagccatcacgcccagtcttcttctcattacattttaaaattgatgattgttgtttaggagaggtattttatagccatcttattgaattagtttcagtttattccatggattttccaagaaagcaatcaatcataacaccctaagaattttttttaattttctttccaacatatacacttaatgttttgtttggacttgctgggttcagttaggacttcaggaaaatgtcggccagtagtagcaggcctgcccctaacaacttgatgacctagagtacacaaaagaggtccacacaccatatgtttgaatatttaaagattataaatcaagctaaccaacagttagattaaaaggttttggtcgggcatggtggctcacacctgtaatcccagtactttgggaggccgaggcgggcggatcacgaggtcaggagatcaagaccatcctggctaacatggtgaaactctgtctctattaaaaatacaaaaaattagccgggcatgttggcacacgcctgtagtcccagctactcaggaggctgacacaggataatcgcttgaatctgggaggtggaggttgcagtgagctgagatcatgccactgcactccagcctgggcgaaagagcaagactctgtctaaaaaaaaaaaaaaaaaaaaaatgtttatcctactactttgacacacctaacttacagcaaacatacatataacaacttagaagtccaggtccaaatttagaatctttgagtaccacacctcctgattttgtacctgaggaagctttttcagaacttaacacaaatgatcttttatttcaaaagatcttatttcactgatccttgcataaaaaacattttctcacagtattgcctaatactttaatttttctccttagaatcaaaatttgataaatacattctggagctcattgtaaaacaaatatcagtatacattatgtccccaaagaaaatccaaattgcttggtagatttggtgctttgttttagaaattgtctttcaaggctttttaaaggatctacaggcccctaatcttccctgtttacctcctactctactggaagaccctaagaactcagtttccttaactgtggtttgaacatcctgatcacttctgagacaatgccattagtgaatacattctaagcacgtcatctgaatattcacagacatctttttaaaagggctggatctggaagttaggccatgaagagaggaggacctgtgacttggacaaggcttcaaagccggccacctgcttgttcatgtggttgcagctggtctaactggaataacttgggaaggaaattaggacacccagttggagttccagctctgccataagctggctgaactggagtgagtcacttaaaactctttgttaaaccccagagtcataatctataaaatcgggataaagacgtttgccttaagccctccaccagtttttggaggaaaccacaatttgctgagctttaatttttacacctgttgcaattaagatggcactcctgccctgtccacttcacagggcttttggggacgggatggggaggcaccacctttctgagcttcagtttcaaaacagagctaagaatacatgcccaacccgcaaataaaattctaggaagaacagaggaaaacggacaggaaaactgcgaaatgcagtcggccatacaagcatgaattgtcttaaacacaacaagcagacctaaagagcgtttgtgcgtctctctcctcttggctcgagtcacaaccccataacgtaaatcaatatcacttttgaaaaaggctttcgctgttctcagcagcgtccgcatttgtactcacctgtgcgcccccagcgcccggcctgggggccctgcggggcgggggcgggggcgggggcggggcccaaccctgcccacccctcgtgatgccccgccccgtcgctcctgcgcctgcgccgtgcccaccgaccggcctcgagcgccccggcgggaggtaaggggctctctggaggccgcctttgggggcgtcgggccctcacaggcttggtgggcctggcgcccgtgtggcgcgcgcaagaggcgctgggcggcaagtagggcattggatccgaagtgcgagcgccatggtggctcctcctgtttttcagaagtggcggagcctcgcttggtttcgtttttggaagctttattggaagctggtatagggaggccgcagacgatgcgagcaggacggcctcccggggtcgcggggtggaaaagtttccggcgcgcgtcctgtctctggcgcgctgtaggccccgggtcgccagggtcgctggcgtctgggtcccgggacagacccgcgcatccgttcgctggtgggggcgtttggtgtgtgtggcccaggtgtgctgtgggtgacactgcgaggaatgacgcgacgctcgatggtagtgaggctcggaggactgggagcgagaggccggaagcccctgctcgccaaacccagaggtggttggcagaaggtcccacaccttggctccctccttttagctaaccgaggttcagagaggagactttactttgacttttctctccaaattcggtatctcttccataagtcagaaacattaagcggcgggccggaagaaatcgggcgccactagtatcctgaaaagtgggagctctgggccgatggaaggtgttcgtcacttttgggggctgggtttcctgagaaatggggtctttcacttattaataacctcctaagtaacttactgggaaacatgagtattatggtacccatctcatattagttgtaagcactacatgataaagtttgtaaagcacctggcacagtcctggcacccctctctccaagtattaatgcagtgaatacgatggcagttctttgacttctaaatgtttttacctgtcttacgtgaaacatcctcttatactaaaaaacttttttattttgaaataattttaaaattacagaaaagtttcaaaagtaatacagagttccctattgcctccattaataattttttacataccatagcgcaattatcaaaagcaagaagttaatattagtataatactattaactgaattactaacttgtgattttttttcctgtattaatgtcctttttctattctaggatccactctaagacccgacattgcagttagttgtcttgggtccttggtctcctccagtctgtgacagttcctctgtcttttcctgtctttacactgatagtctttttctgtctttatactctttctgatctttacacttttgaagaatgctggtcagttattttgtagagtgcccctcaaatggggtttgtccagtgttctctcatgattagattaaggttatacatttttgttaagaacacaaaagtgtgtgtgcccttctcagttcatcatatgagcatagctgatatatatgacttattgctcgtgaggttaatcttgatcacttggtagagagtgtctgctgggattctccaatgtaaaggtcttatttttctccttataattgacatcttgggggggagcttttaaaccgtacgcatatcctgtttctcctcagactttcccttgctaaatttcacatccattggtggatcttgccttcagcaattattatgactatggtgttctaatgatgattttctactttcctcatttctttattaattgaaattattctgtaaggatgagctgcccatttcccatttgtttatttgtattccgttatttatttgtatccatgtggacttagatgtttttctattggttgttatcctacacttgtgttattttatgtttgaaattgttccagctttgatcattgggagttttctttcaggttgctttctgtagcttttcagcat

SEQ ID NO: 1883861 - DNA, 4001 bp, Homo sapiens
attcgcgagacttctttgcatcagcaacagcaactatgtagaaaaagatgcgtttctggctgggcatggcggctcacgcgtgtaatcccagcactttgggaggccgaggcaggtggatcacgaggtcaagaaatcgagaccagcctggctaacacagtgaaaccccgtctctatgaaaaaaaaaattaaaaattagccggatgcagtggcacgcgcctgtagtcctagctactcaggaggctgaggcaggagaatcgcttgaacctgggaggcagaggttgcagtgagccaagactgcgccactgtactccagcctgggcaacagagtgagactccgtctcaaaaaaaaaaaaagaaagaaagaaaaagatgttttttgtcagttatttacagattctagcaaacacacacagaatactgatcagttttagatttccaagttttcgagttaatagaaacgccaaatggttttaaattaggaaaagctaatccaacacagaattcaaataaatattactcttgtaccttccttttggcttaacatttagctttcttcttaaagctcttcggtcagtgaataaagctgtgtgacaaaattcatctccttttctcattagcatcacttatgtaatttggcggggtgcagtggctcccgcctgtaatcccagcactctgagaggctgaggtgggtggatcacctgtggtcaggagtttgagaccagcctggccaacatggtgaaaccccctctctgctaaaaatacaaaattagccaggcatagtggcatacacctgtagtcccagctacctgggaggctgaagcaggagaatcacttgaacctaggaggcagaggctgcagtgagatgagattgtgccactgcactccagcctaggcaataagagcaaaactccatctaaaaaaaaaaagatattcagtttttccctatccagattcttcatcagaataatttttaaagttacacagtacaggaatacattatttttttaatatagatagggtcttgctatgttgtccaggctagactcgaactcttgggctcatgtgatcctcccgctttggcctcccaaagtgctgggattacaggcgtgagccaccatgccacattcttttttataaaaaaatacaaagaagagcatgtcattttaatactctgttaaacagtaaatgtgatactattctttatcagcctactcaataactacgaatgaaacctatatacattatccacccactgaacgaaaaaagagacatccataaaatttaaataggtgttgctcaacatgtctgtcacacttgagctactttaccttgtatgaaagaccaactcaaaaatcctcaaagacaacctttattttatttgattaattggtcatgggtaaaatgtataagtaacttattaaaaaggggcaatatactttataagaaaaattaccacagtaattcccaagaagaatgtgacaataagctctttgacgataatatatgtgcatcatctggtttctgttccaaagccttagtcagctcctacaaaaacaaacatgttgagtgtcagtaaaagttttttaaaagccatcaaataaattctaattaaaacatcatttttaaacaaataacttatgatcagaaactacttggaggaaagataacagggatgtaatcttggagtttttcctcgtaagaggatctccccggtttctcgcggtcctgctaaaacgctgtcaacctaacgctccaccagagaggcccgttggcttctcgggaggcgaccgagggagctcaggaggcggggaggcttttacaagaagcgaaaggacggcctcaggggtggccgggaacagcctggaatcagctggaggacatcagcaggactgaggaaagggccaccaccagcgtgaggaaaggggggagagggcagaacgcggcgaatggccgcgctcgagggctggcggggtcccagcgagcagcggctgggaaacaatggcgcgagcgtgacgtgggccggaggcgccgccgcggcgcggaggaaggggctgccgtgggactgtagagtctgtagagtcttttggaatttatgtgattacaatcttgcagtctgtgaatagagatggtttaactttcctgtaatctttataccttttagttttgttgctggctagtatgtccactattgaatagaaatagtgataatggacttccttgtcttggttgtaaaatcaagaggaaagcattcaatatcaagtgctttttctacctttattgaaatgttcatatgtatttttaataataatatgttactgttatataataataattttaaaataatattttaataataatgttacaatgtgaccaattacattggttaattttcaaatgttatctaaatggccggttgtccttccggatccccattgattccgattgggatgacactataggagaggcagaaccagtgaaggaaacataacgtttattcaggagttacatacaggggtggtccagtggtggtgggctggcctggagaaacgctaccgtttgtataaaaaaaaaaaagcatgtagtccatatagcatatcgcattttcacttagaaccctccttctagcagtctccatttaacccaaaataaagggccttgatcacctgtacaggctgtgttccaagggatggggcaggggtatggctgtccttcataggtaagtagtgaatctcagtgttggctactcctggattccttagcctgggactccaaacacacttagaatagggttattctcaggtatgctccatttatggctcagccatacaccaaggtgtatacaccaacccctgccatgcaccaatatgcatataaatatgaatagcctctgaaagggcaaattcctagattgacctataggcccacatgaaaagttctatattaatagctatgtcatggctgagcacagtggctcatgcctgtaatctcaacactttgggaggtcgaggcgggtggatcccttgaggccaggagttggagaccagcctgggcaacatgacaaaaccccatctctactaaaaatacaaaaattacctgggcttggtggtgcacacctataatcccagctactaaggaggccaaggcacaggaaacacttgaacctgggaggcagaggttgcagtgagcgagatggcaccactgcactccagcctgggcaacagagtcagactctgtctcaaaaaaaaaaaaaaaatagctgtatcgtggacattgaaattataatgagataataaaactaccaccagaatgacttaaattaaaaggatttccaataccaagcattgacaaggataggagcattttttagagagaatgaccaaggagttggctacagtcaggtgctgcagaatcagatctgtggaccttaatgtgcatctggtgaaataaataactataatggtgaagaacaaagcaattgcccaggaatcctactgtggtctgagataagaagatcattcctattgccacatccctggaggccatttttcttttttcaatgactgatcatcctattcagagtgagaggatctggcgtgaaaacaagaggcctgttgtactatggcaactgaaagccactcttttccatgtaccattgttttcaagccattaatttcctattaaacttcattttcctcttcctgagagtttcgctataaaaatatatgtgtgtatagatatatattcccagcataagagtgctgtaacagtgttttacatagaacttttacaacaattctttgaagtgctttattgttcccatttgacaggtgaggtgatttcgggcacaggaaggctgaatgacatttccaaagtcacctccttgtaagaggcagtgtcagaagctgacaatggacttgaccactatgctgtcatagcaacagagagaaataatttttaagacaatccatgtatttaaaaaatatttttgtatctcttgtgag

SEQ ID NO: 1883862 - DNA, 4001 bp, Homo sapiens; identical to SEQ ID NO: 588928

SEQ ID NO: 1883863 - DNA, 4001 bp, Homo sapiens; identical to SEQ ID NO: 588939

SEQ ID NO: 1883864 - DNA, 4001 bp, Homo sapiens; identical to SEQ ID NO: 588952

SEQ ID NO: 1883865 - DNA, 4001 bp, Homo sapiens
aaaatggtgtgtgtctgtatcacattcaaaatctagttcatgtattattctgcaaggaaatacatcaaacaaattaatcatgagtaaacctaaatttagcagtttatccttatcttaatgaatacctaaatcctgtttgtgatattgactcaaacgactcaagctttctcctttttaatctcgttgaacctttagctgaaacgccccaatctgcagaaacacatttccatgtttgaatcaggaaaggcttggaagagattagaatgacattatatttcattttaccagttaataccacaggaagaactatttcagccaaactaaccctttcttgtcacacttaaacattaacctcaaccctaaggtagacacatactaaaattcagaattgcatccctggaggcctttaggacaaattaatttttgttctgtaaaaggcaccacgtgtcatgtttcatatcaatttacatttattgagtgcctactgagtgacaggtgctgtgctcagtgctggagactcaaaggtgagtgaataagacatgctttcttcctttcagaaccatggcccccagtgagggagttagcaacatgatgtaagtcctgagatgggaggatcacacagtgctgtctgtaaattgccccaaagcactgagactctaagttatcccaacttccttaacttctctgcaacctcttttgctgaggacaacatgatccaacaaaaatgtctcctactaacaaagagaatgtttgacacaaacacttattttcagaaacaattgtttcccaaagcacttggcttgtccaaagatgacttaccttgttggcagccccttgccatacctgtctcaaaaaacaaatcaagctgaacccagtttcattgtccacccctccttgctgacagaagcttgctgatctgcaaatggagagaggactgggaaggtcacaacttgtccttgctccctcaaggtaagtgtcatcccttaaagcttgcctgctgcctcattgcctttcccaagtcttgtgccaagttggtgcttctcatatcataacttcactatagctgattgcgagttggatctggtctcctggagttcctctcacagaatgactagagctcacccatcacatgatgtgagagtgcccttctttgaaccctgaagagtttttaaccgaagaccacatatttcttccacctgttcttgtcagtgtttccatagggaaccacaggcctgaaaagacacattccttacttttaaaaattaatttgtttagacaacccacactggtattggtcagagtcctcagactggctctgaggatagctgactaagctgctgctccaaaatgctggaatatgtcataattcacaaccattgttcataactgtttgactaccctaaaccttaccttcaaggattctcttatctgaatgaactaagcagaataaaccgaacaataagagtagggcttgaaatccaattcttaactaattagaaagcatgtatgggctaagagtttcttaccccttgccaggagggaaatggggaaatttgatttatatgtgaaaattctgcttttcagctttcacttgccaaagataggacaactcaaatgaaaagaaaaaatggtgttatccatttattttcccaaaagagatgtttgcaatgcttttttacattctcttcatacatgggcagagtttgtgctgtaaattttgcaagttggtttcagtgcaagagacagttacagcattaggatgcattcagtggcaagtaacagaatctagtctcccaggggcttaagcaatgatgacatttaattttctcacctggcaagaggtctggagaaggcagttgcagcagtgcaatgaagtcatctaggacccagattctgtctgctcttctgttctgccatcttttgccacctcagctactgcagcttcaaatatcgtgtcctcacagagctgcattcaatgggagtaggaaggggctgggataaaaagctttctcttgtaaagttcttttgttgttgttttgtttgtttccctccttccaggaagagcagtttcaggaagtctcccagcagacctctccttttgcttcatagggccagaaataggccacatgcccactcctagaccaatcacaggcaaaggaaaacagaacaagcccagttgcaattaattctcttggggcttggataggggcccatcttctatgatctcactggctccctacccaccatctaaacaagatggggcttttgttggctaggaagaagaggcacatagatagctcttgggtaaaatgtgaacagcaactgccctgttgctgggggaagtgatcaagatttttaatatcctttctgctcatgccattttatttagaaattgaagtaacatggagatttattttaatatagtcatatagttaagttaggcacattactgaaaatatattctagctgctacaagattaattgtttgaagatatcaaagggctttgagaggcatagcttcttagattcctggcggcccattagattgcattttctttctcatacgataggacatctgaacagctgaacatgaaacatcatggaaacaataagatcattgttgctactttcaaggaaatacagataatcaaattcagattggacatgggattgaccagatagcaacggaagcttgtgcttattttcaacctattgtggaattgtcttgaattgatgatttggggcccatgaagagctttttatttttttgaaaataaattcacaattttagaaagtagtcatatggattttgatgtatagtataaaccatgctgtaaatttctgaagctctttttggcatgcaaatgttaatacatctgcatcagaaagtattttcctgtctgtattcagtttcaagaagaaaaaccatgataatgaaattaaattattttctccaaaaaaacacagtatcccagaaaagatataggggggtctgacatgaatcccaggagatcctgaaatttctagagatttgagcaatgtgtgaccctttactcttcaagaaaggaataaggatgaagacaggaactaaaatcattcctgccaactagaaacagaattgtgacctctccctaatgaaatcgatcccacagctcagttagcacctaaagacaccatgtgtcgccagtctttggatgtaagcagtcatgttaagattaaataatgcagagtttcctttgttgataacactctttctcaagccccaaaagtcctactaaatatttctgggagtctgcaaaaagctaccttacatgtatgtatgcacaaagaagtctgctagctgcagtcattacagagcatcgattttatctttcctttcctgttctggctccacactgccttgcaaagtaactggaaaggcctctcttttacccccacttatagtagctattttgaaaccaccagtgcctatgccaggggtactattttttaatgcttccccaaatatcagttctccaggctgtggtagactggtgcagcaagacccagtgtcttctcagtggcttaccatgataaaagtttatttcttgctgacacaaaatctaacagagatctgggcaaccctttaggacagctgttttccatgaagcctccctggtcaactaagcaggtttaaattgataacttgatggtggttactcactagctctttgcttcaggctgcaaatgctggaactaatcaatatggctctactttaactgcaagagggctaaaaagtgcagagaggttcatgtatatgaaaagggagaagaacagattttggtgaatactagtgatatctactttacaggtcagtacttggtcctgggggaaagtggaaacaatgaccctctttctaactgttgctttgttttgtcacttgatcttccaatcagtacagcttacatccagaatctcaaaaactttctcatgagtacactctgttgtaggctccaacata

SEQ ID NO: 1883866 - DNA, 4001 bp, Homo sapiens
gtctgctagctttagtaaatttccaaccatctttgacatagtgccaaagattttccaaatagtatccaacctagaaaacagtttcagttaataagcatttttcagcaaattctattatagttgggataaaaatatccagtggcttaaaattacccaattttacatcatgtggtgctgtaactcaagagtgcatcgtactttatgtaaaaatcccacagtaatcaactccaattaaagtgcctctccacctaaattaaattaccagttaaataaattctcccgaatgaggagtgtatctaaggtaaatcagattagttctatcaaacttgtattctgcagtcgcactgtaatattctcaccatttttcttcagacaacaacaagaatgcacaatacaaatatttccattaaagaaacaacaaaatcagttatcaatttttaagcaaacagctgtaatctaattccccattgtggttgtttttttttttttttttctgcaaacgttggctgccatttaattttggaaaagaaatacacagaattttcagttttcctattaggcatgttactcacagagttgggattcaatgtttctagctttacccgaagcagggcaaaatttctgattaaccagttttcaagtcaaccagtctgtgtagatttatttccaggaatgtgtttgtgcaatgcctcttgtccttctcaaccatacccttctccagccccagtgtatccagaatccatggccaatttgagttcagcaaaaatttggcttccatttagctccccctccaaataagtttataaaagaggaggcaggatttcatctcctttctggattgtacacatagaatacatctaaatttttaagctatatattgtaaaaaatggtgtgtgtctgtatcacattcaaaatctagttcatgtattattctgcaaggaaatacatcaaacaaattaatcatgagtaaacctaaatttagcagtttatccttatcttaatgaatacctaaatcctgtttgtgatattgactcaaacgactcaagctttctcctttttaatctcgttgaacctttagctgaaacgccccaatctgcagaaacacatttccatgtttgaatcaggaaaggcttggaagagattagaatgacattatatttcattttaccagttaataccacaggaagaactatttcagccaaactaaccctttcttgtcacacttaaacattaacctcaaccctaaggtagacacatactaaaattcagaattgcatccctggaggcctttaggacaaattaatttttgttctgtaaaaggcaccacgtgtcatgtttcatatcaatttacatttattgagtgcctactgagtgacaggtgctgtgctcagtgctggagactcaaaggtgagtgaataagacatgctttcttcctttcagaaccatggcccccagtgagggagttagcaacatgatgtaagtcctgagatgggaggatcacacagtgctgtctgtaaattgccccaaagcactgagactctaagttatcccaacttccttaacttctctgcaacctcttttgctgaggacaacatgatccaacaaaaatgtctcctactaacaaagagaatgtttgacacaaacacttattttcagaaacaattgtttcccaaagcacttggcttgtccaaagatgacttaccttgttggcagccccttgccatacctgtctcaaaaaacaaatcaagctgaacccagtttcattgtccacccctccttgctgacagaagcttgctgatctgcaaatggagagaggactgggaaggtcacaacttgtccttgctccctcaaggtaagtgtcatcccttaaagcttgcctgctgcctcattgcctttcccaagtcttgtgccaagttggtgcttctcatatcataacttcactatagctgattgcgagttggatctggtctcctggagttcctctcacagaatgactagagctcacccatcacatgatgtgagagtgcccttctttgaaccctgaagagtttttaaccgaagaccacatatttcttccacctgttcttgtcagtgtttccatagggaaccacaggcctgaaaagacacattccttacttttaaaaattaatttgtttagacaacccacactggtattggtcagagtcctcagactggctctgaggatagctgactaagctgctgctccaaaatgctggaatatgtcataattcacaaccattgttcataactgtttgactaccctaaaccttaccttcaaggattctcttatctgaatgaactaagcagaataaaccgaacaataagagtagggcttgaaatccaattcttaactaattagaaagcatgtatgggctaagagtttcttaccccttgccaggagggaaatggggaaatttgatttatatgtgaaaattctgcttttcagctttcacttgccaaagataggacaactcaaatgaaaagaaaaaatggtgttatccatttattttcccaaaagagatgtttgcaatgcttttttacattctcttcatacatgggcagagtttgtgctgtaaattttgcaagttggtttcagtgcaagagacagttacagcattaggatgcattcagtggcaagtaacagaatctagtctcccaggggcttaagcaatgatgacatttaattttctcacctggcaagaggtctggagaaggcagttgcagcagtgcaatgaagtcatctaggacccagattctgtctgctcttctgttctgccatcttttgccacctcagctactgcagcttcaaatatcgtgtcctcacagagctgcattcaatgggagtaggaaggggctgggataaaaagctttctcttgtaaagttcttttgttgttgttttgtttgtttccctccttccaggaagagcagtttcaggaagtctcccagcagacctctccttttgcttcatagggccagaaataggccacatgcccactcctagaccaatcacaggcaaaggaaaacagaacaagcccagttgcaattaattctcttggggcttggataggggcccatcttctatgatctcactggctccctacccaccatctaaacaagatggggcttttgttggctaggaagaagaggcacatagatagctcttgggtaaaatgtgaacagcaactgccctgttgctgggggaagtgatcaagatttttaatatcctttctgctcatgccattttatttagaaattgaagtaacatggagatttattttaatatagtcatatagttaagttaggcacattactgaaaatatattctagctgctacaagattaattgtttgaagatatcaaagggctttgagaggcatagcttcttagattcctggcggcccattagattgcattttctttctcatacgataggacatctgaacagctgaacatgaaacatcatggaaacaataagatcattgttgctactttcaaggaaatacagataatcaaattcagattggacatgggattgaccagatagcaacggaagcttgtgcttattttcaacctattgtggaattgtcttgaattgatgatttggggcccatgaagagctttttatttttttgaaaataaattcacaattttagaaagtagtcatatggattttgatgtatagtataaaccatgctgtaaatttctgaagctctttttggcatgcaaatgttaatacatctgcatcagaaagtattttcctgtctgtattcagtttcaagaagaaaaaccatgataatgaaattaaattattttctccaaaaaaacacagtatcccagaaaagatataggggggtctgacatgaatcccaggagatcctgaaatttctagagatttgagcaatgtgtgaccctttactcttcaagaaaggaataaggatgaagacaggaactaaaatcattcctgccaactagaaacagaa

SEQ ID NO: 1883867 - DNA, 4001 bp, Homo sapiens
ctatgatctgacactcaagactgtcagatttaggttgctgttaattttgtcatgagaatgtaaaatactaaaatctctaagtgaaaaatttgcatactagtgcttgttataaaggataatgcaaaaataaacttgggaactttgcattatgaattttatttttatatctacataagcatgagggaaagaactgtattttcagataattaaatccagaagagttacaaattttcattcgtcccaaagattttgtctgggtatttcttccttagctgtcgtcttgcagacaccatcgaagcatagatgatgcagccccaggagattaaaacgatggcaagcagcaactaaaccaaaaatcgcaaaggaggtgtgaaatctacctgatatttcccctcgcccccgtcaggttaccgttgccattgctaaggtgggaattaaagtaacaaagtcgaataaatggggttccagtggcgggtacacccagcagcccttacgtaagaagcggaagatcgtatcctccaggaagaggcggagtcgaggtgagggagtgaaatgcttaattcaggaatggattttggagtttctgggtgctgaagaaatagggcctttccgcctgcgggcccagtgagtcgacacggtgggggcccgcgatccccgggacttaccactgaataaatccagtccagcgtgcgacgacttactggcttcatggtaaggaggcggcagcagtccgcgggagctggcgggagctgcgggccttacagtaacctcccaggcggtggctgccaggcgccagcagccatcttttagccgggcacgagcgcccgcccactcgcttcgtgcagcgctgtcgctggcctcttccgcccggagttggggggcggtatcacgtgatcgggggccttgcccgccttttagagaggggaataaacgagaaaatgttaaaaattgcttttttttttttttttttgccaactaaggagataggcgtacctccactggttttctttctagttgcaatgcaatattaatgcaggataaggtgctgtcgtgtccatttaaaagttaatttgaaaaacaatccacgttttaaatattacgtctggctctaaagctggaagaattaacgctttctcccccgctccctcccccacgcctccccgcatctgataccacacgatttagatggacgttcgcctgttcatctttgacgtaaaaataccacccactcttttatatgtgacaaatcgttgtgggaacccctgtaaatcgagccattcttcagaaacgtatagcgtaatgtatatctctaagaagaaatacgtgggacgcgttacccgccataatgtatcagtcaagcaacaagtgtttgttgagcgtgtctgatgttcttgaactgccgcgcgtgagatactaagccccgagcacggcagtttggtgggcgagcgtaccaggttcagctctagaatgtttggggcgctcacatttgaggcctgaggagtagaatctggcaacgggccgcttaggctctagacgttctttatacctcgcagttatcttaaaagagttttagtctagatttcagggagtgggaaggggaagagcggagaaaaacgtggtctgtttagggaggagtccaggccctgttttgttaggttgtcctgtttctccccagcctggaggggatccctctctgaagactttataggatactggttgggctctggtttgggatcccgttggactcctggtgttgcttccgggaggcgtacaacaggaggtgagagacttcaagtccatctaacaattcccctatctagacactaaagataatttcctaagtttccgcagagtttggtaaggttgaaacgacatcgaactagttctcgtgttttccgggtaagttaggggcgaacattcagtcagtgtccccagtggctgagtaccagtaacaagatggggagggtcgcgctgccctcctccggggtctggagcggcgggggaggggccgcatttgggccggtgcgctgagccccgcccccgaggccggcgtccatctgctgcgcatgcgtgaggaaggcgggtgttgtgttttgatgcgcgggagctggggggtgggtctcgctctctgccctgcttccgagctgccattggtgatgagccctttgcgtcacaggggtcgcagccgccgctggggtctccgctgtctcgcgaggagggtgaagcgcccccgcctgctcccgcttcggagggtaggcggagaagtcgccgggtacgccttcgcggatcctgccgacaccgacctagctttctgggctgccgggagctcgcggcgagcgccccagccaggcctgcgccggcatcctccgaggtgagtgagattcggaacaatgggacgcgggggtcggaagggccgtgggagttggcgctcccgcctggagcggcgcctcgggacccgagggttgcggtcatggcctgcggggctgtccgggcctcggcgggccagggccagggcccccgagcggctcctgcgcgcacctgtggattggtgcgggcaggcgagggttgcgcttcccacaagcgctcccgaggggcgcgagcctggccgtgtactggaaagagcttggtctcagggaaaagcaaaaaagcaatgagactgaatcgtggcgtcaccacttacaggatatgtgaccttgcctaggtcccttaaatccctgagcctgtctgtaaaatgggaataacaatatttaagttcgttgtggttatgtaatgctcatggtgcttatcttagtctagtggcagttctgaaccaaagtaaacgactatcaccgtggctttgggagttgggacttgtctgtgttgtgttaaacattctgagcagaaattgcccgtgacttgttcatccatccatttactgcagctttcctcatgggttgctgattgtaggctggaagggggcagtgctgagatgagccacatagtgatttaagaggaaaacggagtagaccttttgataggtaattttcaagattatttaagataaattaagaaacagctgcccaagatttaagttaatagtggtgagagctttctgggttttgtccatgaaatgcaaagaaagctatacaatcagctaaaatcaatcatacttgtctggaatgagtggttttagaggcgaacggttcccagccaattctttttgctggaattggattaaatttgataggatctggataaatttgataggatctactgagatcctgtgacttttgtatcttcttttggagttgattaaatgcagttcagagaggtacagtgatttctttaaggtggcaagaggtaggaaccagtttatttttaatacttgggtgatctttctatttcatctattcgtgaaccctttttagtcactttgcctagaaatattaagtataataattatattaagtatgatgattattttgttgttataaactatcctctgtctggacccatataatcagttatgggtgatgagctaccgaaattcacttcgtgttcacgtaacatagagaacattgttgagttcttactgtgcatcaagcactgtgctaagggtttttatgaaatatgtcccgtcacacaaccaccttttcaattccattttagaattgagaaaacgtgagattttgagaaaaaacttcctccaggttacacacctactaagtggtggcgattctcagccttggctctgcagcaaaattaacatcactcccgcaaatgtaatcagcagatgattaaattttatatacagtgtatgccatagatgacttttgatttttattgatttattttttttgagacggagtcttgctctttcgcccaggctggagtgcagtggcgcagtctcggctcactgcaagctccgcctgccaggttcacgccattcccctgcctcagtctcccgactagctgggactacaggcgcccgtcgctacgcccagctaattttttgtattttt

SEQ ID NO: 1883868 - DNA, 4001 bp, Homo sapiens
aataagtaaaaagtggacatgctaaacaaatatgagagactacctactttttctggtcattcttgacttggaaaacggtatggaaaagtatttagttacatgtttgtttgtttttttcttacacagtacttacactaatttggtatcagggtatgcaacagtgaaatatcacaataaacaaatgtaagaacagcaattccatgcacttttgttttaaggaaatctttccggccaggcgcagtggctcatgcctgtaatcccagcactttgggaggccgaggcgggcagatcacgaagtcaggagatcgagaccatcatggctaacacagtgaaaccccgtccctactaaaaatacaaaaaaattagccgggcgtggtggcgggctcctgtagtcccagctactgcggaggctgaggcacgagattggtgtgaacccagaaggcggagcttgcagtaagccgagatagtgccactgagcctgggcgacagagcaagactccgtctcaaaaaaaaaaaaagctttccgaatcatttttgaagaatttagaaacttgattgaaaagcttattccaactatgatctgacactcaagactgtcagatttaggttgctgttaattttgtcatgagaatgtaaaatactaaaatctctaagtgaaaaatttgcatactagtgcttgttataaaggataatgcaaaaataaacttgggaactttgcattatgaattttatttttatatctacataagcatgagggaaagaactgtattttcagataattaaatccagaagagttacaaattttcattcgtcccaaagattttgtctgggtatttcttccttagctgtcgtcttgcagacaccatcgaagcatagatgatgcagccccaggagattaaaacgatggcaagcagcaactaaaccaaaaatcgcaaaggaggtgtgaaatctacctgatatttcccctcgcccccgtcaggttaccgttgccattgctaaggtgggaattaaagtaacaaagtcgaataaatggggttccagtggcgggtacacccagcagcccttacgtaagaagcggaagatcgtatcctccaggaagaggcggagtcgaggtgagggagtgaaatgcttaattcaggaatggattttggagtttctgggtgctgaagaaatagggcctttccgcctgcgggcccagtgagtcgacacggtgggggcccgcgatccccgggacttaccactgaataaatccagtccagcgtgcgacgacttactggcttcatggtaaggaggcggcagcagtccgcgggagctggcgggagctgcgggccttacagtaacctcccaggcggtggctgccaggcgccagcagccatcttttagccgggcacgagcgcccgcccactcgcttcgtgcagcgctgtcgctggcctcttccgcccggagttggggggcggtatcacgtgatcgggggccttgcccgccttttagagaggggaataaacgagaaaatgttaaaaattgcttttttttttttttttttgccaactaaggagataggcgtacctccactggttttctttctagttgcaatgcaatattaatgcaggataaggtgctgtcgtgtccatttaaaagttaatttgaaaaacaatccacgttttaaatattacgtctggctctaaagctggaagaattaacgctttctcccccgctccctcccccacgcctccccgcatctgataccacacgatttagatggacgttcgcctgttcatctttgacgtaaaaataccacccactcttttatatgtgacaaatcgttgtgggaacccctgtaaatcgagccattcttcagaaacgtatagcgtaatgtatatctctaagaagaaatacgtgggacgcgttacccgccataatgtatcagtcaagcaacaagtgtttgttgagcgtgtctgatgttcttgaactgccgcgcgtgagatactaagccccgagcacggcagtttggtgggcgagcgtaccaggttcagctctagaatgtttggggcgctcacatttgaggcctgaggagtagaatctggcaacgggccgcttaggctctagacgttctttatacctcgcagttatcttaaaagagttttagtctagatttcagggagtgggaaggggaagagcggagaaaaacgtggtctgtttagggaggagtccaggccctgttttgttaggttgtcctgtttctccccagcctggaggggatccctctctgaagactttataggatactggttgggctctggtttgggatcccgttggactcctggtgttgcttccgggaggcgtacaacaggaggtgagagacttcaagtccatctaacaattcccctatctagacactaaagataatttcctaagtttccgcagagtttggtaaggttgaaacgacatcgaactagttctcgtgttttccgggtaagttaggggcgaacattcagtcagtgtccccagtggctgagtaccagtaacaagatggggagggtcgcgctgccctcctccggggtctggagcggcgggggaggggccgcatttgggccggtgcgctgagccccgcccccgaggccggcgtccatctgctgcgcatgcgtgaggaaggcgggtgttgtgttttgatgcgcgggagctggggggtgggtctcgctctctgccctgcttccgagctgccattggtgatgagccctttgcgtcacaggggtcgcagccgccgctggggtctccgctgtctcgcgaggagggtgaagcgcccccgcctgctcccgcttcggagggtaggcggagaagtcgccgggtacgccttcgcggatcctgccgacaccgacctagctttctgggctgccgggagctcgcggcgagcgccccagccaggcctgcgccggcatcctccgaggtgagtgagattcggaacaatgggacgcgggggtcggaagggccgtgggagttggcgctcccgcctggagcggcgcctcgggacccgagggttgcggtcatggcctgcggggctgtccgggcctcggcgggccagggccagggcccccgagcggctcctgcgcgcacctgtggattggtgcgggcaggcgagggttgcgcttcccacaagcgctcccgaggggcgcgagcctggccgtgtactggaaagagcttggtctcagggaaaagcaaaaaagcaatgagactgaatcgtggcgtcaccacttacaggatatgtgaccttgcctaggtcccttaaatccctgagcctgtctgtaaaatgggaataacaatatttaagttcgttgtggttatgtaatgctcatggtgcttatcttagtctagtggcagttctgaaccaaagtaaacgactatcaccgtggctttgggagttgggacttgtctgtgttgtgttaaacattctgagcagaaattgcccgtgacttgttcatccatccatttactgcagctttcctcatgggttgctgattgtaggctggaagggggcagtgctgagatgagccacatagtgatttaagaggaaaacggagtagaccttttgataggtaattttcaagattatttaagataaattaagaaacagctgcccaagatttaagttaatagtggtgagagctttctgggttttgtccatgaaatgcaaagaaagctatacaatcagctaaaatcaatcatacttgtctggaatgagtggttttagaggcgaacggttcccagccaattctttttgctggaattggattaaatttgataggatctggataaatttgataggatctactgagatcctgtgacttttgtatcttcttttggagttgattaaatgcagttcagagaggtacagtgatttctttaaggtggcaagaggtaggaaccagtttatttttaatacttgggtgatctttctatttcatctattcgtgaaccctttttagtcactttgcctagaaatatta

SEQ ID NO: 1883869 - DNA, 4001 bp, Homo sapiens
catacaaaataaaagattatccctttatcacttagagaacacaattttcgtgccctttttgattattttgtttctgagtgaaaatttccctattatttcactataccttaaaattttgaatactgattgttcagatttagtcagcttctactttgtctagggtccttttaaagggaatgccagaactcaagtacattttccatgtgagatctgatgaacatagaacagaatagaactatcacctctgtagacttaagatttttgtactaactgtatctttgttttcctagggtgatacaattctggagactggagaagtaattccaccaatgaaagaatttcctgatcaacatcattaaagattatgtaaaaagttaaaaggcttatgagcctaagtttgttcctatattaccatatttactgaattttctggaaaagtaactttaataaagtttaatctcagaaattgtcatatctgttttcaagcattgtacaatttgagactgagtaatttaacaataagtaaaaagtggacatgctaaacaaatatgagagactacctactttttctggtcattcttgacttggaaaacggtatggaaaagtatttagttacatgtttgtttgtttttttcttacacagtacttacactaatttggtatcagggtatgcaacagtgaaatatcacaataaacaaatgtaagaacagcaattccatgcacttttgttttaaggaaatctttccggccaggcgcagtggctcatgcctgtaatcccagcactttgggaggccgaggcgggcagatcacgaagtcaggagatcgagaccatcatggctaacacagtgaaaccccgtccctactaaaaatacaaaaaaattagccgggcgtggtggcgggctcctgtagtcccagctactgcggaggctgaggcacgagattggtgtgaacccagaaggcggagcttgcagtaagccgagatagtgccactgagcctgggcgacagagcaagactccgtctcaaaaaaaaaaaaagctttccgaatcatttttgaagaatttagaaacttgattgaaaagcttattccaactatgatctgacactcaagactgtcagatttaggttgctgttaattttgtcatgagaatgtaaaatactaaaatctctaagtgaaaaatttgcatactagtgcttgttataaaggataatgcaaaaataaacttgggaactttgcattatgaattttatttttatatctacataagcatgagggaaagaactgtattttcagataattaaatccagaagagttacaaattttcattcgtcccaaagattttgtctgggtatttcttccttagctgtcgtcttgcagacaccatcgaagcatagatgatgcagccccaggagattaaaacgatggcaagcagcaactaaaccaaaaatcgcaaaggaggtgtgaaatctacctgatatttcccctcgcccccgtcaggttaccgttgccattgctaaggtgggaattaaagtaacaaagtcgaataaatggggttccagtggcgggtacacccagcagcccttacgtaagaagcggaagatcgtatcctccaggaagaggcggagtcgaggtgagggagtgaaatgcttaattcaggaatggattttggagtttctgggtgctgaagaaatagggcctttccgcctgcgggcccagtgagtcgacacggtgggggcccgcgatccccgggacttaccactgaataaatccagtccagcgtgcgacgacttactggcttcatggtaaggaggcggcagcagtccgcgggagctggcgggagctgcgggccttacagtaacctcccaggcggtggctgccaggcgccagcagccatcttttagccgggcacgagcgcccgcccactcgcttcgtgcagcgctgtcgctggcctcttccgcccggagttggggggcggtatcacgtgatcgggggccttgcccgccttttagagaggggaataaacgagaaaatgttaaaaattgcttttttttttttttttttgccaactaaggagataggcgtacctccactggttttctttctagttgcaatgcaatattaatgcaggataaggtgctgtcgtgtccatttaaaagttaatttgaaaaacaatccacgttttaaatattacgtctggctctaaagctggaagaattaacgctttctcccccgctccctcccccacgcctccccgcatctgataccacacgatttagatggacgttcgcctgttcatctttgacgtaaaaataccacccactcttttatatgtgacaaatcgttgtgggaacccctgtaaatcgagccattcttcagaaacgtatagcgtaatgtatatctctaagaagaaatacgtgggacgcgttacccgccataatgtatcagtcaagcaacaagtgtttgttgagcgtgtctgatgttcttgaactgccgcgcgtgagatactaagccccgagcacggcagtttggtgggcgagcgtaccaggttcagctctagaatgtttggggcgctcacatttgaggcctgaggagtagaatctggcaacgggccgcttaggctctagacgttctttatacctcgcagttatcttaaaagagttttagtctagatttcagggagtgggaaggggaagagcggagaaaaacgtggtctgtttagggaggagtccaggccctgttttgttaggttgtcctgtttctccccagcctggaggggatccctctctgaagactttataggatactggttgggctctggtttgggatcccgttggactcctggtgttgcttccgggaggcgtacaacaggaggtgagagacttcaagtccatctaacaattcccctatctagacactaaagataatttcctaagtttccgcagagtttggtaaggttgaaacgacatcgaactagttctcgtgttttccgggtaagttaggggcgaacattcagtcagtgtccccagtggctgagtaccagtaacaagatggggagggtcgcgctgccctcctccggggtctggagcggcgggggaggggccgcatttgggccggtgcgctgagccccgcccccgaggccggcgtccatctgctgcgcatgcgtgaggaaggcgggtgttgtgttttgatgcgcgggagctggggggtgggtctcgctctctgccctgcttccgagctgccattggtgatgagccctttgcgtcacaggggtcgcagccgccgctggggtctccgctgtctcgcgaggagggtgaagcgcccccgcctgctcccgcttcggagggtaggcggagaagtcgccgggtacgccttcgcggatcctgccgacaccgacctagctttctgggctgccgggagctcgcggcgagcgccccagccaggcctgcgccggcatcctccgaggtgagtgagattcggaacaatgggacgcgggggtcggaagggccgtgggagttggcgctcccgcctggagcggcgcctcgggacccgagggttgcggtcatggcctgcggggctgtccgggcctcggcgggccagggccagggcccccgagcggctcctgcgcgcacctgtggattggtgcgggcaggcgagggttgcgcttcccacaagcgctcccgaggggcgcgagcctggccgtgtactggaaagagcttggtctcagggaaaagcaaaaaagcaatgagactgaatcgtggcgtcaccacttacaggatatgtgaccttgcctaggtcccttaaatccctgagcctgtctgtaaaatgggaataacaatatttaagttcgttgtggttatgtaatgctcatggtgcttatcttagtctagtggcagttctgaaccaaagtaaacgactatcaccgtggctttgggagttgggacttgtctgtgttgtgttaaacattctgagcagaaattgcccgtgacttgttcatccatccat

SEQ ID NO: 1883870 - DNA, 4001 bp, Homo sapiens; identical to SEQ ID NO: 588991

SEQ ID NO: 1883871 - DNA, 4001 bp, Homo sapiens
tctgtctcaaaaaacaaacaaaaaaattttttttaattaaaaaaaaaaaaaaaagcagccaggcctggtggctcaggcctgcctgcaatcccagcactttgggaggccgaggtgggtggatcacttgagatcaggagttcgagaccagcctggccaacatggtgaaaccccacctctattaaaaatacaaaattagcccggcgtggtgatgcaggcctggaatcccagctactcaggaggctgatgcaggagaagtgcttgaacccgggaggcggaggttgcagtgagctgagattgtgccactgcagtccatcctgggcgacaaagtgagactccatgtcaaaaaaagaaaagaggcttggctcagtggctcacgcatgtaatcccaacactttgagaggccaaggtgggtggccacgaggtcagaagttcaagaccagcctggccaagatggtgaaaccccatctctactaaaaacacaaaaaaattagcagggcattatggcaggaacctgtaatcccagctcttggggaggctgagacagagcattgcttcaacctgggaggtggaggttacagcgagctgagctcacgccactgcactccagcctgggagacagagtgacactccatctcaaaaaaaaaaaaaagcaaaaagaaaagataagaaaagacaccgcagggccatacgggtttacagctcagtattaagtaaccttaacgaaatctgattttatttaaaatgctcaaggccaagggaaaaaaaaagattagtgactttcttcaattaattttatggtatcatgtcaaagcttgatatagttaatacatttcaactaacttaggatgagaatgtttataaaacagacattttctgtaccattacaaatacactgcaaattaaacagactttctcaacaaaagaaaaactgttgttgacgagttcacttccattagacgcacacaatggtgtttttggttttgttttcatttgtttttgttttttgagacaaggtctcgctctgctgcccagggcttgagtgcagtggcgtgagcatgataatgtgcctacttttccattttcctgtgttgtttctactatgttaacaaatgagcctgaaaacacggagcactgaccaggccaggtggctcacgcctgtaatcccagcactttgggaggccgaggtgggtggatcacctgatgaggctgggagttcaagaccagcctgaccaacatggagaaaccccgtctctactaaaaataaaaaattacccgggcgtgctggcgcatgcctgtaaccccagctactcgagaggctgaggcaggagaatcgcttgaacccgggaggcggaggttgcagtgagccgagatcgcgccattgcactccaacctgggaaacaagagcgaaagtccgtctccaaaacaaaacaaaacacaaaatgagcactgatccgggggcgcccgtttcctcgacctcaggctgtggcgcctgccagtccccaacatccccaccgcccgacggcgtctccgcgttcctcctcctctcccggtaccagggtctctccccagaaacaaactcgcattcgtaaccggcatcttggccttgcgctgggggtgacccgcccaagccgccatgaagggacgcttgcacaaagtgaagcccaggtacaaacagcccgacccgcccaagccgccatgaagggacgcttgcacaaagtgaagcccaggtacaaacagcccgacgggaaacgcggccgcgctcgctccgctgcactcgcagcggagacaggaagccttttcctcacctttgcctcggcggccccaggtgtcccggagctgcagcagcgtctccctgtcttcacaccggacgcggccccaggtgtccccaggtgtcccaagccccggcccctccggggtgggtgctgaggagagggagctccgtcctcacggtggaccccccgtcctcacagtggaccccccaggacgccgccgtgcggttcggacacggttcgcgcgcgccgccctccgggtttggcagggccgggcgccccctcgcggcagctctggggaatctctggaaatcagcgccttgattttttccaggccgtgattttggaaatttcaactgaactggagaccaccatcccgtgccttgaccggaacgcatggagatagcaatcgaagaagatggccagttcacgcctgtaatcccagcactttgggaggccgagtcgggcggatcactcgaggtcaggaaatcgagaccattctggccaacatggtaaaaccgcatctctactaaaaatacaaaaattatctgggcgtggtggcacacgcccgtagtcccagctactctggaggctgaggcaggagaatcccttgaacccgggaggcggaggttgcagtgagcagagatcgcgccactgcactccagcctggcgagagagcaagactcagtataaaaaaaaaaaaaaagaaaaagaaaaagaaaaaaataaataaaaagaaagaaggaaataagaaggaagaaaggaaggggaaggggaagggagaaggaagttaagaagagactccaggctaggtgcagtggctcacgcctgtaatcccagtactgcggaagactgaggtgtaaggatcactcgagcccaggagttcaagacaaatctgagcaacgtaaagatcctgttgtctgtgccaacattttgttttgttttgttttgttttttttgagacggagtttcactcttattgcccaggctggagtgcaatggcgcgatcttggctcactgcaacctccacctccagggttcaaacagttctcctgcctcagcctcctgactagctgggattacaggcgcgcaccaccatgcatggctaattttggtatttttagtagagaccgggttttgccatgttgaccaagctggtctcaaactcctgacctcaggtgatccccccaccaaggcctcccaaagtcattcacgcctgggattacaggcgtgaaccaccgcgcccggccaatttttttttttaattagctgtgcatggtggctggtgcctatactcctaactacttgggaggctgaggccggaggattgctggagcccaggagaccgaggctgcagtgagctgtaatcacaccactgcactccagcctgggtgatagagcaagaccttctctcttaaaacaaaacaaactgaaaaaaggctgggtgtggtggctcacgcctgtaaccccagcactttgggaggcagagacgggtggatcacctgaggtcaggagttcgagaccagcctggcccacatgaggaaaccccatccctactaaaaatacaaaaattagccagatgtggtggtgggcacctgtaatcctagctactcaggaggctgaggcaggagaattgcttaaaccctggaggcggaggttgcagtgagccaagatcgcaccactgcactccagcctgggcgacagagcaagactctgtctcaaaaaaaaaaaaaaaaaaagaaaaaagaaaaagaaaaaagaaaaaaagatagccagtagacgaaactctatttattttctttcttttctttttactcttaaaaagggtctcgctctgtcgcccagaatggagtgcagtgccctgagcatgataatgtgctacttttccattttcctgtgttgtttccactacgttaacaaataagccttaaaacaccaagcactggccaggtgagatggctcacgcctgtaattccagctactctggaggctgaggcaggagaatcgcttgaacccgggaggtggaggttgcagtgagcctagatcgcgacattgccctccagcctgggaaaccaaagcgaaactgtctcaaaaaaaaaaaaaaaaaaaaacacgagcactgatcagggggcgtctgttacctcggcctcagcctgtggcccctgccagtccccaacctccagaccgcccgacggcacaacggcgtctccacgttcctccgcttctcccggg

SEQ ID NO: 1883872 - DNA, 4001 bp, Homo sapiens; identical to SEQ ID NO: 589012

SEQ ID NO: 1883873 - DNA, 4001 bp, Homo sapiens; identical to SEQ ID NO: 589019

SEQ ID NO: 1883874 - DNA, 4001 bp, Homo sapiens
atggccaagaatccacaccacccctgccccaggcaaaggactcagctttcagctgcaagaactccacagaagcctatatagggtcttggaagacagcagggcgtctgccaacagagtcccgtctctctcttctcctccccctcactcctctctccactgcttcactggactttgaaaaatatcatggaaggggtcattgggtctagggccaagaaaggggctaaaaacctccatcctgggtaactgtcattaacactaagatcatgaaagtcaagataagccctcttctccttgatccccaccccaccatgagatttgcagggcaagtctgggagggaaaagaaacgagtcctgataaatgtaaattgacaggcacccctgttcacaatctgttctaggtacaattccacatggctcccccaagacaaagatgttcccctttgatggtgctgttgtcttggggagaggcgcaggcacattctgactggccagttcttgctccctaaaatagcctgtggactatgccctcctcggggtcgggaggcgggacaaacagctcctctccagcccaccctcatgctcccactctgttctcctcactgacctggccacaggctcttccaccccaaaggaacccatagtatctcaggagctctgccctgagcagtctcctgctagggagggctgggaaacaggccctcaccgccagagcatgcgacacagcctgtgagatggtgacagtgggtccggctttttcgctcaagttgaccagggcttatgctcctgcaatgccaggtcaaaagcacagccaccaagttctcctccaaaggcccgactcctttggaactcacttcctgggggggtcagaacagagtgtacccctaccccgagtcctggcacagggacacggccatataacctggagactcttcctgctacagccaggaaggcacctcctgccaccaggagccggggctggagagggctgggctgcctgcctggctcacaccaggggtggtgtggctaggaaggaagaggggaatctcaggcctgtctggagcaccttggggatggagtcataggggagggtctagacagtggctattcattgcttctccttccggcgctgcagaaacttcctcctcagtctgagttgggcagggcccactcgcgtccgccttcgaatccctttcctgctggtcaaaggcaacccctctgactctaccagagagggccggaaatccagctgcccacaacatatcctgccatggcctccacagagcgcatggagcccggggaggctgaacaggaaaggcagaagtgagatcccatcccaccaggacagcagattcggtgccttgcatgatggcagctgactgtggtgggtgcgtcatttcaggggcccacaatgggcctttggtgcctcccaggagcccaaggtggcagtgactgcacacagccagctaagaacgtgtctgtctgtgatgtggtacccaccaggcagggatgtggggctgaggcacagtctctgctcctttgtgcaggggtgggactgcctgatagatgtgtttttcccactgcccccactctagccaacagcccggagaaggggaagtttgacgtcactcatcccccacggatggcagtagccagaaggcaggggccctggggccaccaaaggcaaaagcccaccaacagacccttggttatgatgagggtcaagtggagcacatcttaccagtgtgtcccagagacccacgctcctcccaagataacacccagactgagagcccacttcacctaccccagcttctctcagggactccaatctgggactcttggggttgggaggctgcatcctctgctgtggtgggcccaggctcgggtctcacaggtgctccagacccatcctccttccccccagagccaggatggggatccaaaaagccaggaaagccagggacaggaacagggaagccaccgggaggagaaaggaaagacagaggggcggagaccagcagctgctctttgaatgaagagaaagcatttcaggcagccaaacagaatgtcagcaaacctcagaagtaattcactcccccaagcccagacttatggggttcccactggtgcaccaggcgcgggccaggccgacccggaacattcagtacaaatgctgggctgccagctcgtccctaaaataagactccagctgttggccatggaactgcttggaaagtagagctccctgggacaggaaaggagccctgcagggcagagaagcaaagctgggggaagtgaggcctgctcccctgtggcagaggttggatgcgagagccgtgtgactgctgccaagagctgctggcgtgcggccccggggtagctgcaggaaggcacgctgacgctggagccatcctgccattcccacaacagtttcttctgaaatcgacatccttcttttcctgcactttgacccccacctgatcttggcaagggtctttgggccacacaaggcaggctagtgtaggggtccctttcccccttcttcaacatcctggcccttgaaggagtgaagctggggccccaggagccacactgcggggaccagtccctgagcaggcaagcaggctaattcacatgggctgcagaggaaggtgagggaggcaaggagcaggcccagattcctcagcagggctgaaaatatccattagtgatgaaccaagctcacacttccgggcgagtatgagtgcaggggtattaaatgtcatgagatgctttgaaacgaaaaagaagttaacttgagacttctgcctctgtgttgccatccatgtacagaggaagtaagacgctagcaggtcctccaagagggtatccacctgtacctcattcctccaccccacactattgggtgaatatgtaacaagcgcacttcttgctctcatcaacgaaacaatgaatatttgtgagtctttcctacaaggccagcactgtcctaagcactttctctgcatttccttctttgagcctcatggtaatcctaagaggtaagcactgttattatcctcgctgtgcagatgaagaaactgaggcagggagacgtgacatagctagtcccaggccaggcagctggtaataggggtctggctggagactctgtgtcgtctgccttgcccatgctaccccaggtggtggcagctgctcagagccatccacacagtgcacacttgccagttcattctatggagcccacacttctccacgaggaatgaagagggatgctgcaaggaggggcagggggaggtcataactgggatgattgaggcttcagaaagtccctgggcacatcccagcctacctgctcctcctcttccagggtcaatgtgtggtctcgaacaggttggcaagagctcaggacttggggctggggctcctcgcctttaagatggagcaagctggctgtgacttgtgttgaattcactcctacagtgcaagaattcttccaggacaaaacaagagcctgcccctggagtctgcattttagcagagcagggagtgctggatcaccaggacaccatacagaagtaagtcctgcagagatgcagtctggaacaaggctgtgaagagtcagcaagcccagtggtgtccagagtggatgccgggtctcagggggaccctgcccagaggtcctggggagctgagtggcagacagggaggtgggaagcggagcagaggagcaggtcttgatcacagagctccaggccctctgagggggtgggtgagtcacctgaggctggatttccacacacagagctcggccagtgaggcacagcccacaggaagagacacaaagggaagccccacctggtgcacacgcttgtatggacaaggctgcttatcccacaccccagagcccccctggtacctgcccgtccatgggccatggttctggactgacttggattcatgatgcccacctagttcagatttagaggatggcacgtcct

SEQ ID NO: 1883875 - DNA, 4001 bp, Homo sapiens; identical to SEQ ID NO: 589021

SEQ ID NO: 1883876 - DNA, 4001 bp, Homo sapiens
gtgtgtctcctggatatagtaagttcctaataaacatctcctctgattgctagccttgacaaatttccaggagaaccagggcaaggagaagacagtgaggcagtgcccgctgctcttcagatcaccaacagaatagagtcagaatatgatattattgaaaccttccaagtttgaattaagataaaaacaactttttcaaaataccaaaaaccttttatttaagaaagtgaaatcgctcgatgtgccctcccactctggttagatgctcaacagaccacagcagacaatgcacctcaaccagggctaagtgtgcaagaaaactgaagtacacaaaaagcaaattatagactcaggtactgtcaggcacaaaagaagaaccaaccctttctaggagtcttgtctttgcttcctttattctttcctcgattcttgtaattgaatgttacaaagtatatcaagaggaataaacgtatggggcccctctcttccaaacaagaaaaggttaagcttttaattacaggccctcaaactatcattttgtgcaattagcaattaactataatcgttgatgagcaaatgcaaagctgcgctagcaatttcccttctcctcatcccaggctgggttatttcagtcttgttctattacagaggaccagccacaaccgcgcgcactctctttcaaacatacacactctctcacttaaagacacatttagttttcggcaaaacggcatctcagcgtgcgattgagaccggcatcccaaaccccacttttgagcagcccaaacgtttggagcccctccgcttcatcactttctgagtggatagaggaggcccgaagaagatgctacctaccagcctctctcaggggcgcaggagagggtggtagagagatgcttgttgcccctggaaactgcaagtaccccccaggtgcacgccccgtcagtggggaggcggtggcaacagcaacgatagttgcatcagcgctaactgctgctgctgctgcgtgttctgccggaggctgccgggagggtacagtaatgactgtagggagcgcacagccgctgcggcggcaggttccctggatcaggaaattaggacaggcacccgggattggaggcgagggcggcgcgcgagccaaccagcggtcgccccgggcccccgtgagccccaggcgaacgcgcggagcagccgggcccctagagcggtccgggtggcggcggcggcagccacgaccacgaccgcggtcactcacgcacgctcacactcgcacgctccccgcgcgggcacccggctgcccggcgcgtgcaagaggagcgcgtcgagggaaaggagggccgaagccgccgcgctcccgcccgcccgccgcgcctcccgttgaccacgccccctccggccccctccccgctgctcaccccgctctccggccgccgccggtgcgggtgctccgctaccggctcctctccgttctgtgctctcttctgctctcggctccccaccccctctcccttccctcctctccccttgcctcccctcctctgcagcgcctgcattattttctgcccgcaggctcggcttgcactgctgctgcagcccggggaggtggctgggtgggtggggaggagactgtgcaagttgtaggggagggggtgccctcttcttccccgctcccttcccccgccaactccttcccctccttctccccctttcccctccccgcccccaccttcttcctcctttcggaaggactggtaacttgtcgtgcggagcgaacggcggcggcggcggcggcggcggcaccatccaggcgggcaccatgggcacgtccgcgctctgggcgctctggctgctgctcgcgctgtgctgggcgccccgggagagcggcgccaccggaaccggtgagtgaggacgcgcccctccgccggcgggcgggacccagccggggcaccgggagaccccgaggcgtaggtctccgtttgcccacccgcctcctaggaggcgcctctcggttctcctcgccttccctccctcccctccgtggtggcgcctctgagctgtcagcgccgaggctaaagggagccgggcttggggaacagcggggttcggggtgccccgacgcctcgcctgaactagtcttctgcccctcactccgcctcccccagagccgctgcttcgcctcgtttctcgccctcttgacgggcgccgaggtgcgtgggcttctgagcattgaacaatggttctgcctcctctgccaggcgcagtgttgggaaggaggcagagggccaagacgtgtgcggcagcctcgggcgcaccctcgaaccccggggagtgcgggagcggacggggggagaaggtgagcgcctccggggacgcggagcgccaggggccggccgggcttcagagtcttccggcggccgcgagctggcgcacgttcggtgggcggcggccgggaggctccgcggagccgagggcacccggactgcgactcccccggcgcggggccgcctctccggcgtgcggggtaggggagcggcggggctttacgcaggactctgctctgggcgcttctcctctcccttttccccgcctcgggcggcgtttggaaaccgctcgggtctcccgtgtagctgaacgcggagggggagtggaggggagacttaatcaggttagtttgctgaccctccttcccggtgacgtttcctcgagaggaattgagtcctaggctagtgactgtaattagccttcattctacacaatagctcaaaggagcagcgcgagagcgagcgtgtggccctgtcttgttgggaagggcggcggtgactactgtcgggtccccagactctgccgcgggggcctgggggccccgcctggtcgtcagccacgttcccacttggggcctcgtaactttcctggacaggcgacaggaagcctttctgagaggactcagtcggaatcctagcgcgtccccgaagtgatcttcagatgtgacgccgaggggcttgcttgccagctgcagggaattgggactgaaagccgcccaggcccttaacacccgttccagagtccctggctcccgtcgccgggtggcttcaggggccctgccggcctgcagtcacgtgctcctgaagtgagagcgaactttaaagcatgtggtcaaggagcctgtcgggcagcgcctggggtttttacgtctccgaatgcccctgccctttggttgccactgtccggagcgtgtgaactgggactggcctttccgccctctgcgattggttagcggtgcgatcacgtttaggttggtcacatggttccgcggactcttaagtgggcagcatgggcagtgttattttcaatggaaagtaggagactccacaggctcttacgggctgttctctcaaatgccttcccctgcctggactctttgaagaggacgaatgtgtagtgaacatggaatctgatgtgtaacaagcctgagagcctagaaaagctctgcttacaagagtttccaaacgctagcattaatcattaatagatgagtaatactaacttattaaacgatttctcagtatagtgccatgacttgcattatgccttttgtaacatttcaaaacgctaaggtataccagaaggagggacaattatccaggaaggtgagagaaaagtttcgtttttgctgcatgtcccttccactagaggttaactttaccttatagaatgctaggaatgcacctaaactactgacatgagttagtcaaagccagatgttcaccttgtattgggcaggtgaggatccttttcactttgtcacatgtgaaatatttgacatgccatgaacaatggaaaaacaaattcttcaaaggagaggaagcagattcttccagaactggaggaaatttgggctgaggcagttattgaccctaaaccaatcccaaccggcatctgtcttaagttcaaagtctcagggcatgtgggctgactttctaccctggagcttctacacatac

SEQ ID NO: 1883877 - DNA, 4001 bp, Homo sapiens
gttacaatatgcatccacttatttctaactcttcctcagcagaattttttttcattgctttatgcttatacctctaacttttcagcaacatcccttccccttcctcacttccacaaaattttcctagatcgtagaaaactaatatgaaaacgtttgcaagatacttaagatggatttttggagttctggaaattcttgtaactttgaatttgcagcgctagatataacagcggaattttgcagctactgtgtatctggcttcttattaatagtgcaatggcaaaatgcctcattatgtagagctcttccccttcctaggcattttagcctctattcgtttctccgtgcaggtattctgaagcagactgttagctgaatgagagagaagcaggtggggtggtagccaatcagaagggccaagttccagttcttccacagaacattggttgtatgaccttgcacacatccctaacacttcagcttcattatatttaagactaggaggttggagacctcataaaggtccttcaaatataaaattatatgaaaaacattcataaactcaggtaaaaacttacagtttttgtcaggcattctacttgcaaaggcacaccctaaacatttaattttgaaaagtcggtgactatgcacaaaaagtagtaaaatgacacaggaattaatagaaatccatcattattcatttaacgtgtaaagagaaaacgctcaatgtacactttttcggtcctgcagatgattaattacagttctctaaacctcacatttagcatctctgtgacctcaggcctttgggattacttctaagtaagaccaaacaggtcgaaagatctgtaattgtaatttattttaggtcagtggttcggtggaggcataggggtcaagggtccagcactcccagtatttcttggagggtgttcagcagtttccagaccggctgactccaactcttatctgcagggaagcgtgttactctttggaatgaaagacagctccgtataaatgacttgaccaaaaatgggtgctcatctcagatgcagggcagggactatgtaactccatcctcgactcgcagcaggaagttaactcctcctgagagccaggcggtcggaggaccaggcggggaggttacaggcaccaagacacccaggctggctggaccctcccaccctgtaatgatgaggggagatgctccctgggacagcccccttgaagcttctggcgacggggctgggatccgcccacccttactcaggggcgagccctgtcatacgcgtggaagcggccaccaccttctagggggaggggcgttcccgtcgggcgtaaccgccccgccctggggggccgctggggacgctgatctgcaggagggggcggggtcggaaaaaatccggtagctccagaccggtgtcccgttgccaggcgatggggaggaggcggggccgacaggaaagaggagccgggctcggcgcgaaaagggcaccctccagagccgcggccgcgcagccgcctttcctccctctcagggctgcgcgcccaggtctgcgccgcgctccgcctccagccgcgcgcagacttgcgcacgcgtcgtgagagcgaccgcctccgtctctcgctgggctcgctagggctgcgcgttgggccagcgggggcgccgcagctgaagccgccccggagccggtgaaccgaattacctcgagggaggggcgtggggaaggcggcgggaggaggagcgcacgggccggctgccgtgcccaccacggctgaggaacatggttttcgagtcggtggtcgtggacgtgttgaaccggttcttgggggactatgtggtggacttggacacgtcccagctctctctgggcatctggaaaggtaaggaggccgccgccgccgctccccggcctctcgtgcttcccggccgtctcgctgcccgagcggcgtcctgcgttctcggggcttcgagcaccttgctcgccgggtgcagccacctgccgccgcccgcctgtgggtcaagttacgtaaagccgggcggcagttccctggcctccgccctcgagttgtttatattttgggggaaaggagagggtcatgagtgcgggatgaaaaggtctatattttccgagcggagcggacttgccgtgggctccgtgggtctggcgttcaagtcccggcgaggggccgttctctacccctggccccgcacggtccggctttagccgcgcggggcgaggaggcgagacgacgccttcctgggctgggtcccatccctgtcctttgcccccctgggtttatgacgaaggccccagaaatcccccgcgtgttgcatgctgcctcgcacgtgaaggcagggcgctgtgaccggggacgcccgcttccttgcttccccagcctcaattcctggcttcacccgtggtgctttctgctctcccccttccggccctaggacccggacgccggctctctctcgcctgggttcggcggataacaaaaaggaaactcaagtgcaaagtaactcaaacagttgcttgtgtggttgcagttaacagcctgacctaggaatgtgtaacattttcaagactttaggatatgtgggtcagagtgaattgccgaattttaaagaaaaaccagggcgtgcggtgcaacgtctcagacctgcaaaagaccgggctgaacagggccctacgctgcctaggtggtgaaggaccgagctttccttgtgtccgtttagtgtggtattctgccttagtgagagcctcatttttagtgtttccatctgtttttgcattatgcgcttgtttattttaaacacccgctagaaattagactcctttgtgaaatgaatttcccaggccaaagtgagggttaattttgtgtgtgaagtgtgtgtgtttaaatatatatttaaagtaatttattcttgtctgtgcacacacttccagtcttcttctaaaatacttaccttgactcttctcgtttatgagataatgtaaacaggtagtttagtttgattttaaagaatgttactaccgtggggacctagtatcatgatggagagtgagtggactacaaaagctagggatatagtgatagctgctcagcctgtttgattagtacaagaaacttgcagtctgtttatgctgcttcttagttgcaaagtgaaaataaaatttgtctcccatgtacctcagaaggaagccttaagaatacttgaggtgaactttgatctgtagtggagtcttgcttccacattcagggtggaggtttgtctagagtgtgattaatcaacttatttatttgtttaaaatttacatgcagtaaaattcactcttgtgatacagttctgtcttgacaaatgctaagaggcatgtatgcaccaccacaataatggcacataaaaggttcatcaagcctcccgaattctctcagctgctcctttgcagttgatctcaccccgccaccacgcccggctaatttttagtagagagggggttttgcaatgttggccaggctggtctcaaactcctgacctcaagtaatccgcctgcctctgcctcccaaagtgctgggattacaggcgtgagccactgcgcccgcctgactgtaagtatttatctgtttgctggttgaagaatatttcagtttttggaggttataaataaagccgtcataaacattcacgtacgggtgtttgtgtgaacataattgttatttctcttggataaatacctaagagtggttttaaattgggttgtacgttttttttttttttttgagatttatttcatataccataaatttcactcttttaaaatgtacaattcagtgttttttagtatagtcacaaaattgtacaaccatcaccactctctcattccggaatatttcagcaccccaaaattaaatcgtatgtccattaggagtgactcccaatttcctcccttctcactactccacctctggcaaccactaatctttctgtctttatg

SEQ ID NO: 1883878 - DNA, 4001 bp, Homo sapiens; identical to SEQ ID NO: 589034

SEQ ID NO: 1883879 - DNA, 4001 bp, Homo sapiens; identical to SEQ ID NO: 589041

SEQ ID NO: 1883880 - DNA, 4001 bp, Homo sapiens; identical to SEQ ID NO: 589051

SEQ ID NO: 1883881 - DNA, 4001 bp, Homo sapiens
tataggaaattcttcctctactacccggaaagaggcagcattagtatcactctaaatgccacatgtggtgatgaacacggtgtgagagggactcacaatgtggaagaagtgaaggcagaaaggaaactaggctgccgtttgggatctggacagctgattacatcttccctggatatcatgacctaaccagccctccagtaaagtgtctttttccacccagcttgatagtcactcatccctctcaacccctgggaattgccttctgcaagttagtccacagcaaagtcacacggtctgtgatggcttctggatgtggcaacatcacgaaatctgatgcatatataaggagtcaacaactgcctctggggaagcaatcaggacctgctcctttctagaatcttctgcctctgctctgacgctctagaagaggtctccgtcatatgggctgttcttctatggcagtaggccctaggactccctcttgactgcctcataggagctgctttgctccagaggggctgggacttaggcctgagaaacaaactcaattgaaaccttcacctaataccctaaacctgactcttgagattcactagaaatgtgctatccagcactgcagccatcagccacatagaaccattgaacacctgaagtttggccagtgctacaagtcgaatatttaggaagtaaaataaagcagtaaaactgactttgtctgcctcttctttttactgtagctactgaaaaattctaaacttttttttcttttttgagacagagtctcactctgtcactcaggctggagtgcagtggtgcaatctcggctcactgcagcctccgcctcgggttcgagcgattctcctgcctcagcctcccaagtagctgggattacaggagtgcaccaccacgcccggctaatttttttatttttgtagagatgggcttttgccatgatggccaggctggtctcgaactcctggcctcaagtgatccactggcctaggcctcccaaagtgctgggattacaggcatgagccaccgcgcctggccaaaaattctgatttatatttgtgttttgccttatctttctattggacagcacagcaccagaatatcaatctgtgcctttgaggagacagcgggaacagtacaagaggattcaggagcctcagcctgaatcagagacccgacaaatcgcagaatgtatctaccacttggtgagattctgtccacatttacttcacaatcatctacacagatctggtgacaggccactctgcataagcgctctgaaggctttaggcaggtactggcaagtctgggtttcaggcagacagcatgttagaacgagcaggacagggagtcctgcatttgcatctctcagcatttgcatctcacctctctcacctactagtgtgtgccctggggtacccatccccatgaactttcgtccatttttttaaaatggcacgtttataccaaagaggtcgttgtgagggtcaggtgaaataccaaacgatgagaataagtgtctcataattgtgagagcagcttacatttcacatagtgactattacagacacttaacaaaatgctttacaggtgacaacttatttaattttcagaataggaacacgagttgctagtaacctcctcctgttcgccgtcaacctcatccacgcacattcctcttcccggcccgcaaccccgcggggcccggcagcccctacacctgcggacaggactcggcctgggcccgcgcactgggccggggaggagaggggagggccatcctggggactcctgagactgcctgctgctgtcctccgcacacaagcccgcccgtccccaggttcctgggccgcgcggagccctgtcaccgacgctctcaccccaggtgcgcagcctgggctcccgcgcagacctaaagactcggacaccgtgtccctttcaggcccgggagggcagacggcaggaggtggggctgggtttacacatgcgcagagcgagccccgaagccccattcccaaagtgctgcgcggtaggcgcgttaacattgaaaactacagttcccgtaagcccgtgcgtccgaaggaagtactataattttttctgctgctttgaccggctgggagggaccttcggagcccagggatttcccaaattcccggaggttgtcagcatgaccacaaactgcgaagcgtggttcttgatgcgatcctggttggagaaaaaagcacctgaaacagacattaacaattggggaaacatgactatcgacaggacattagaaatattaaagaaaattaccgttactttgagaataatagctagacgatgtaggacattgttcttatatttaaaagatatgtacagaaacatttacaattgtatgcttgtagtttaattgaaatactttaaaaatttctcaaaacaatgaaagcagatatagtaataagtgaagaattgttaaatctgtataatacgtgcttatgatgctcattttactattttctaccattctgagggtctgattttttttttttttcatactcagtaaaagacgtgtggggcagtgcagtgcagggggagtggagaggctttactatcccttcggaagtatgccgttaaattcaaagttgccaagggaagtaaaagtacataaaaatagctttatgaataaggttgtgaaatcgaacaaatactagaaaacataaacgagtaacatctgtgatcagcagggtttatgggggttggaggaggaagctagctgttcaaaatacatatgtgatgcgtgaaaacacatgcaacccaaaatatgaaaatgattattacaccaaccttgcattttcatgaggaaaccttttttgaaacgtgtatacccatctgactgtttaaagaattaggaatagataggtactataacttttttttaatttttaattgatagacttttcttattttattttattttattttatttttttgagatgggttttgctctgccgcccaggctggagtgcagtggcgctgtctcggcccactgcaacctccgtctccgggctcaagctactctcccacttcagcctcctgagtagctgagactgcaggtgtgggccaccatgcctggctaatttttttttttctttcgagacggattttcactcttgttgcctaggctgcagtgcaattctcggctcaccacaacctccgccccctgggttcaaacgattccctgcctcagcctcccaagtagctgggattacaggcatgtgccaccacgcccagataattttttgcatttttagtagagacagggtttcaccatgttggccaagctggtctcaaactcctgaacttaggtaatccaccttgcctcggcctcccaaagtgctgggattacaggcgtgggccactgtgcctggccttttgtattttttttttgtagagatggggtttcactatgttgcccaggctggtctcaaactactggggtcaagcgatctgtccacctcagcctcccaaagtgctgggatattaatagatgtacagagcagttttaggtatacagaaatattgagcagaaagcacagagttcccatatacctccgctcatcaacccacacacagtttcccctattattaatatattgcattagtttagtacatttaaaatacatagtttatattagctttcattctgtctgttctacagttctgagttttgccaaatgcatgtcttttagtgcgatttccaccaatgcaatgatgtaatatccaccattacagtatcataaaaaatagtttcactgcctgatatggtttggatttgtgtccccgcccaaatctcatgtcaaattaaaggaggggcctgatgggaggcgattggatcatggaacagatttcccccttgctgttctggtgatagtggattctcacaagatctgatggtttaaaagtgtgtggcacttcccccttcgttctctcttttgctttgccat

SEQ ID NO: 1883882 - DNA, 4001 bp, Homo sapiens
gtatgtgtgtgtgtacatatatatatgtatgtgtgtatatatatatatgtgtgtgtgtgtgtgtgtgtgtgtattagagataaggtctcactctgtcacccaggctggagtgcaatgatgtaataatagctcattgcagccttgatgcagccttgaacttctaggctcaagcaattctctcctcttgactttccaaaatgctggaattataggcataagccgctgtgcctatatatcttaaaagtcatatcttgtatattaaaagtcacacacacacatatagatacatttcccatacatatatacatatatatgtgtgtgacttttaatatacaagatatgacttttaatgcatatactatgtattaaacttatatacatatatatacacatacatatatacatatagaaacaggtggtctgacttttatgtttattgagggaaacatggattttttaaaaaacattgagaaacactgccttaaaatctcactacacatctggaccatctgtttcccttctcttgatctatctgtctttgaaaaggatactatggatatattcacgccagaaggaatgagagagagaacaatactttccaaggaccattagcatcaatcatcaggtaagggttttacacatatcatctctcagctgttcttcacaactatctggggaagtattatcagcgcactttataattgaggagacagagattgctctagaaatgcaatgggataggagagctaccaacttccatttggcctgaaaggcacaaagatataaaaaaatactgaccctgctgttcagggtcttagcctcagagcactccttgcccaggctgttcaccatcctcagttgctcccaagctgagagctgcttgccctccagtgcatagtgtgtgtcggaagccactggttgtcctgaggagttaaggtggctctgtctgtggcagcacctcactgcagagacctccaggcccaggactgagtgtctgtttggtctagaaaacccgaactcccctagtcttctctggccctgtaacttgcagataattaggattaataccacaaataataagagctgggatgtactggtgcctgccatgaccagagcctgaatcaagctctttatattaggatcccattttctcctgcaacagccctgtgaattttgcctgactttaaaaaaaaatagagatgggatcttgccatgttgcccaggctggtcttgaactcctgggctcaaacgatcctcccactttttggcctcctaaagtgctgggattacatgcgtgaggcacagcacctggccattactgcctttttacagaagagtaactgaggctagcagcagcccaatgtcatgctgctggcagaagtatcagcttgctccttcttgtgcttggtttccaattcatgtttttagccattaggccagcatttcccaaagaataggctacacggaccaacctcatcggaagctcattttaaatgggtagagccctgggtcacatctaacacccgctgagctagaatctctggagctgaagctggaaacctgaacttcaatcagatttccctggtgattcttatgtacatcaaaatttaagaaccactggaatatgatcgagggaaatcttccagctgcaaattcatgcttgccatgcaggggcacctcatagccactagatttaaacttaaggattagtgtgcagatacttgccaccagatcactttcataattgaggcagaaatcaccaaccattgctgtcatctctacagggtttccttggagtaaaactggtctgttgcactgctgtacttcatatttaccaccaggcggcatgagctcctagtaaagcaacattcttggaacagcctctcaggctgaaacagccatgcccagaggcaaaaatcaggcaaaccagaaccacccactgaatacgcattagtgaaattttagctccttgtgagccactcaactgcagtgcctaagcaccctcctcccagtcatctatcagtaattcatcccctgactccatgagatgcccagtgacttaataaagggctgggctttgcacaggtggctgagtccccttcatgagcgtcacaccaatctccagaggagacaaaaccagcaacatacaggtttggcagccttctgaatcctcttctctcctctaacaatagcaaaccagactctcaaaggaggggaacatccttctatgactataaaattttcctatgacaggcttttgcaactctggaggacagcatgggtttctaatgacattaattcacatcatgctgccattactgtgagcagatgtgtgggaagaggcattatttacttaaaaataatcctctgttgtcttgggaggccgaggcagacagatcacctgaggtcaggagttcaagaccagcctggccaacatggtgaaaccccatctctactaaaaatacataattagccaagcgtggtggcacgcacctgtaatcccagctactcaggcatctgaggcaggagaattgcttgaaacccagggacaggggttgcagtgagccaagatcgcatcattgtactccaatctgggcaaaaaggagtggaactccgcctcaaaataataataataataataataataataatcctctgttgttaatgtggtatcatttgtgtagctaggaaattctctttagaagaatttctaacagaacagcttggagaagaacgtctgactgtagttagggaggaggctgtctggaccaacacacacttgcaggcaaccagaagccattgctgcagcgcagctcagtttattcagaaagagacagccaaaaaaaaaaaaaaaaaagagagagggagagaaaatggggcagcctgagatagggttcttccttttcagagtatgaagtaatgtttattcctgggagagcagagtcaacttaagtaatgtctgaagagcactatgagctaggacagagagcagtgtcaaggaaatagaactaggcaaggttctgcctggatggaacctgcagccaagtgaggaagatgggcactaaataagcagttgggtacattgtcaggggttcaaaagaagaattatatggggtactggcttttatagccatgggctctaacttgagccaggagctcaggagaggctgcctccctgagaagatagtgcttaagcagaagcttaaagggtaagaattgagtagacaaaaaaaagggctgggggctagaaggggttaaggtttgggaaggggaagtaggacctgcatgggatgtgttccaagcagaggcccagagatgtaaaagtgctgcatacctgggaaaaagagaaccccaaagaactggaccacacacacaagtgtgaccatgacttcactacaattttccaaagtaatattcataacattttttctatgaaaaaatcagacaccaatttcaagcaatggaagcaatgttgcatgagaagtatggcatctctggaccatctgcttttcctgagcatttcacctttcaggttaaattattgcttttcctgagcatttcacctttcaggttaaattattcatctcacatctgggaaatgaacatgcaaacattgccacctctcagtctaatttactcatggaggctgtagctctcccagaatgtcctccttagagcaatttctagccccttcttggctaaagggaataaaaatgattactatttgtctgggtttgaaacaatgctatcctcaaggaaaactgatgatggaacaggcttccgtatcgtgaggttaatgacagttttccagaggcctaaaattcaggggtccttaagcagatttccttatccttggagaaaagtatgtggtattgcagacacaccacatcaaaaggtgttctttttatactcttcttagttcttgccttctgtttctttccctgcacatttagttttgagccttagtcctctgtcccttcattgaatcaattatttttctt

SEQ ID NO: 1883883 - DNA, 4001 bp, Homo sapiens
tggtgatatttctcattgattcttgattttgggaattagtgtcttctttcttttttcttggtcaatttaactaaatattatttatcttcttgactttctgaaataagcaattttgggtttctttggttgtttttaatgttatcctgttctgtatttatcgttttccactgtgacatttttatttcatacatcctacttaatttcggcctggtttactcatctttttctagagtcttaagatggaagttttaattatcaattttagattattttttctttctgtttttaaagctatacattttcctctttacactgctttaattgcatcctgtaaatattgctatgttattggttttttgtattttaagtttataacgttttatttataaaaataggctgggggaaaaggatttataccactgcattctttcctgggggagaactattttgggccatttttgtaattttttttcctcttaacaattttcagagtcacatttgaattccttcagaatggtatttgtcaacaaaaaagttgaagttaaaaggaggagggaaaccggggaagcatgaagaaagggagtgagagaaggaggagtgggcatacagcagtcaacacataaagacaggcttttactgaaatgactctgccctgtgcctcatgcactaggtgatgcaagcatactgctcagacgtcaacaccaaatgtcatttagaaatggtagtcttctctgggttctgaaggacacttgttccccaacatgacactattaaatgatgctttcaaggcagacactaagacattactccaaagagaaggctctggtggcagatgctggggccatattctttatagtccttcttggtgtgacagacctgaaataactccagagttgaggctagcattaagcttccaaaccataaggcatagtgctgcatgtgatggattaccacccgaaactctgtaagcttaggtttgattctcctgccactgagctccttactgagttttaatctggcatgtaccactcttcaaatctctctgtagttgagattcaaatccctgaatatggtcaaaccccttgaaagaacaacattcttatacagtggacaatgcacatcaatgggacagttttgtattcatcaacaacattcaagacggattccataaagtctgggttggcaaactctgggtaaaaaaatatttcaggttgcaggaaccttttgtaaccaacatctattatgaacttctcctggttgatcacattgatacctgtgtactgtttgatccacttccagggatccacatcatacttagcaaattccttgactatatcagggcaaatgtaacagtatttctccttaatggcttttgtggtctccagtgactgctcaagagggattcctacctccctctcccttagtagttgttgaatgaaatacacagtatcacctacaatcaggatgtgattgatgcagctcccaattacataaccttctacaactgggagaacaagggtgactccatctcctttgtcaatgactatactcattaacatatattcacccacttgttgagatgtccaagatacttccaaggctagtacctcctgaactgcaatgtagaatcctggtacattaaataattcaaacataatttctgcaaaaatgttctgtattttctagtgtattcagtggaagttctgtcattgcaaaataatggtcctcagattctgctcaaaatatttaaaaaccacttgctccatgaacctttccataatatcccagtcttcagtgactccatgtcatattgaccactttgtagcatacgtagatttatcaatggcttcatcctgtatgaaaaagtcaagctcatcaactcccctcaacattctcccttgggctttgtcaactacctttgctgactctctgacagaaatgcatgaaagaatagtaaactatgcaggctcagtgttgcctgcatagccaagctcggaatatctactgaggtgatcacagggctgagacccagagcaatgggggcagctcaatctccaagtgtgggctggatgtcaggggctgagagcaaggcaatggaggagccagggtgggcactgagtggctcttacctgatgccacagtctgccacacaggaaggcaggaagcccgccatgcttggaatacacaacacttagccccactggccaccctggagcaccctgccaccatccacttggcaacccactcaccccatacaccctgtctcctgtgtgtttccacttttattcatcttaagatatattgtagatgggtgcagcaaaccacatggcacgtgtatacctatgtaacaaacctgcatgttctgcacatgtatcccagaacttaaagtacaataaattttaaaaaaggaatattttaaaggatcaacctactatttgacagtcatggaaatagtgaatgggaattaaagggaaaaaataagtaagcaaaggaagggaggaggaaaggggaaaagaaaggaaagaaaaggaaaagggaaatacaagaaaaggagacaaataaatacataaacaaataagtgactgaaagtctgagagttggcaaatactattcagataacactgacaaaataggcctcttgctaaaaatagcagaatgcacaaagtacaggagcagcctgtctgtcctgagaggctggggaggtttaggaaaagaggctggagagatttgagacaggtctgaagtatgtagtcagtttttgcttggtggaaaaagtaatcatgggtgattcagaaaaagcaagatacttacataataactgttttgtacctttttttagtcttctattactttcataaaattatctttgcatcaaaagttattaacactttcaggactccttgtatgcaaaattctttgaattgcatttcttaatttgtgatcgcactggtaatttatctagcacaatgaactgaatgtgtgtctttatgtttaaagggaaaaataaaattcaaaacagcatatttgatataatttatgattagataatagagaattatcaactttaatataatttttagaaagtaaagcttaggctagtcacgatggctcatgcctgtaatcccagcactttgggaggctgaggcgggtggatcacctgaggtcaggagttcaagaccagcctgaccaacatggagaaaccctgtctctactaaaaataccaaattaaccggcactaacgattcatgagaaatctgccccatgatccattcacctcccagcaggacctatctccaactttggggattaaaattcaacatgagatttgggcagggacacatatccaaactatatcaacagagtttcattgtgttgatcgggctagtctcaaactcctagcctcaagcaatacttctatctcagcctcccaagtacctttggggattataataatcaatcatcttcactttttacaatctactttggtttaataatttttacttaattccagtgttatatagcaactttgatccaatgtatctcttatatgctatgaactcagcagtattgttgtagttattgcctataataatcagatgcttttttaaaaaaagagatgaaatcagaatacacacacacacacacacacatacacacacacacacacatacacacatacaatcttttatacttacaaatttatttaccatttcccatgctgtttattccttataggttcaagttgccatctggtgtcatatccttttatcttaaaagcattttctttagtgtttctttagcaaggataagttctttttatttttatttatctggaaatgtctttatttcagctccatttttgaaggatcatttaactggatacagaattcttaattgacagttatttttccctccacttttgaaatgtcgcttcataagacctccatttttttcagataaaaatgccagtattgataatattactgttcccctgtatgtga

SEQ ID NO: 1883884 - DNA, 4001 bp, Homo sapiens
tgggtgatgggaaaaccatggagaacttgagagggctcacaccgggcgctgctgggatgaccaaagacctcagacaagtaacgtgaaattctataccacggtttacctctataaaacaggagtaaaagtgtgttcctcacaccattatcatcagcagtactttggcgcatccataagtccttcctgagagcctcacatacagcagggactcaataagtaactgctcatagattcacgtgcactgtcagatcagttacataaatatgaaatgtggccaggggttccaaacatcgataccaacgcagcttgaaaggaaccagaaatggaggaacagtatttgatatgtccctttaaaaatctgggtagaccagcagtttaggaagtgaacacgggcactcacaggaggcgcggagctgctgtatcgcacagtaacattaatgcagtaagctcaggtgtgttggccgaagacacagccattggcgagaacgtagcccacagccgcggacacgagtttgtcgagaggctgcacatgcattcgggttattcacagccacctccaagaggggagtccataaagtgtgggggctgttattgatggaggcagaattatatgcctcttactgcacagatatatcagcctggcatttttctacttactccaggatttttataacgttcagttcaatggcattcttgcttagtgaataattttaatttgtgcatccagaatgataaatttatgaatgttgatgacagcaaagacccatccctcatcggcttctccccgtgcagctgggcccctctcccctgtcgtccatctgatgttcttgccaacaccccttcaaatatctcacgctggacggctctcctgctcctctgatgagatgtgtgatcaaacggaagaaaattattctgatagactatctgacccccgtcttaccaaaccaaatagcatctcacaatattatatttttaactttctaatcatcctgttatgtatatcatcctgttatgtatatcaagtctttttacagcaagtctttctaatcatcctgttatgtatagcaagtcttcttacaacagaaacagcattcttcttgccagtcatgttaagggcattgattttaatttagtttttgtggattattgtgtttgcttgatttaaaatgaaaatcaaggaggaagaagtttttaaatatcatcaggcagtttgctgagttactactgtaagcaaaccccgtaaaaatcatcaaaacagaatcctaggcataggaaagaaaactccctcataaccaccgatctatgtggggatgagaatgtctctataaggaacgctagacatgtatttaaaatactagcagagtcatatcgtaaatgaggatgcgataagtacaagaagcagttctccacaaggaattggaagtgagattctgtggcgagcactgtagttttaaactgagggaagcggagggagaagttcctgtaagaattctttccctttgtcattctcctcaggctcctgaccagtttctgggttaaagagaagggcagtgcctctctcgtctgtggtcacttggttaatatcatccccaaatgcggaagcttccaaaaagctggagtggtttcgtttggaagtcagagctgtgcacaaataagttattttctctatttcacataattattaacaaatgcaaattaagatgcaggggatgtttctatgccaggactcacctgtggggaactgtgaggctgatgaggcaagcagcgaagtggctgcctgtgcccgctcacgacccctccacgcaccaagtgcgtgagtcagggaggtgccaggaggaggcgggaacagctgcttcatgtcatccggctcagtccgtgtgtgttgctagaaaggaacacccgaggctgggtgatttatgaggaagaaaggtttgtgcagccatggctctgcaggctgtacaggaagcgtggcaccagcatctgcatctggtgaggccccaggaagcttcactcgtggccgatggggaggggagcggcctgtgcagagatcacgtggtgggagaggcggtgggaggggccaggctcttcctaccaatcagctctcactgcaacacacagagcaagaactcattcataaccaggaggacagcaccaagataatcgtgagggatccacccctgaccccagcatcccccaccaggccccacctccaacactggggatcacgtttcaacatgagatctggaggggacaaacctccaaaccatagcactgactgtgccactcttaagagacagttggacagctccttgcctcctctacaagactagggatggggttccaggcatgctcgttaatgactgccccatctgcaccacctgccccatctgccccacctgccccacctaccccacctgccccaggccatctctccaacttcccacctgtgtcctttccaaatcccaggagcagccgcgcaagtgcaagaccgccctgctgccttagaacaaggctttccccagaaagctgtctctacctaggacatgccctgtccctcgcttcctgagcaacagcccctcaacacagatgcacatgcacgcatacacacatacacaaacacgtgcatacatgcacatgcacatatatgcatgcacacacgcacataagcacacacgcacacacacccatacgtgctcacacacagacacacgtgcacatgagcatacacgctcacacacatgcacatacacgcacataaacgcacgcagacacgcgcacacacacaagcacatgaacatacacatgcgcacacacgtacatgctcacatacgcacatacacacacataaacacacaagcacatgagcatacacatacacacccatacatgcacgcacacgcatgcacacatgttcaggccagctgcctcggctagctctgtgcaaatggtgggcgtcttctgcaagccaccctgtcttcccaggctgtcttcctctcaggacgcacatacaacccctccgaggtaacaggacacagatgcaacccacagagccgacaggaaaacgtggaccaccagcgtcgggctgctgatgtactttgaactgaaaaggccccctagatacccacagaactgcacggctgaggcgaagagagaccatgagaaacagagataccaatgtttcagtcaaggaaaaaattagagaagaatgtggaataaaaagaatcataaagtgaaataaatgttttcagattttagatttcagatccactcccgcagatgaaatcgtgagattcctgaagaaaataattgcaccagtatttgatcattttacagttttgattatgcttatttccagttttccaggaaagaaatctttgtgtaacctcatatgcacgtgttacaagtagaaccagaaattcctcctcccccaaacatacaaaaaggaaagcaattatttaagtcaggtacctgacctttttttacagctattagtacaaaaagtgttttctggggtggtttcctggcatgaaactcaggatttatagaatctcttcctgttcgtgaagttattattattattttattactaaagcccttaactaaagcaaggatgcttacttaaattggcagctagctgtgaaaatggaaaggtaaaaagacatagcagtatgtatttgtggatataaactatctttaaatctggaggctcagacatagattggactatcctgactattttctgtgtatttcattccagccagactgctagttctaggctggaaatattattctcaacatagaattacaggcctttgtgtcaccgctcactgtgatagccagcagttcctggaccctcacagcacctgtacacagcacacatgaacacacgcgcgtgtgcactctgaccctgcctaccacctccccccgggcagccaccgggctgtgctgttctcgtaatcaaaggtggagatgaggaaagtgtctgcctacagcaaacactc

SEQ ID NO: 1883885 - DNA, 4001 bp, Homo sapiens
caaagcttttcatttttttgctttttaaatgcaagaaaatatccagccactcccaatatctctctcaaatactgcagatatttttaaataccaaataaaatgtcaggctgagcattttctaaacaattttcttcctcaaactaggcagccttccccacgattcgttaagagtatttaaaaataataaggcatggttggattttttgagcaaatgggagatggtggtagactaaaatttctacagccttagtccagtggagagagaaaacgataaatgcatcacagtttgtgtcaagacaagattcattttccacacttcatatgtgggaagaggaaactacattttaattagcacatttttagggaggaggggggggatgaagatgaggcggatggcgtgaggtatttgagggggacgagtctgcagatgaggaaaggaaatgaagtggattgtcgccagtgccttggaaacgaagggggataagggtggggaacgaagtttgttgtgtgtgttagggtggggttggcccaagggaccatgaatcattagaatggcgctcggaggggtgtgcttgcaagtgtactggtgcaggagggacgtggaagtcgtgggtggcagagaaaagtgtgcaccgctgggaggtctatttcaagaataggttgggatgagaaacatgtctgggcgaggggggtgggaggcccggtgtcacctgtggatggatccacagccctgcaattgcgtgttgcaaagtttgcccggccccgcattcattttgaaggttcttggcgatgcctcgacttttcgcctcaaagaagtgagctctcataaggttcagaggccgggagccaaagcgggagtgaagactctcgaggggtccaaatgaagcagaagcgagagcccctgtcctccccctatgtggaggtgaagcaggggttgtggggactaggcgcccgcgaaggcagctgtgctgagagcaaagtccaggccccacggggggcgtgcggaggttgaacctttgcagtggcctcctacagccccagcagccagcgtgggcggccgaggctgactcaaagcggcggctcagcctcgggagtaggagtagggggctcgctcatttagggcgggagacatttccgaggcgcccctcctccccttcgcggtcgggtttctatcggggtcgtttccccctctggccctccggggacgccgcggattcgagctgcacagtcagaagaggacgttgaaaaggcgccaggcagccgccccgaaccaggccctcccggctgccgggcctgcaggcccccaccgctgcggcttcacggacttagagcttgagggcgcggagggggctgcgggggcgggaccaggactcccgaggggcgctcggggcggggccagagagagctcggggctgccagaggcgaggtcttgaggaggcggggccgggaggcttcggagcccaagaggcggggccagaggcgtagggggctgcgaggggcggaccttgggggcgtgaccggggggggcgcttggggacctaggggcggggcgttagggggcgggaccaagggacgctcgaggggcgctcggctagtcccgccagagcgcgagccgccagcccgtaacggtcgccagtgtgaggggcgggagggaaagaagaggggtttaaattagattttttaaaacacagagcaagcgccagaggcgtcggcatcccaggtgtcgccgcttcctgctgcacagggctcggcgtacaggtccctccctcctcaagccccctccccttctcccgccctaccctctggggctctgcggcgcttaagaggcggccgcagcggcggatccggcggctgctgcagcccgggcggctgccgagaaggagggaggggaaacacaaagccggctacgcgctgcgaggtaatcttgcggggagaggacgcgccgtcgtcccgcctctcttccgggccgggacgcgggcacccgcgcgggggctagcactggggacgctactgggggtcgcgcgggggtagggagcggcggctggcggggccaaggggacttctcattggctgtccctgcggcctcaggtgaacccttttccggggcgggagtggggaccacggccaggccagaggggagcgtacctgcgggggagggtccgggggtggcggtgcacggcctgcggcgccgccgggtgggcccgacgcttcgcgcgtctgctggttttccctaggaaggcggggagtaccaaaatcagttactggctgaagcttaggtgaccccggggaccttaagccctgaaggtgcgctccaggggagtgagaggttcctgcgcttagaaaaggtggaggaaagggagcgaatgttggttttagttgtttttctcctcatttaaaaaaaattttttttgttacaagttgaaagtgttcagtcacctttctcctataatccgcttccccaccccccaacacagacacacacaaacacaccgcccctacaaacgtatacatgttaggttgagcttcctgctaggggtgacaagcgaagttggcagcaggtctggtgtgctggtgtttggggcacgtccagcctctttggaggtaggctattatagcttaggcaagaccacagacaggtagcataatctgggcctcttttaaaatggcaagaacggcttcaggtgaacttttttgttgcagagatttaattgcaagtaggtgccggttgaaaatgggagcgcaaggaaaaccactaatttccttggcacatgtgctgttgcaattaacctggtagagtgttaaggaatttaacttagccaagaggctttgagggaggattatatgcaagtttggggaaggaattgataagattctggggtatgggactagctacatacacgtgcgtgcaagtttacgttaaattatgtagcattttagatttagcagtattaaatggttgcttttcttggaatggcttctgactacatagtgcagggtacgttcctaattttggctttagaagactcctagtgagagtgtttttaaagattgaaaaaataagagtacagtgcaatttgtcgttttcaagttaaatacttgactgttaaaaatatttgtgtaattaagttatgggaccaacccatttatagggttaagttacttaaccctataaataactggaacattataaatggagcatttgtagaaagtttttatatcgaagtctccattatattgtacttgcattataacttattttcctttgcttaaatggagcagattaactttatggaaggaggaccaggataaaataaaggcagctacatttaactcttcatctttctgaagagttcagtctgtgataacacttaaggtgcccagaagtgctggcatgttggtaatagtttttaaagaagaaacgggtgtatctattttgaatgttaaacataatttgaaggagttcttgagatagttggttatgagacattcaatgtattgctacattttacatatatgatatcaggaaatgtttggtgaacatttgacatagttgatcatatgacacttgggaaatattttgcatgatagaaggatagtattttcgtaatgtaagtttcaagcattgactgaaagggagaaaattacacactttgctgtctcacccctttcttcaatattatgctggcatgaatgtgaattctgcctaattatgtttaaagtgtagatctggcctttgtaaaaccagaatgtcttttgagaccaagagaacataacatcagcaacagcccaactcctacacacaatcctaaaacctagatacagggtggtgcccaacttctgaggttttgaggcttcctgaagtaggcctatcatgtctgagtgcttttgtcacatgtaagcctacaggtggttagctggttaatctctcccatttcaaagcagttggttagcagtactgggtggcatgtatgcatgtcatcagagtataagaagtgtttgag

SEQ ID NO: 1883886 - DNA, 4001 bp, Homo sapiens; identical to SEQ ID NO: 913345

SEQ ID NO: 1883887 - DNA, 4001 bp, Homo sapiens
cagaaagtataattttacagaccttttaagccataaatcctgatcgcatagaaatgaaagctcccatgtagtggcatgcatgccaggatattttacacaaacgtgtttagtgccatcactgtacccacatgaacactcacccacgggcaatcactggtaactgtggtgcaccgactccagtaacactggagtctaattactatagtctaattcctctacttattttcctaaagagagtcttgcaaggcctgagaagtccaaaaatgtgtcatcccagccttccacacccattgccatatttatggagggagggaagaaagagaaaaagagagtcaagactcttcagaggattcgctcctctcagagatcaggaatgaaaaattaaccaataaaataacactggtgcacttagaggaatttctatgtgctagacctcacaggacggtgtatcaggatccagttttgttaagccatgaccaaatactttctgtgtgttgtatttatacatacatatatataatatatactttatatatgaaatatttatatattataaaattatatgtgaaatatttaaatatttcatatataaatatataatatgtaattatatatttgagaaaaaatatatgttatgagaaatatatatatattacaccagaataattatacaccagaataattacaccagaaataaatatatatatttgagaaaaaatatatattaatatatattatataatatatattatataatatataaatatataattatatataactatataatatattaatatattaaatatataatatataaatatgtaaagtatataatatctaaatatatatattataaattcacacagggacagaaaaccaaataccacatgtctgcacttataagtgggagccatttatagatataaaatatatacatattttatatataaaatatgttatatatatttcatatatattttatatatataaatttattatatataattatatttatatattaatattatataattaaatatgtataattatatgtatacttataattatatactatataattatatgtatacatataattatatataaaaatatatatatatattttttaagatggaagttcgcccttttttcccaggagtgcaatggtgtgatcttggctcactgcaacctccacctttcaggttcaagcaattctcctgcctcagcctcccaagtagctgggattacaggcgtgccctgccaccatgcctggctaattttttgtatttttagtagagatagggtttctccatgttggtcaggctggtctcgatctcctggcctcaggtgatctgccttcctcagcctcccaatgtgctgggattacaggcgtgagccactgcacccagcctacatatatatatatatatatgttttttttttaaagaaatagttctgtattatatgagcatggggaaaatatggaagtacatattaagctgttaataaattagtgtgaggagctgctgaaaagagtgacatggaaaggaaagggcataaggagatctgaagagaaagaaaaaagttcagctacacagcatgtatatatccatgcgactgaggacaaataattgaaagaaaaagtaaaaagcagaacatggttgcatttatgcatttatttaaaattacataattataatttatatcctttatatagaaataattaaacaagtttagcaagtaatttcaaattacaaagaaagccctaagaaagcactcaatataatcacttaaaagaccaaaaagtatgcatgataatttaaagcttagtaactgggaatggtcccatattgagacaggaatatttcctgacatccagagaattgtttcctataaataaagattttggtgcttacctctaagtgatgtctaggacatgtccaatcatgaatagaaaaacactgaacttcacagcgggtgtaaagggagaaaccattgccctttagacattggaaaagttcttatgttcttgcttgccttgtgatcttttattgtgaaacttgcaaaataaattgatcttggctgttacctgctcttttatatttaaccctccctcctatgctacagttaaagtcacagaccaaattatttatcataatcaaagcagaagtgggtcaagcacagatttaataactatttaatagaatttaatattgatttaatagatattaaatttaaatttaatatcgatttaatagaatatttaatagaaaaataataacaataacatatccctaaggaccctcaggcaaacagtagcccttcctgaaatgtgagaacctggccggccatgtgcttgtctttcagaaaagtgtctgaatctgatatgaaaattcagaagttattcatacaatatattctcattggaaaacttgaaccatttggcccaacaatcccattactggctgtacacccagaagcttatacatcattgtgttataaagacgtgtgcctgtgtatgtttattgcggcacattcacaatagcaaagccgtagaatccacctgaatgcccgtgcatgacagactggagaaagaaaatctggtccgtatacaacacgaaatgctgtgcagccgtaaaaaagaacaagatcgtgtccactgcagggacatggatggaactggaggccgttatctttagaaaattaacacagggacagaaaaccaagtaccacatgtccgcacttataagtgggagctaaatgatgagaacacatggacccagagaggggaacaacacacactggggcctttcggagggcggaggataggaggagggaatcaggaaaaataactgatgggtactaggcttaatacctgcgcgatgaaataatctgtacaacaaacctccatgacacaagtttacctgtgtagcaaaactgcacttgtacccctgaacttaaaataaaagttaaaaaaagaattatcttaatatagatacaataagttgtcatttctagaattaaaaacatgtatcttagtatgaatcaagtgcgtaaatggtaggaaaatgttattttattggctaatttttcatccctgacctctaagaggagcgagtcctctgaagagtgttgactctctttttctctctcttccctccctccataaatatggcaatgggtgtggaaggctgggatgaagcattgtcggactcctcaggccttgcgaggctctctttagggaaataggtagaggacttagactccggcgttactggagtcggtgaaccacagttactcagtgattgcccatcaagattgttccatcagtcttggattctattaggtaatatttttatttagaattatgcatttaggttcatcagtgtaattgagctatagttatagttttccttttttatttttcaggtttatcatcagttatgctagcctcataaaataaattgagagttttctgtatttttcccacagactgaagtaccttacataaatttgaaactcttttttctcaaaatgtttagtcttaggaacactttacactcttaaaaatcattgaggacctccaaagcttgagtttatatgtcctacatccattgatatgcaccaaattagaaatttaaactaaaaaaatttaaaatatttatgcatcaatttatttaaaaataaacctatcacatattagcataaataatatattttataacaaaatacaatatttcaccagacaaaaatcattcagagagaaaaatgatgtgtttttatgtttttgaaaatctcctgagtagtgtcatagaggacagccagaatttcatttctgcttctgcattcatctgttgcaatgtcatacactgatgctgaatttttgccccttagttcagctaaatccaggttgttgtgttgtgaccaggaaaaactaggcacgtggactcattgaagggtgaacagagcagaatttttgggacaaaaaggaaaaaaga

SEQ ID NO: 1883888 - DNA, 4001 bp, Homo sapiens
agtaaaagataaataatataaaatttagaacaatattctagttctgaacaattatcctacaaatcctaccaggtcataggaatatatagaatacccataatccagaggttgctttatttgagaaaagaagaccaaaaaaactaagcaaaaccaagctccatacaccgaaatcgtaacagacataactataactaccaattatcaggacgtatcaacaacctcagaatttttaaactatccttatccccccttatttcattttaatacatgtactctaatagcccaaattatttcttctcacataaaaactatcaaactctaaatggtaatactaataacaccacacataaacatatctttcttccaaagatcattaaaccaaccccaggaagaactctaactactgttccccacatgacaccaccatccgacaaaaaaatagccagaaaagtcaacacccaatctccctgacaattagggactccactcctgagggtaaaaatgagagaaaaaacttaaacagttagagtgagttcttggtaaaactcctttaaacagagaaacagcttgaaaaaaatcagactacacacacagataaggaaacttacacaaacctccagctcactcagataaaaaaacaaggcccaacatcaaaatgcctttgtcctttatgcctaagacatggcaacaactgcactcatatgagaacaagaaccaacagagaaacacatttgtcttttgtgtaaccaacagacttctaggaaagtctctttttcttttgtgggcatgtatatggtgggctccagtgggctctggtgggcactttcctttccttttgtggacatgtggaccgtgagatgagcctttatgaattatcattcagcatctgactgctcctgggccaaggtcccaggccaagctatcacttcaactcctgattggtcccagaccaaggtcccaggacaagctgagttacactttctccaagaccagtcaacaaattcttttctttcccagtccatcaaaaccctagacctgacctcatagttaacaatccatccaggccccctctctactcgagaaaatcttccttctttcacttattaaactttcactccaaccttaccctttgtgtccacagtccttaattttctcagtcataagacaaaaaacttcagataatccctcaaaatgaaagactactatatttttaatacattgatgagactgtaacagaatcgcagtggcttcttatatagcaaaaagtttggatggttgaaactctctggcaaatacttccagccccaataacctcacagcaaagctgccactaagtattcattttggcttttgattcctcctgggtccttggcccttcacatttctaaccaagagtagagtggctctgaccagagcaaaagatgagaacagtctgagcttgcatttttaaaacgtaacaaattttaatgagtacttacctaggccagttgttaaggaattaaataagataatgcatgtaaaacacctaaaatacatggaaagcatttgatatattaggtaacattgatacttttaatagaaataaagataatatacccacaaaattatcaatctcagaatccccacaatcaataacttgccatgccacttaaagcaaaaaagatctctgtgaccttgagaggagcaagttagagacagttaaatgaaatcccagatgagcccttccaagcatccactgtctacccaagtgcagggctcttgcctgatgactgccctgcaagtacagctgacctaagaaacttcagcctcctggggtccacttacatgatcaggagcataagtgccaaatcccagcactggcatgaagggtccatcattcagcctcactgaatggctttgcttcagatccgtcatcatccccagctaacctgtctttcctccttttcctcactgacagcccagtaggagacaaggctcctgcgttctttatttgcaccaaatgcaggatgggcgggatggagatgacagctgccaatgatttcaaaatgaaactggaatcagtccagtgccttttctctgattcttatgtctctgtgggagtattttacagaaaactcactcagaaatgctgtgaatgccagaggactttgattttctcctccgtgttgttcacacttgattccttagttgaaaaatgaaccacaccaatttgtccttgataagtacactagacttcctttacaagaggcaaagttattattagggtggtcatttcaaaacactaattctactacagaactgaagttaactttctcacttatatttgattgttaatccctttaaaacagcttattagaattccttgaataacgcttgaggcctagtgccagccatgcatgtaatgaaatttcttaagaacacccacccctattcccagtatatttccctcctgtgtcaagccacactccattttctctgacttgtttccttgaatgttttgcagaaaaaacttgtctgagatcatggatacatttctatgctcttgcctttgttccagccattgtctctttttagaacagcctgcttaactccctcctggtctccagcgggtttcttatcttttacttatcctaaaagcacctcctacagtctaacatcctttatgactccttctttttattgttgttttttgtttgtttgttttgaacaaagataggagatagcaaagcagcctgggtcttaacagaacagcttggaattccagggcctaaattgcttttgcaaacataaacacacacacagcaaccatgagaaaaatgaaaattaaaaatggcttccaattcagatgccaagaggctcagcctaaatggccttctgcataattcactttggacactttcatcctctgtaggtgaggacaacaggtctggaccaaggttaataccttaaatggttcgaaataactgactttgggcagggtgcagtgcctcatgcctgtaatcccagcactttgggaggctgaggtgggcggatcatgaggtcaggaggtcgagaccatcctggctaacacggtgaaaccctgtctccactaaaaatacaaaaaattagccgggcgtggtggtgggcacctgtaatcgcagctactcaagaggctgaggcaggagaatggcatgaacccgggaggcggagcttgcagtgagccaagattgcaccactgcactccagcctgggtgacagagcaagactccttctcaaaaaaataaaataaaataacataacataacagactttgaaataatcagcagggtaaccagttattgctaaaaacacctcttcatctttttttttatttttttcaaattttaagtaatagatttaattatcacattatgaaatactataaaaagagaagatgacttcttctataacctccctgggtgaggttgaccagccttctctgtgtgcctcttattctcttagcttctatgaagcaggtcaaaaaaaatcacatcattgaaattacactctccactaataaggagcttctgctagataagatgcttaagtggtattttctttggtgtttttattatgcggtgctttctccaacatgtatttgtgccattggtatcttagaggcaatcctgaaacatgacgttgtcatttatcttattttgaacccatagctctggctgctcaaggtccgaattctgcctgattctgattccctgtagtttataattatcacaacattgtatcagttataaatctggcaagtatactatttatattacactggtaaaactgtagaaccctacagagatggggttaagttctgtgtcaagtcacaaaaaaagcatgtctattaatggtaatagcctgaagctcatcattcactagattaaaaatttgtctaacatgtttgcaatattaacctgtattttgcactaaatggtttacccaagtaagagacatttctctgtcacttccctaatttagca

SEQ ID NO: 1883889 - DNA, 4001 bp, Homo sapiens; identical to SEQ ID NO: 913354

SEQ ID NO: 1883890 - DNA, 4001 bp, Homo sapiens; identical to SEQ ID NO: 913357

SEQ ID NO: 1883891 - DNA, 4001 bp, Homo sapiens
tcttttctcgcgttttttttttttagactgagtcttgctctgtcacccaggctggagtgcagtggtgcaaactcagcttaatgcaattcaagcaattctcctatctcagcctcccaagtagctggaattacaggtacgggccacatcgcctggctaacttttcgtatttagtagagacaggtttcaccatattagtcaggctggcctcaaactcctgagctcaagcaatccatctgccttggcctcccaaagtgctaggattacaggagtgagccactgtgcctggacactaccaaactttttaaagctctaatccttcaccttggatgttttttactgtgctacagtaagaggaaaaatgtcagtcagcactgcttcgtggaaaataaaaggatgatgagttcagcgagcctcaaggctgaggtgtgatggtgctcagtgagacctctccaatatggtcatgtttaaactgtgacacaaatagaaaggagaggcacagaaagccctaaagaaagagcattccacaaacaccacccctcagcatgacagtgcaggaggctgtgacttgagaggaagaaaggtacacagaccaccatggtggctggcacagagcaagcaatccacagaggggatgatgggatgacagaggaacagcagggcacagctcacccgcgcccctacaggcccgatcaggggctgtgaggttattccaggtacagtgggaagccactacagatggcagaccagagaatgacaggcttcacctcctacttccaatgaaactaacctggctgctctgtggcatggctttgactgagcgctggaaggcagtgaaggaagatggggtatggtctgggatttgtattcagggcggaatcagcaagccttgctaggctggatgtgggaagggagaaaagtaacacctcaaggtaactcttgggtgtctggccaggtagactcaaagacaagtgcattggaggaaaatggggactcttcctgggacaggtcaggtcccagaaggggtcaaacaagtggatgaatacaaaggtccagtgtgaggagaattttaagggccaggaatgagagtcatgaagatacggacaatatatttttttaagatgtgggcagagtgggattattttattttattttttgagatagcatctttctctgtcacctacgctggagtgcagtagtgtgataagtactcactgcagcctcaaccttctgagctcaagcaatcttcccgccaagtttttattttgtttaagaaacgtggttttgacctagtattgtggcttgtgcctgtaatcccagcatttggggaggctttgaagggtggattgctcgaggctgggagttggagatcagcctgggcagcaaaaaaaggaagaggatgaattcatggaagataatttttccacagaccatggatggagaggataaattcagtatgattcaagtgcattacatttattgtgcactttatttctattattattactttctaatacataatgaaataattatacaacttaccataatgtagaatcagtgggaagcccaagattgtttttctgccactatacagtctcaactgaggatgatgggagacagtgacagatcatcaggcaatagattctcataagggcaacacaacctacttccttggcatgggcagttcacaatagggttcacactcttatgagaatctaatgttgcctctgatctgacaggaggaagagctcagatggtaatgccagcgatggggagggactgtaaatacacatgaagcttcactcactggccactgctcacctcctgctgtgcgttccacaagctgggcatcccagctcaggtacatttgaaaggatccatcccccgccagtctttatagtcatctttactgccatagtagtgaagtatagctgccacttagctcccaaggcatgtgcctcagcatgcatttcatcacaatcaacaaacaggagcttgggtcattgtgaggtcacttcctataaattaccagcattccatttcccattggcaagaagctaagcactgctacttgaataaccaaacctatgcccaaatcccatctttgtggggctatctcctggtactcttcctagcatttttctctttgtcagagtccaatcaggagacataaatcacttaaatacaaactggtaacatttaatgtaagtattacaacaggggaacagcataatgagggattggccagcacaaggtaaagaaatgcaccacaacataacctgtttcactttatggaaagcactgatgtttataaaatagtcatggtaaatttataaaactaatagctaattatttttactcagaatagtactaaattaagaatataggccaggcgtggtggctcatgcctgtaatcccagcactttgggaggccgaggtgggtggatcacctgaggtcagttgttcaagaccagcctgaccaacatggtgaaactccatctctattaaaaaatacaaaaattagccaggcatggtggcaagtgcctgtaatcccagctactcaggaggctgaggcaggagaactgcttgaacccgggaggcggaggttgcagtgagccaagataaagtggaagcatttattatgtatttatatgccaggaattaatgtgaagcactttactatcttatccaatcttcaggatagatcttcagttctcatgaccacaaaagaccaagtttcagacaggagaagagacgtggcccggcagtgtgtccctagagcctatgatcttgtcactaggttacagtgcttccaggtagcacacggtatgagattttgctttaaacaaaccaataaaaaacacaggcaaaaaaggcgtaaactattaaaaagtgaaagaaacattaagagaaccttaaccaaataactaaaaatattatggaaaagttattgaattcatgagcaaatttactctaactttagattttcattgagtggtaggttgtattactcatgatgaataaaacatgttcattttaagtgtattaaatatcattaatatggcttatcatatttaaatgttcacttaaagcaatccagttaaagttctgcatatcatacaattttataccttgctagttgattgcaaagtaaatagttatccaaataaaaacagtaaaacgtgaagtttttcactggttgatgctattgtgaggtgagcatttgatatatacaaacagatgataataacagattgcttacttctttcatcagtatataaaggtggcttcaggatagaatagtattaagggcaaagaagaatttgaaatttaacgtcaactcagtgatgcattaagataaaaacagagacaacaggggcatcctggtgaatactgattttaacaaagcagattcagagaaactattagtttaaaaaatcttcaattaaatctctgtaatccagggctttgcaataaatatgtaaataaatccccaaatatccatgctaaaagtttaaaagaaatgctagctgataattaaggaaatatagcttttccttagctttgcagtaatctagaaacaaagaatgtttctagtacttagacagacactgcaaagcaccttacaaagagagacgtgtaaggatgactcgattcactggcagccctgggcttgtccacagtacccccaaaattaacagtaactccactgtgtaaatgctcatgaacaaagtattacaggacttttccagtttaaacataccatattttctttcagacaattcttcaattgtttacgtagataagtgatgcaaccattccatttctctgaaaattgagcaaaagttgattctcagtaataggtccctatgtcagagcaccactaacatataatgacttatatcctatgttttacatcctaacagtccatatcattttactgctttccaaataatttttccaaagaacttttcccttttttggtggttcttacaattagttta

SEQ ID NO: 1883892 - DNA, 4001 bp, Homo sapiens
cacatacagcaaaaataccaaagacacaccacacatcccacacacacaccacacacatcacacacgcaccacacactctccactcccccaacacacacccagcacaccccacacacacaacataaacagcaaacacgtatacatacaccatacacacacagccatggcacacacacccaccacccactgaatgcacacacaaaatatacatacatgccatcacaccatttccttccctacatgccacacgcacaagatatccccatgtagacacccacatatgacacacacaacacgcccaaacactctagtcccactgtacacacacacaccacagacacacataaatagtaaacacacatactccacaaacagcaaacacacaccacacatcccatacacacacaccacacacacaagtagtacactcccaactcctccacacaacaaactcacacactagacaccacgcaccaggtacccttcccacacacttccacagcaccccagcttatgccacacactctgcgcataccccacacacaccacacacacatgcatatatgccccctacacacactcacacccccacacacatacaacacataccctcctcagctcccacaccacatacacccacaacacaacacacacagatgcatcactcatgcacaccccacacacaccacactcacagcacatatacacacctcacatacagatcacacacacgtttacacaacacacagaccacatattaccctccccgcagacttcacacacttcaagcctcccacagcacaacttcccacacatactatacatactgcacccacacaaattacatacacacataccacacacaccaaacacatacacaccacatacacacaccacactcacacactccccacacacatcctcccccacacataccaaacaaatgcacacactccatacacgcatgcactagtgcacaccaccctttggcaaccgcagggcctccgcagttctcacttcctacacactcagaggaaggctccacagacgtcacttcaagacaggtctttgacatgaggtggaacacaggaggggtggggcagggcagggagagtgagcttctggccacaggagccagacccccagcccctcacctccactcactcacagcatcaacagtgcttctcagggccttgaagccatcctccactgcaaacacatggtccggaccgcctgccattgctgttatctacagagagcagagctggtttggactcccagcccaggggtgagcatgcagcagatccccagcccaagggagagcgtcctgcccccatgctttggaggcagcagaataccaggctctgagggccacagccttctccagccagcagcccactctcagggagtggggagctcttccaccctcccctctggtttagtaggatttatatgacatgctgtcatttctgcagtagtcatagggtggcccaactcacttgaggcagattagatgacccttcttggggtggccctaggaaagctgtctgggacacctttccatactctaaccctaacctgaccacaaggctctatattggtgcctggttaacctgtttggaattactgggtctttcctataatcagccatacccacggtataaatggtggcccccaggctccgagccctttcagcttaagggaaagaaggcattgagtattaattaccaaaatacagggagcaaaatgctgataaatacgaactgaactcacttctttgagagtgtccaaagatggatgtttcatcattgttccatcagtcatagcaataatcatgctggaaaccttgtcatctgcaggagaagcaaggagtggcctgctcagcaaaggccccagaagtgacctccaaaagttcctgtattgggagaaaagctgagtgttgggagagaagctgaggcagggcttgcatgtctgctagacttgctggctccttgcttctagcacttccgttatctcaagcagctgtatgtttctcattcacttgatacactgtttcctttcaacccccacatcctcaccacctgttttttgtttgagcaccaataaacagcatgggctcccagagctcagggcctttgcagcctccacacttgtgatggcccactggtcccactttctctctcaaactgtctttttctcattcctttgactccaccagacttcatcactcccacgatatggtgttgggtctgattagcccaacactccaggacccctgcgggctgctgggcccacagcactgatcactccagggcatgtccaggtgcccccatctcatcctccaggggagaggctgccaagagccaagcacctgctacacagagacccttagagtgagggaggtctcagcccagcacccattttacaaaagaggagctgagaggggcaggctccttctcaccaggctgcctgaaccctcacccactagcagcctgcaccacctctgcctgagggcagctgcagccaggactccacaagcacaggcctgtcccatgggtagggggaggagcagcttggctctcctgtgggcagagcctgcgggcagccctgccagcatctctgggcccaggagtacaggattccaggtaagtggtacctgggcaggggaccccacatccacctcaatgcctttccccaccaaccatgccttttcctgacaagagttgcaggcacactgtggggagggggtcggcagctgtggacagccttctgcatcatctgagacacagtcaagggatgcaagtcactcagaggggaaatgaggaagggaggaggaagactaaggtgtgtgcaagggggaaaaccccttggctcttctcttttccttttcacacagcccagctggagggcaagcacctcagggttatcagcaccagaactgcacacgcaggatcccacacagttctcagaactccatggggcgagggcttactatgctcattgcaccagggagggacctggacctcagaacaggtgagcaacttgctccaagaggcagggcaggtgtggccttgcagagtctgcacacagagctctctgaggctcacgcccagctctgttccacctatgggaccaccatggggacggcaggtgcttaaacctggagttgaaattttccatctgccgaattgcctgcaagaaaatgaagaaatattgagcctggacagtgaaatgttcccactgatgctctaagaccttgtcaactagaatcgattcttggagctcaaggggtgtatacatttctaaaccctgcctgcatgaatatgtgtccttcaggcaccattttctgaagtttgtcgagaccctcttttattttcttcctgaaaaaactccaaaaaagtggttgacgtggaaagacgtggactgctaaaaattacctctcaagctctctgggagccactgctcactgtgcaaggcctcggggatggaggagggggccaagcaagggctctgtcctgctcattccttactgtgacgttgaccatagatgacaggccttctgatctcatcctagttccagagaatgtaggcctggggaatctcaccagggccccacttagaccatctctggtgacagtgggagcttcccatggatgagcaactgtgagtcaggaactgcaatggggccgatattcctaaccctaaccctaaccctgaaccggggatgggcaactgagagtcagtcactgacaatggggttgacattcctaactctaactctaactctaactctaactctaactctaactctaactctaactctaactctaactctaactctaactctaactctaactctaactctaactctaactctaactctaactctaactctaactctaactctaactctaactctaactctaactctaactctaactctaactctaactctaactctaactctaactctaactctaactctaactctaactctaact

SEQ ID NO: 1883893 - DNA, 4001 bp, Homo sapiens
ttttcaaatttgtgtaactttttataaggtaatgagcaagagtaaacaaacagacatatattgtatgtctattgcaataattaacaattaacaattacatattaaaatgcaatttaaatgttattaaaatataagagatctacaaataaatcaaacaaatataacaaacaacctatttggacaaactataaaatatcactagagaaattttaaaatatctgaattaataaagtattatgttatcatcaggattataagattcatttgtaacaatgacaattttacccatattgattacagttcaaaattataatagatttgtaaatcctagccaagcttatttaatttccttttgaacattgaaaggatagaatttgtcaaggtttccttgaagaacaacaatgtggcatgacttgttctacagatacaattttgtaatataaagttacaatatttagtatacatacaatcgttttagtaaatggtaatgagaaaattagataggcttatttggaaaaaaaagactcaaatgtgagtcatgtcaatatagaataaaatacaaaaagcaaaatactaaacgatccaaaagttaatatagataaatatattcataacttcaaggtatataaacattttcctttttttgtttctaaagtacaaattcagtttattcatctgtttatgacacagtacacaggaggcaaagtgtttcacatcatagatttcacttccaactgcttggaatgtacatttctttggcttacaggagagactagacaggaaagccaggctatgcttacgcaactaaaatgaggttgggggcaatgctaatgtcatcttcacagggacggccacagggactgttagccacaagctggttttctagacctgttagctggaagcgtggggagcaccgtttctggaagctcaagctatgttgggcttcagtcatctccaccacacaggtacagcagtgctttttgggtagtcgttcttagtgtcttgctggatgtaatagtacggggacatgccatactttctcttgaattcagacctaattttcaacatgtccacttcactgcgggagacgatgattctgatcaggaccttatctcgagcccccggcccttcatggagtagtacagccaatcagcaaaatacaggggcttgttctgaatgcactggaccaggttcaggaaagcattttccaggtctcctttaacctctttcttgatgctctctcttgatgggctgtagctcttgtacctatcaaatactttctggaggtgggacatgctctactcggtcatcatgctgatccacttgggaacatcagttcttttcctcttcactccagcatcacagaaatcccgggcatcttggtcaatcagttcataatcaacgacagagccatcctctggtcttctaacatttgccagggcaaacatcagcttgcagaagtcaccatatgtgtccgaaataatgtccttctccagatcagttttgtacatttctttgtagactctgttaatttcctggagctcctggttggttgttgagcagatgatctcaacgagggagtcctcctcagttcccagccccttcatggaagcttttagctcagaagcatcatactgagcaggtgtcttcaataggcccaaaatgactgtctccaggtggccagtaaggctgacttcagtgctgatgtaagttcctttgtggtccttctctgctaggcaaaggcaacatcctctctccgagcattcctgctgttggtcaaaatgttgacaatggtgaacttacccacaccttttgtcctgatggtcctttcaatgttcaaagcatccccctcagcatcaaagttggtgtaggctttgactgacccatatgcacctgagggtgtagagtgatgaccctccaagctgagcttgcacaggatttcgtaaatagtatacattttgaaggaagctgggccaggcactgagagctgagagcgtccccagatgctgagccaaaaattttcaacagaacacaaaaagcactgatcattaagtttattttttatttttatttttattattactattattattattttctttaagatagactttcactcttgttgcccaggctggagtggaatggcatgatctcggctcactgcaacctctgcctcccgggttcaagtgattctcctgcctcagcctcctgagtagctgggactacagatgctggccaccacgcccagctaattttttgtatttctagtagagatggagtttcaccatgttggccaggctggtctcgaactcctgacctcagtggtccacccacctcggcctcccaaagtgctggatgacaggcgtgagccactgcacctggcctgatcataaattttaaatgtaagctttggtcataaagatttgatcacaaaaaaagttaaagtctgaaaccatatttgaaaattctaaataaaagacacataatcagaaaacctaaagaattacaaatcaattagaaaaatataaacaaacaaaaaagggtaaaaaatgtgaataaagaggaaattggcatgtacagtaaaacaattgaaaaaaagttgttcaatttcattagtcatcaaggaaaagaatattaaagtttcaataaattgcacccaaaaaagaagataaaattaaattcccattgtttgtatgaacgtagaaaaactcatactatttcttttaggggatataaattcatgctatcgctttggaaaacagtgtgatattatctagtaatttaaaaatatgaaaaacgcaactatttcctcataggtatatagacaacaggaatgtatttatatatgaactcagaaacgtgtaagaatattcacagcattcatcataaaagccctaaactggaaactatccaaatgtccattaacaggaaaactgttgtataaattgtggatatattcatcaactgaaatgctttacaacaatcacaggaaaatggaactacaactacacacactactttcaactgatctcacaagtataacattgagcaagagaattcagacccacatttatgtataatgtattattccatttatataatgctcaaaaataggcaaaactgaatgattccattgagttatcattctttaggtagtaatactacaaagaaagtgagtggttattacctttacattgaggatagtgattgcctttagaagaaatggaccagtttgtgatttgaatgggtgtgcagggagctcatattatttcacatcttgaccttgaaagtggttatagaggtgttaactatataataactttttagctgcacgtttagattttatgcagttttctctgtgtttttaattcagtgtaagaaatgattagaaatactgtcaacatctcatgtcttttatatttttcatctttttcttcatcaatctctgccaattataattttatgtaaaaatatgatgagtaaatataattagaggagtaggaagaagaatggaaactactaaagtgatactgtggaaattcttcatagtaagaaaaattttatgacaaacactcactgctgcttcagttaagggaggtcatgtttaaccagacttctgaaattatttgaaaatattacacctataatagatgatagaaattcaatgatgtagtactcctgtaattttcttcaggcaaaaagccatgttacatatgagaaattaatgactaaggtaacaagttattgaataagaggttagaaatagtgctggatagaaaactgacagcagcattccttttactcacaggctaaagccataaaatccctcctctagtgtctgtttctggaatattctaaccacgagataagccatcctctaggtactgctgagaccttaaggactgaaggagtcaaggaagtcaggattcctttaatcctctaccttcaagggccaccccatttaaaagttgtgctgacctttcttctttctctcctttctc

SEQ ID NO: 1883894 - DNA, 4001 bp, Homo sapiens; identical to SEQ ID NO: 913379

SEQ ID NO: 1883895 - DNA, 4001 bp, Homo sapiens
aaaaaatgctggacaccagctcgcttcaggaactaatactctttctttcatgaccaacacaaagaaagagcctatcttccagtgtctctctcagaagtgctgggaagctgcccctccctactctcccaaacatctcttcttgcctcatggccttggttggtccactcacccatccctgaaccacccaaaccaatgcaatgtgctgattggctaaagccaacctggtctcatcccaggaatagggtggcttggcttcgtaaaagccacctcagctggtatggaaaagaggtggttgctagagtggatgccaggcactgcaaccaaggttggggagaaggggttcaaaatacagtgcccacagtgaggttgccctaaggataagatacatgagactgccccgctggtgtggtgtgtgtgtttaagtgtgtgctgtatgagaggagagagagggagagagagacagagggagagggggaatgttagttcctctccttggacatgctgattactttctttctttctttctttctttctttctttctttctttctttctttctttcttccttccttccttcctctctcttttctttctctttctttccttctttctttctttctctttcttttctctcctcccttcctccctttctccctttctctctgtttctctctctctttctttctctctttctccttccttccttccttccatccttcctcccttcctctctctctttctttctctttctttctttctttctttcattctttctttctttctttctttctccttccttccctccttctcttctcttctcttctcttctcttctcttctcttctcttctctttcctcttggccagctcggtgactcaatctccttcctgtctcaggcccctcccacgaactggcccgtgtgtgcccggggaaggtcccttctcctcactgacctccacccacaccatggagagtggatgtgtgtgtgtgtgtgggggggggggggggcgggggacgctgcatcaggagacctctggttagggaatttttatcaggaaccacctctgtgacctttaccaacctcagcctatagtggggacaaggtcctacagcgtgggcctctcctttggaaggctttgggacagagttctgcccaccagctggaggacagtgacctcagggggagaagggacaggagactgctctccagtccctcaccccagccctcgcctttccctcacccacctttctttgcagcaagttcaaaggcaggtcatacaccagctaagcgggcacagctgggcacagttcccggggcctgccgggcagcgctgggaagggcggcagagagcgcggactggacgctcgtcttggaatgactcagccaggagcagccgccagcagcatgggccacgcagcaaacgggcgcgccgtgggagctggagaggccaggtcttctggaaccaggccagtgcaccctgcccgggcgtcaccccaccacggacattcacaatgacagtcagcacttctcagcacactgtggatcacacgcattagcctggcacctggcagcgccccgaggtgggcatcacggtgggattgggaggcactccagtcacagggttcaccagggccgaggtggcgacgaaaacccgtccctcgggcgtggcagtggcctggccacgtgcgccccagggcttgcacccgcatctcccgccggtggtaagcggggcctccagcagagcgggcggggctgctcacctggaaccagggccagccgtctcctcccctgcctcggccgcccggggcctgcctggggctccttcctcgccgcccggcggcagctcttgagctcccggcccgctcctttagccccgcaggctccctggccgtgaccctgtccccggcctccgtgtgatgagcaggcgagcagggccggggggatgcagcctgggccccgcatcctcaggcaggacggagctcccggctgctcggcgcctctgggggggggggggcgggggggggggatgcggcgcagcgggcggtcccagcgagtcagaagggtgcagcagccgggtcggggatggccgggcgaggctgacccctgccgggcagcgcgggtggcgccacgggcggaggcgacttcctgggccctggtgcacggcgccccctggcgggcctcggggaggcggcctcctgcgtgcccggaccgctcgctgcgccttcccgcctggcttccggttacccaacctcatctcgcccgagcctcatctgtagctcaccgtcctgtgcgccctgtgctgttggcagggcgtgtgggatttagagggttttctatactgagtcttcctcggagcaggtgaattctgcatagctggcccagttctgtgtcttaagtatggggagagagtgggggctggagaaatcactagcaggggaggagccctgaggttgccgagggggatcggagctacttcccaaggcgcctacaccgcccgtagactgggaaactacggtcacaaagggtcagcgcattccccaaggtcccagagccacacgcagcatggctggcatttgaaagtcaaagcagaggaagcaggcaggtggctcttgttgaactggcttccagagtctgtgttgggcagagagatccttccccgagagtggagtggcctcgtgctcacctgggttcagcgtcaaggttcacctggaatcacctgcactcttgtccttgaccaaggcagggtggttagccatgggctgatagccttggagagcctgattcagcctttgggtagagctgggtcagtccagcctcagggccatcactcacccgaagcattgtggtaacctgcctgcccctggagaccccgggtgtggggcagggtgaccgtggtggagagtgggagctggcagaggtaaggaggcacacgtctgccacagcaccagagctcagggcgcctgagaagcaaggtcatagcgtcctgttcttggaccccgtcagtctccacagctatagggggctccattgaaaagagtgtgccagaccttctctgtctgtgccctggtgagggctcactcactctccaggcttgctgggggaggaggcacgaacttcggtggaaagaacagaactcaggagccagagaatggagtttgactcctgcctcggacacttcttagccgggtctctagggggctcagagagcctgagcccccttcctcatgtataaagtgaggatagtaatactgctgaatccctgggtctgttagagaatgaagcgaggaaagtcaggcagagcacttaactaagtgcccagctcgcattaagtacaccatgctcatgcccatggccaggatggtgtgttccagctgcaacctttagcaggggccctggaagtgcttgtgtcttctgcttcgtccatcattagcagcagcagaaggtagggcagtgtttgcttctcaaaccaggtttctcacacattgaaagatattctgcatttaaatttacatgataaattaaaatataagccattgggatgaacaccttataatcaaatactcccaggtgacctagtgcctgagtttacctgagtgtttaaaatcaagttggcgacaaggaacagcgaacacgactgcctttaatatttagttagaccctggtggggtgaggctcccaggagtggcttccctttgggcccttcctctgtcctcccaggtggctgagggggacctacaaccctagtcagcagttgggaatccgtcctcatcagtgagctacctggcttccatgaaactagggtcgtgtctagggatctagtgttttggaagctcctggaaatgaggttggccaagagggtcttctggaaatctccgctcactgagccatcatcctacgccagtggtcaaattctgccagaaccacactgcagatcatgtttaattagagttcttagggtacttttgtttttacgtagcgacgttgtttgtttttttctagttg

SEQ ID NO: 1883896 - DNA, 4001 bp, Homo sapiens; identical to SEQ ID NO: 913397

SEQ ID NO: 1883897 - DNA, 4001 bp, Homo sapiens
gctcacgtctgtaatcccagcactttaggaggccgaggcggatcatctgaggccaggagttcgagaccagccaggccaacatgatgaaaccccgtctctactgaaaatacagaaagtagccgggtgtggtggcgggcgcctgtagtcccaactactgggaaagctgaggcacgagaatggcttaagcctgagaggcggaggttgcagtgagctgagatcgcgccactgcactccagcctgggcgacagagcgagacttcgtctcaaaaaaataaataaaataataattgatgagttgtgcgcttacagaaccaagaagaggtttcgtgagaaataacaacacagaaggtaaaccgacatggatggaggaaaagggcacatcattagcaatactcgatgacatcacaacccagtggcctattccccgaggcctctaaagttctcaacgaaaaaagactttcaaaggaaaagcttaaaaaaaaaatgttccccacaaaaacagactaagatgaaagtcgggccctcagaccacgagctccggaagaacaggcagttgtcgcggagacagcaaatgcagcatctacctgtcctacatggccctgcgctacgagactgctcggaaggaaagagaggaataaccaacttaaccctgcttcgaggtggtttggagaggaagaggaaagctgtgtctttctgcaatatcgtgagggaagccgaggccctgaatcatcaaagagaaggagaagaggactaggcggctgcaggtaaaccaaggtagggcgaggaggaggacccggaattcctctacgcgagcgcgttctctgctcccctcctcgcgtctccgccccggccacgcccaccacggcacgggcgcgcgcacgccgccttcgccgctggctccgtctgttggggggcgaacacgccgcggtcctcgtcgtggtgagcgcagccactcaggctggtcctgggggtggggctgtaggggaaagtgctaaagccgctgaggtaagaggccgaggggtcgagggccctcgggagcttggtgaaaagggagttaacccccaggatcctacctgcagggactagaaaaatggagaaggtaggaggagaaacaggagactgctgcagcagacgtgcgataggaaatttccccaggccgggtttgaccgagtgcgcatgcgggccgagggctggcgcctgcgcagtgggacagcgccgatggcgtagtttcctggggacccagctgggtgggaaaagtggctaggagttagcttgggagccgctggtgttctgagcgctcccctctctggccactttttctccacgcccacccccgccccgttcccgcccccccccccccccgttacagctgcggcatctatttggtttgggttgtaatccagctgttttgaagtggaacgatttgttgatgatggaatttaatgattacttgtaataatttgcctttgtactagggtaggaacttttaaggaattactctttttaagaaaataggcatatatctgttagaaaggaaaggaatttatattcataaatatatgaatgcgaggtcatccctgccgtacatgaagtaaatgtttaagcatcttagctcggacacagcaatctgtgtccacaaagcatcgttactctcctgtgaggatctccactgtcagccccaacttacctgacagggccaagtcccaggatacttcatcatcagtatttgtttgacaaaattttactgggcacctccggtgggcctggcaaactggttgaagatagagttgtgcgaatagatctgcacaatgagaaagaaaaaaatccataatgatccaatactcatgacacagcgcttctctatctcctgcatgacctttgctgagctgctcgccctgcgttctgtcgtttgttcatcattcattcatccgaaatgctcgggactggaagcacagtggaaacactgccccaggttctgtgctcggcattgagggtagaaagacttttcgaaggtggcagggtgtttcttaagatcattgaaccttaaaatgaaagtgtaggccgggcgcggtggctcacgtctgtaatcctagcactttgggaggccgaggcgggcggatcacgaggtcaggagatcgagaccatcctggctaacacggtgaaaccccgtctctcctaaaaaatacaaaaaattagccgggtgtggtggcgggcgcctgtagtcccagctactcgggaggctgaggcgggagaatggcgtgaacccaggaggcagagcttgcagtgagccgagatcgcgccactgcacttcagcctgggtgacagcgagaatccgtctcaaaaaaaaaaaaaaaaggaaagtgtaaagtgcttaatagaaggcactggccctcctcctgaacagattctttctcctgtgggagcttgctgactctgttagatggagagaattaatacttttcccatgaggttttttcatagtaagtatgaaaacctgggatctgcataggaaaaaagactcagtagtaactctccgttaatgactttgaatagccaagatttatgaagtgtttactaagcctgtaactgttccaagtgttttacgtgtattaactaatctttgtcacacctgtgtgaggtaggtgccgttattacaggttgagtatccttaatccagaaatccaaaatcctccaaaatttaaaactttttgagcactgacaggatggtcaaaggaaatgctaattggagcattttgaattttagattttcggatttgagaggcttaatcattaagtataatgcaaatatcccaaaacctgaaaaaaaaatccgaaatccagaatacttccaagtcccaagcatttcggatgaagggtactcaacctgtttcccattttgcagataagacaactaaggaacaaaaagatcccggagggggaggcggaggttgcagtgagccaagatcgtgccattgcactctagcctgggcaacaagagtgaaactctgtctcaaaaaaaaaaaaaaaaaaaaatatatatatatatatatatatatatatatatatatatatatatatatatatatgccggaggttgcaattttttacatttttggcatcagaccttggcgatgaccttgagcagtagggtataaataactcccacatgcttagcgttccagtaatggaacactaggcataaatgggttaaatgatgtgtccacagtcatgcagcaagtaagtagcaaaaccagaactcagagaggcttcataatcttacccattatgctgctttacgttgcacatgacaaataacataccaacaagccattgcttcaaaatgtcacagcagataagctaaaattgtctctacacctcagttttattttttcatatataaaatggggaagttgggttagatgacctttaaggaatctgtggtttctgtgaaatatttaattcactcagcaaacatttactgaagtgaacaactacttccttactataggccaggtgttatgtttggttctggtgatcagttaattcctgccctgagagcagttaccatctagggtttattagttttgctttactctcatttaccacttgctggtagcattcaaaatttaacctaaatctttagagctagaaattacttaggtatatccttccacctcagcagaaaactgcttatttaaagttagctttatgctaattctgtgctccagttttcaaccctggctgttttgtgtgtggaacgatagtagttctgagagtttggaagaaaacaggatgaaagggagttcgtttgattatattcagcttagaagtcacactgtggctaccttttgaagctgtcctcactctggcagttgcttgggtgctctgctcagcacctgacttcaaaatataaagtataaagcatttgcaactgaatagagcatttatcagggtgtaggtaaaatagattagagttttaaatcttaggtgagatatataaac

SEQ ID NO: 1883898 - DNA, 4001 bp, Homo sapiens; identical to SEQ ID NO: 913402

SEQ ID NO: 1883899 - DNA, 4001 bp, Homo sapiens
gcggcaatattgctctttactgcactaaaatgtttgtgtaaagccagacataaatctggcctacgtgcacattgaggcatagcacctttccttaaacttatgacacagagatctttgctcacgttttcctgctgaccctctccccaccattactctatagtcctgccacatccccctcaccgagatggtagagatagtgatcaataaatactgagggaactcagagaccagtgctggcgcgggtcctccgtatgctgagccctggtcctctgggcccactgttctctacactttgtctctgtgtcttactttttttctcagtctctcgtcccacctgacgagaaacacccacaggtgtggaggggctggcccccttcaacaagtcaccaggccaccaagaaacctccttcagctaggtacatatctaacacaggcccttggggtcaagaatgtcaaaactcacctcaaaaatttatttctatttctctgagtttcatttcacttttttaaacacacttaaaacaatattgtatcatcagctttattgttgactgggaaaactatgaggacagacaggcttaaattatctgtgcacgcagagggaaagataaggcatattaccttgttggaactctttttttttttttttgagatggagtctcgctctttcgcccaggctggagtgcagtgacgcgatctctgctcactgcaagctctgcctcccgggttcacgccattctcctgcctcagcctcccgagtagctgggactacaggcgcgtgccaccacgtcccgctaattttttgtattttttagtagagaaggggtttcaccatgttagccaggatggtctcttatctcctgacctcgtgatccacccgcctcggcctcccaaagtgctgggattacaggcgtgagccaccgcgcccgcccctggaactcattttttaaaaaatttttttgagatggagtcttgctctgtcacacaggctggagtgcagcggcgtgatctcggctcactgcaagctccgcctcccgggttcacaccattctcctgcctcagcctcccgactagctgggactacaggcgcccaccaccacgccaggctgattttttgtatttttagtagagacggggtttcacgtgttagccaggatggtctcaatctcctgacctcatgatacgcccgcctcggcctcccaaagtgctgggattacaggcatgagcctcaattttatattttgccctagactcttattccttaaatcttccttaaaatagtggttgcaaaatggaggcccatgggctggattcagcctgtaaaactgttttgtttggactgtagagttaaaaaaaacaaacaaaccctgtatttccagcatctcattaaaaatcgtatgaggcaccggacttatagtggtacaagacagcaactgtctctagctgacagttgtttcctttaaaagccgttaagagttctttaatttgcgaaccctcgccattcacggaatacctgcttgtgttcttgtattcagggcactggagtgcgtgccagctggtctggaagcagctccagcaagtcacttacacggtggccaggggcggcctgactttcaatccgagacccgccgggaatgactttgggataatcacaacctccggtcctcagtttccttacctgtgaaatggggctgataacgcacagctgtgggaagcaccggcccaaacgcagggcttggggacacgaccaccatccccgcccacgggtccccgcgccaggcttcgctctccacccctcccgccgcgggccccagcgcttcgccgaggtcggccccgggcgccaagaggcgtggtcggcccgagcggaccctcgcggcggccatggcgtcggtggtggaatacaagggcctcagggccggctaccactgcggctactgcgattccaaggagggcaaagcgtcctgcggtgagtgttcccgacgccggagttggcgcggccgccgcgccccgcacaggccctcggcgggggaaagggcaggctcgcaccccgactcccgcttcccttcccctcttgactctccccatcctgtttcccttcccgctctgtctctccgcctcaccctcactgacgacggcggccccttatggagaaggaacggaaatagtggaaagctgccctcggtcaagatggcgcgggcggcgtcagctccaagaggcgccgggccggccgggcctgcgggcgcccgagtggcttcgcgcgagcctcgggaggctcccgggcggcgcgctgcattgtggggtggcggcggcggccgcgctagcgacgcggggccgggcggctgagcgttcgcggggccgaggccatggctttctgggcggggggttcgcccagcgtcgtggactatttccctagcgaggacttctaccgctgcggctactgcaagaacgagtcgggcagccgctccaatggtgagcgagccgggccggcgggcgtgggaagccgggcgcccgggtctcgggatcccagggtcccccagcgaggacgcgagggggccggagcccctggccccagtgccacggccgagacggagggggcactctcgggagggccgcggcgccggcttagcggggcagcttcgcggtgcctgttctgcaggaaaatcctaaccggtgcccgtactctcgaaatcgtggtggtctccccagagtcgggagacggacgcccgtctggggtagattgtgtgaggtgaaggacggcgcgcagtgccagggaacgccccagagccgtagttaatggccggggctgaccggtgggtgctgcggtgggagcgtcccgggagcgagggcgaaacgcggtgcagagggagctgtgggtgtgcacacaggtgccggtcatgtatgaatcagacttccctggacgaatgtacaggaaggatgagccctttgcatctctgggttaaaaaaaaaaaaagttaaaaaaaaaaaggacaagaaactggtgaccgcggtcgctaccggcgagggattctgtttgtcctgatctgtttgaaatttttaccatttgcttatatgccgtgtctttcctccacccacccggacgacagcaaagccagcccacaagtttgttttgtttttccatcgtgattcagatttctttgggggagatttgttgctggtaaacaaaacatcgtgtttatttcctctcttgccatgcatttgccaatatagaatgtagactctattattttaatagaacagtctagctttgtggaaaacgagattcgcatgaaaacacacaggcattttccatgaaaaaggtgtaagtggggaatgatttggtcgataacggtgtgtgcatttgctccttcattaaaagtgtttattaagtgctacttgtgggcagcggttttgagtagacagttatgcaatcgttagaagtgaggattatgaagactaaatggaaaaatgcttccagtttggacttaaacggagaaaatcaacaggatgcaaatggcttatgcgacatgattacagttctgaaaggaagaaggcccggaagtacaccaaatcgtgacagtggtaatatggccttagagtattgtggatttctaccttctctttttcagaatttttgtattttggctataatatttatcaaatcaataagttacattaaacgtgcctaaaattaatattttaataggtcattacttatttttttccaataattgtgataagagaaaattggctaacataaatgtcttgtatttcacgttttgtcgaagaaacctgcctgcaacctttccatcaagagaaaataatcatcaatttctagtatctcgattttaattttaatactctttattatggggcatctacttacttggtaggtgagttttatttttttatttacagatgatgaaattgaggcttattgggtaactccttagtgtgagtgagtgcctgccaggtgtcgggatatttctgttggactccagtgc

SEQ ID NO: 1883900 - DNA, 4001 bp, Homo sapiens; identical to SEQ ID NO: 913405

SEQ ID NO: 1883901 - DNA, 4001 bp, Homo sapiens
acactcggggccagcacgtggaccttgcactgctgctggtaggagcgcctctgttcctgttccagtgcaggttgcccatgaactcaagggtccagacgcgattgtttttggtgcagaggtagagcaggtgcacttagtggcgaatgagcttgatgcaggacgggtccagctgcttcttgcccagggagtcgctgcagctgtgctgcttgtgcaggttgtcatgggtgaagagcttggggaataggggcaccagcaggcgcgaggtgaagttgccgatggacaggctgctctcgtagatactgtgaagatgctcgttgctgagcaggccgtcggcgccgggcacctccaagttgggctggggatctccaatttgaccaagtcgataggtaccagtcagatcttcttggagcggcaccgctcgcccttgaagctatcctccaccctgattactgagatgtcatcgggcaggctggaggagttgtagcagttgtcgcgtggggggctcgccttcgctgcctgcgtccagccccaggccctgaagcttgtcgttgatgcactgggcgcaccgctgcagccaggcctcctcctcctgcatgtgggggaagtagacctccgtgaagttgcagatgatctgcagcctctgcgggtccaggtcctgcttgccgccaggcctcctcctcctgcatgtgggggaagtagacctccgtgaagttgcagatgatctgcagcctctgcgggtccagctcctgcttgccgccgtccccgtagcagctgtcctgctcgcccagcttgcggtagtggaagagctcagggaagagccagtggaggaggaagacggcaaactcgcctgtgaagaggcttcatgcaggaactaagtgagggcctacatgtccaccacgtggtctgaggcgatggtgctgctccagtccagagacaggccctcctcctcgtctttgtggtccaggaagtggccggggtccactgctcagcctcaagctggcagcctggccaccgggctggctgttctccatctcccgctgggcccagaagtggctgaagaacttattcagctggggcaagcactcggcctgtcacacagccctctccttcaccgaggggtagtagacctccatgtagttgtggatgagctgcaggtgcagtgactccagcttaagcttggcctcaaagctgcaggcactgcagcctcgggagaagttgactgtggctgaagagcttggggaagagctgcaccagcgggcagcaggccaggaccccgcctgacaggctctggtccaagatctgcttaagctccatgcccgtgagctgctacggggtggtgggggtcggctggaatttggccaccatctcagtggggttcaccttcagggagagcaggtccactttgctgtgtagctgggacctgttggacgtgagggtgttgagcatgtagaacatctcctggatcaggaagtagatgttagggtcactgttggtggctgccccagtgctgccacagtcccacttctatggctcattcaggagcctaagcagcgaggggctgttgctggaatttgccttctggaagagctcatacgtgtttagcaggtcccccgagggagggttcttcttctccatgaccttgtgggagatgccatacagaggcttcttgtagtaaggggtggtggcatggttgcggggctcctccttgcctggccacacagagcccgagctcctgccttgccggcctgctctccattgccttggcagggcgagctgttctcgggttccacatgcctgctaggagcgcctctgggatcagctacctcctctccacgctggggatggagtctggctggccattgctgaccagctgagtcctggagggcagtaaagacgctgtccagaaggtgcttctcagaagtcctggaattcacggagcagcctagagcagcatctttggcctctgtctccactctcacttcttagaagttcttctacatcaattttttttggagatggttctgactctgtcacccaggctggagtgcagcagttgctcagagctcactgcatccttgacctcccagactcaaaagagcctagctacttaggagtagctaggactacaggccacggccaccatgcctggctaatcttttaaattttttgtagaggcagaggtctctcattgtgttgcccagacaagtctcaaattctcgggctcaagtgttcctcccaaagtgctgggattaatggcgtgagccactgtacctggccatattttttttttcaaaaaattcatttgtagagtttaaaaagtatcttttgatcaagagttcttattgtatttatgtttgcaaatttcatttcccattctgttgcttgccttttcactctcagtgagttattttatgattacaaatccttattttttatgttattttattactatttattaacttatttatcttatttattagccttcaatcgttactttttgagtcttttttaaaatcttaaggtcatagaagtgtcctctgtattactttttaaaaactgtactgttttatgttacacattggcttctatatgaaataatttttgtgtatgttgtgaggttggatgttaatattcatttttatctgtaccgatgtatgaaagacagcacaatttattgaaaatgaatcttttcctcattgtactgaagcactatttttttcacaaatcagctaaatatattgtgtggttctctttacgagctctctattctgtttcattgaaatatctatacttgcaccttttccataatgtcataattaatatacatttataaaaactttatatctaatagtgtaagtcttcacattatattttttcttcaaagttatctatacactgcatttttatttgcattttatagtcagtttttcagttgccaccaaatataatgcagacaaattatgctattactaatcacagtattgtgattttcagtgtattacaaatatagatttatttaaaatactgaatctttcttctaataccaggaatgacataggactcacagtacacctttatttctgttgaatatctttaatttctctcagtaaaatttcacaattttcagtaaagggattgcatatgatatgttacattttatattaggaattcaatgtttcttcctggaaacatttcagatttttaatattttatttgatttagactcactacatttggaaagctttaattgtaattttatttttaatagatatagagctattaggatttgctatttattcttgtgtcactattaatgattttctagaaatgtatctatttcatcaaattatttcaaaatttttgacttaaagttacttattacattctctttttctctcccatgactatagaatctataatgatttccttgttattattcatgatatttagaatttgtggatactcttttttttaaatttcatgcataatcatggtatatttttatcagtcttttcaaagtaactttggcttttgctgatttcatttattttatgattgtttccttttctcatgcttcttatgtatcttctcttttctaattctttggatttaatttgacatcacattttaaatttttgaaattgacaattagattattaattttcaagctttaattttttaaacatatttatgtaagcatatgcatttatctccaagctgaggtttgcctaagcctcccatcttttaacaagcagtatttttactttcgtttttattaaattcaaaatatattttaatattcactgtaattactttttcgatccatgaataacttagaaatgtgatgcttaatttctaaacatttggtcactttcaaagtcttgctatagatttgcagcttaataacattgttgtacaaaaaacactgtcaaggatttcaaatttttggtatttattgattcttgttttgggcctaacctcagcctatatctgtctatcta

SEQ ID NO: 1883902 - DNA, 4001 bp, Homo sapiens; identical to SEQ ID NO: 913415

SEQ ID NO: 1883903 - DNA, 4001 bp, Homo sapiens
tatttttctttctttgtttcttctggtccttagtctccatagtggctatttaccaataacaagtaattctaatctacaaggaagaaggttggggtaaggaggtgggagaagcattttacaatccaggcaatacccagggcaaaaacattaaattttatttatttctttatgaagagatgatatatttgttcactgaacaagggtagaaactgcttaaccctccccaatttcatttatctctgttatgctataaattagatgagttacctctgctaagggtacattttatggttaagttactttttattcatcttaagtgtcaacatcagcagtatccatttctgcaaggatggaaacattctatatctgtacttttcagccatttagccattagccacatgtggttacttaaaatgtacttagagaaactgaaaaaatgaatttttaattaattttattccaactctaaatagtcacatgtggctaccatactggacagctcagacctagatatcaactggactaatgaagtggtttcctaacttaaactaaaacttaaattttaataaaaaatttaaaatgcttttatgaacttccaacatgatcacagtattacttttagtacctgttgactctgcaaaactcctaaattacaactcttctacatacatttgaaaaatagcaatatctagaggccgggcacggtggctcacgcctgtaatcccagcactttgggaggccgaggcgggtggatcacgaggtcaggagatcgagaccatcctggctaacacggtgaaaccccgtctctactaaaaatataaaaaaaaaattagctgggcgtagtggcgggcgcctgtagtcccagctactcgggaggctgaggcaggagactggcgtgaaccccggaggcggagcttgcagcgagccaagattgcgccactgcattccagcctgggcgacagagcgagactccgtctcaaaaaaaaaaaaaaaaaaaaaaaaaaaaaaaaaaaaaaaaagaaagaaaaatagcaatatctgtatgtgtgagacatgactagttctagatgatgcctggagaccccatggacttacagagacccttccagtgatttctgaggtacctgggaatctgtggccaataaattggtaatcactgaattagtgagttttttaaggatatccagctgcataaaatctgacagcttgattggaaaaaagcggggcagggtgccatttcattcaattaaggtcctgtattcattccgtttagtaaatgtttgtgtctgtctatgatgtgctagccactgtgccagtaaatggatatagctatgatctgacttgcagaggaaatccaaactagtatcttccgtgccatgcaataagggctacattgcaaggctgcacagggtgctactggggcacagaagtgagtcagaggcttcccacagacacacacacgagcggaaacagaaagtctttatatatcaccatatgtcaaggaacactggccgggagttaggagagctgggcactaggaacgctttgaaaccgaacagctgtgtgatttccgaggttatgttgcttctctactatattttagttccgaacttgtactaatgtttctctcccttttcttcttggtgggaaaagcacaatttggggtcaacagattcggctcaggtctaagtcgccggccgggaccacgtcgccaggaaacgacgtctccccgacaccttccctccccgtccgggctctctgcagcaattcatcccgtcactctcccaacgaccccgggcacacctccggcagatgcgaaatatgctgctcctcaggaggaaagatgacccggaggaccgcgggaggaccttcccactcgcgatcttcccagtgccccaaagccagggaccccactgccgcctaccccagcccgcggcaccgaacttgctcacaactgtgactcctcaggtcggattggacaccaccggaaacggaaattcaccgtcgcgccgactctccggagggaaacaaaaaggcagaaaaaagagaccggcgcctggacgactttcaggggagagctggaagaaagactgtcaacagctgagtgcgggcgccggcgccgtctacgcagtgcgttccaccgggtccgtatccctcccgattccgccccaccccgccctcggaactcgctgcctcaactcctgcggtgggactccggagcagcgtacaccgcccttgccttagtcctccccaaggccagggcagctgtgcggcctggcgcgggttacttggtgtggtgcaaaaagccagaaggagacacatttggtcctggccaccccggagtcacccaaaccaaaaggtaaaaggaacataaaaaagccttctggaaagtgtaaaaaaattcattgcacagtgatttttgtcttgtgaaatcatagttactgttattagcagttttttaaacgttttatattcattttttatggtgttctgacatatgagctgcttcaagtgtttttggacatagcttgggtgtaaaatgtaaaaagtggatattttcaatttgtagctttcttttttgaaacttactgaagtttgttctaaatatatccccttctttctcacctaccccaacacatttttaaaaaaaacaccaccaaatatccattacagcattgatgtgagtgtagatgaagtaaaaactttggcttccctgatgacatacaagtgtgcagtggttggtaagtgatcgcctttcttgctacctaatgagaactctggggaaatatgtttactcacatggttactgttaagatgctatagaaatataccttatcagaactgattttttttaagttgtcctctttaagacctgcatcatttttcaattagtctaaattaatatatagcctttttttatgtgagggattttttttataggagcttattgaattttaagtctagatctttgttttcaattcctcaacatattctataaataagaccaaattatagtagaaggatagtaaataagctattatcttttagaagttgtaaagagcactgattaactctatattagagaccccgcccctgccttggctgcgcgggcccccgccaaagggcccatggtcggcgcagccgagctggcgagggcagcgcgggtcccccggaacgccccccgaggcgagcgctaacgaggtccggcaccatgtgctaggtcactcccagtgcaaggccacacttgggccatccgagcaacccctcctcacgtcaggggtcaccctccccaccacccattgccccaccatggccggagaccggctcccgaggaagatgatggacgccaagaagctggccagcctgctgcggggcgggcctagggtgcctggtcatctacagccgctccttcctggagtacaacagctggcatgtgctcagctccgtcaacatctgctgctccaagctggtgaagtgccggctgcagaagggcaaggtgaccattgcagagttcatctggctggccacacgcagccaaatggaggccactgagccacaggatatggtggtctatgaccagagcacacgggacgccagtgtgctggccgcagaccgcttcctctccatcctgctgagcaagctggacagctgcttcgacagcgtggccatcctcacggggggcttcgccaccttctcctcctgcttccccagcctctgccagggcaagcctgctgccctgctacccatgagcctctcccagccctgcctgcccgtgcctagcgtgagcctgaccctcatcctgcctcacctctacctgggctcgcagaaagacgttctgaacaaggatctgacgacacagaatggaataagctacgtcctcaatgccagcaactcctgccccaagcctgacttcatctgcgagagccgcttcatgcgggtccccatcaacgacaactactgtgaaaagctgctgccctggctggacaagtctatggagttca

SEQ ID NO: 1883904 - DNA, 4001 bp, Homo sapiens
aaagccacacagcatgcatctccatgtcctttggagctggactagacttgtgaatccaaatgtcacctgtgagaggctcctaactatttaaaaagattcaatggaagaaccatcagactgtagctaaacacacctgtgaaaggatcgagacatccacacagcagactgaactgcaaaagcattggcatttctcttctgggcattttcttcgtctcctagctggagatcctgcagatgccacttctttttctttgcagctttgggtccactgtttttctttctgtgtttcttctggtccttagtctccatagtggctatttaccaataacaagtaactctaacctacaaggaagaaggttggggtaaggaggtgggagaagcattttacaatccaggcaatacccagggaaaaacattaaatttcatttatttctttatgaagacatgatgtatttgttcactgaacaagggtagaaactgcttaaccatccccaatttcatttctctctgttatgctataaattagatgagttacctctgctaaggttacattctatggttaagttactttttactcgtctcaagtgtcaacatcaccagtacctatttctgcaaggatggaaatattctatatctgtacttttcagccatttagccattagccacatgtggttacttaaaatgtacttcagagaaactgaaaaaatgaattcttaattaatttcattctaactgtaaatagtcacatgtggctaccatactggacagctcagacctagacatcgactggactaacgaagtggtttcctaacttaaaccagaacttaaatttcaataaaaaatttaaaacgtttttatgaacttccaataggatcgcagtattacttttagtacctgttgactctaaaacttctaaattacagctcatctacatacaattgaaaaatagcaatatctgtatgtgtgagatatgactggttctagatgatgcctggaggccccatggacttacagagacccttccagtgatttctgaggtacctgggaatctgtggccaataaattggtagtcactgaatctgtgagtttttttggaatatcgggctgcataaaatctgacagcttgattgagaaaaagcggggcagggtgccatttcattcagttaaggtcctgtattcattccgtttaataaacgtttgtgtctgtctatgatgtgctagccactgtgccagaaaatggatatagctatggtctgattgacagaggaaatccaaactagtatcttccgtgccatgcaataagagctacattgcaaggctgcagagggtgctactggagcacagaagtgagtcaaaggcttcccacagacacacacacgagcggaaacaaagtctttatatatcaccatatgtcaaggaacactggccgggagttaggagagctgggcactaggaacgctttgaaactgaatagctgtgtgatttcagaggttatattgcttgtctactatattttactgccgaacttgtactgtttctctcccttttcttcttggtgggaaaagcacaatttggggtcaacagattcggctcaggtctaagtcgcctgccgggaccacgtcgccaggaaacgacgtctccccgacaccttccctcccagtccgggctctctgcagggattcatcccgtcactctcccaacgaccctcgggcacacctcaggcagatgcgaaatatgccgctcctggggagcaaagatgacccggaggaccgggggagtaccttcccacgcgcacgactcgcgatcttcccagcctaccccagcccgcggcacctaacctgttcacaactgcgactccttaggtccgcttggacaccgccggaaacggaaattcaccctcgcgccgactcgccggaggtaaacaaaaaggcagaaaaaaagggaccgccgcctggacgacttgcaggggacagctggaagaaagactcgtcaacggccgagtgctggcgccggcgccgtctgcgcagtgcgttccaccgggtccgcgtccctcccgattcagccccaccccgccctcggaatccgctgcctcagctcctgctgtggcactccccagcagcttgcacctcgctcgcggagtccttgctgaaggccagggcagctgtgcggcctggcgcgggttacttgatgccgtgcaaaagccaggagacacatttggttctggccgccccggagtcaccgtgcccggggcgaatggactatggctggattgggagtccacttcctcctctgtaaagatgacagacgagggagatctcacgttctgggggtgccctatagccctcttttggccagaagcggtggatcacgcctgtaatcccagccctttgggaggccgaggcaggaggattgcttgagcccaggagttcaagaccaatctgggcaacatagggaggctacgtctctcaaaaaataaataaatacataaataaataaaaataaagccagcgtcgtggcggggcgcctgtggtccctgtggtcccagctactctggaggctgaggcgggacgatcgcttgagcctgggaggcagaagttgtagtgagctgagatcgagccactgcactccagcctgggcgacagagcaagacactgtctcaaagaaaaataaataaataaaataaggccctctttttccgggaccaacagactctgagggcagggacaaactgacccagcctaaactgcctcgccttccctgctcccgggaaaggggttttccctgagggaaggtagcatcttgccattttcttcctgcacagctttgccttcccagggatccacccattgccacctgaggaaatgccttggagcccatctaatccccagcccagctacttgggacgcctacagagactacattgtcagaggatgcatcttcctctagtcttggagggtttcttttcaatatgatcccaccggtgcatgcaaggctcaattctacatcaaaaaactaggcccactcctgtcgccgagacccccaggcttcaggtcctgtcacagtgaccttgttatcacccccagcagcccccaggtattcactctgcgtaggctatatactgggtgctgcactagggaggctacctacgtggcgcatgcttcccttatccctgaagagcttaggatgttgtaacttcttcacactaggcctcttacttcttggagatgtcagtatctgggtaaataatccttctaacatccttttggtctcatgaagcccattcttgtcctctgccctacctcagcttccccctccctccatgatcagaccttagaccttgtcaggtccaaggactgcaaccctcacagtatcccactctgaccaccacctcctatctagagcaatggagagactttgtaggtgaaagctgtctttgctactggttctcctatgctccctcgcctggctcctgcaggcggttgacttcaccagggacacagtggccagtgcccagcaggtcccactcctctcaccagctccaggcagttttattgtagagtaactcttctgagacactgctcctttccccagcacctaaggaagtatttctagtaagttccagtggtatagcatcggtgactctcctgacaagcagagggccatggctgggttcctctgatgaggtgcaggggcagggcactaagaggggaggactctcctgagttctctacctgagccctagactagtagctgctcctcctatacttcctactagtctgtgcctggttactccacttccctgttgcaattaacaattccctatgtacacttttcctgttcaaatgactgtgtggcttctctttcctaatcggactctgaccaatacgctatcatttgccaacaactcccaaagttttatcagtgactcagacctctaacctgaactccagctgcctccatgagatatccatttggatgtttaatggacatttccaaagtga

SEQ ID NO: 1883905 - DNA, 4001 bp, Homo sapiens
tcttgtatcttgggcaagaaacgccaaccagtgtgcagatgctggaggcaaggcagcttctatggcaagtcttctcacgttttagtaaaagccacacagcatgcatctccatgtcctttggagctggactagacttgtgaatccaaatgtcacctgtgagaggctcctaactatttaaaaagattcaatggaagaaccatcagactgtagctaaacacacctgtgaaaggatcgagacatccacacagcagactgaactgcaaaagcattggcatttctcttctgggcattttcttagtctcctagctggagatcctgcagatgccacttctttttctttgcagctttgggtccaccgtttttctttctgtgtttcttctggtccttagtctccatagtggctatttaccaataacaagtaactctaacctacaaggaagaaggttggggtaaggaggtgggagaagcattttacaatccaggcaatacccagggaaaaacattaaatttcatttatttctttatgaagacatgatgtatttgttcactgaacaagggtagaaactgcttaaccatccccaatttcatttctctctgttatgctataaattagatgagttacctctgctaaggttacattctatggttaagttactttttattcatctcaagtgtcaacatcaccagtacctatttctgcaaggatggaaatattctatatctgtacttttcagccatttagccattagccacatgtggttacttaaaatgtacttcagagaaactgaaaaaatgaattcttaattaatttcattctaactctaaatagtcacatgtggctaccatactggacagctcagacctagacatcgactggactaacgaagtggtttcctaacttaaaccagaacttaaatttcaataaaaaatttaaaacgtttttatgaacttccaataggatcgcagtattacttttagtacctgttgactctaaaacttctaaattacagctcatctacatacatttgaaaaatagcaatatctgtatgtgtgagatatgactggttttagatgatgcctggagaccccatggacttacagagacccttccagtgatttctgaggtacctgggaatctgtggccaataaattggtagtcactgaatctgtgagtttttttggaatatcgggctgcataaaatctgacagcttgattgagaaaaagcggggcagggtaccatttcattcagttaaggtcctgtattcattccgtttaataaatgtttgtgtctgtctatgatgtgctagccactgtgccagaaaatggatatagctatggtctgattggcagaggaaatccaaactagtatcttccgtgccatgcaataagggctacattgcaaggctgcagagggtgctactggagcacagaagtgagtcagaggcttctcacagacacacacacgagcggaaacagaaagtctttatatatcaccatatgtcaaggaacactggccgggagttaggagagctgggcactaggaacgctttgaaactgaatagctgtgtgatttcagaggttatattgcttctctactatattttactgccgaacttgtactgtttctctcccttttcttcttggtgggaaaagcacaatttggggtcaacagattcggctcaggtctaagtcgcctgccgggaccacgtcgccaggaaacgacgtctccccgacaccttccctcccagtccgggctctctgcagggattcatcccgtcactctcccaacgacccccgggcacacctcaggcagatgcgaaatatgccgctcctcgggagcaaagatgacccggaggaccgggggaggaccttcccatgcgcacgactcgcgatcttcccagtgccccagagccacggacccaaccgccgcctaccccagcccgcggcaccaaacctgttcacaactgcgactccttaggtccgcttggacaccgccggaaacggaaattcaccctcgcgccgactcgccggagggaaacaaaaaggcagaaaaaaagggaccgccgcctggatgactttcaggggacagctggaagaaagactcgtcaacggccgagtgctggcgccggcgccgtctgcgcagtgcgttccaccgggtccgcgtccctcccgattcagccccaccccgccctcggaatccgctgcctcagctcctgctgtggcactccccagcagcttgcacctcgctcgcggagtccttgctgaaggccagggcagctgtgcggcctggcgcgggttacttgatgccgtgcaaaagccaggagacacatttggttctggccgccccggagtcaccgtgcccggggcgaatggactatggctggattgggagtccacttcctcctctgtaaagatgacagacgagggagatctcgcgttctgggggtgccctatagccctcttttggccagaagcggtggatcacgcctgtaatcccagccttttgggaggccgaggcaggaggattgcttgagcccaggagttcaagaccaatctgggcaacatagggaggctacatctctcaaaaaataaataaataaataaataaataaataaataaataaaaataaagccagcgtcgtggcagggcgcctgtggtccctgtggtccctgtggtcccagctactctggaggctgaggcgggacgatcgcttgagcctgggaggcagaagttgtagtgagctgagatcgagccactgcactccagcctgggcgacagagcaagacactgtctcaaagaaaaataaataaataaaataaggccctctttttccgggaccaacagactctgagggcagggacaaactgacccagcctaaactgcctcgccttccctgctcccgggaaaggggctttccctgagggaaggtagcatcttgccattttcttcctgcacagctttgccttcccagggatccacccattgccacctgaggaaatgccttggagcccatctaatccccagcccagctacttgggacgcctacagagactacattgtcagaggatgcatcttcctctagtcttggagggtttcttttcaatatgatcccaccggtgcatgcaaggctcaattctacatcaaaaaactaggcccactcctgtcaccgagacccccaggcttcaggtcctgtcacagtgaccttgttatcacccccagcagcccccaggtattcactctgcataggctatatactgggtgctgcactagggaggctacctacgtggcgcatgcttcccttatccctgaagagcttaggatgttgtaacttcttcacactaggcctcttacttcttggagatgtcagtagccgggtaaataatctttctaacatccttttggtctcatgaagcccattcttgtcctctgccctacctcagcttccccctccctccatgatcagaccttagaccttgtcaggtccaaggactgcaaccctcacagtatcccactctgaccaccacctcctatctagagcaatggagagactttgtaggtgaaagctgtctttgctactggttctcctatgctccctcgcctggctcctgcaggcggttgacttcaccagggacacagtggccagtgcccagcaggtcccactcctctcaccagctccaggcagttttattatagagtaactcttctgagacaccgctcctttccccagcacctaaggaagtatttctagtaagttccagtggtatagcatcggtgactctcctgacaagcagagggccatggctgggttcctctgatgaggtgcaggggcagggcactaagaggggaggactctcctgagttctctacctgagccctagactagtagctgctcctcctatacttcctactagtctgtgcctggttactccacttccctgttgcaattaacaattccctaggtacacttttcctgttcaaatgactgtgtggcttctcttt

SEQ ID NO: 1883906 - DNA, 4001 bp, Homo sapiens; identical to SEQ ID NO: 913440

SEQ ID NO: 1883907 - DNA, 4001 bp, Homo sapiens; identical to SEQ ID NO: 913441

SEQ ID NO: 1883908 - DNA, 4001 bp, Homo sapiens
ggctgcctgctcctaggacaggctcttgctgggtcaactgtgttttattattctctccctacccctcctgctgatgtcattgacaaagctacccgccagtgcccggcccccggaacattccccagccatcccacggtgctctttcctcaatcagccacttcaagcaaacaccattcgctcctgctgcagagcaaagcttgctgtttctaggatcctaaacaagacatgaggtcatgctctccacctgtgaagaatgaaacgtaagctggggaaggaaggtgctgaggaggggaggaaagcaaattaggaagaccagcggccctgccgaagctttcagctcatgttactcacaccccaaagcaaactcctccataaaatgaggtttagtaatgcaacattttctaacatctggaacaaaatgatttgggtcaaacagatgacatatgaactgactgtaaatttgtttcaatgtgtactgggagggagggaaattaacaaatatgtcaaatccatgatctattaagtattgttgttttccataaagttcttctgttcaagaaaaaaagcaagtcaatttaaattttctttaaaggaaaatagtaagtaaatgttgatacagatggttgaggtgtagcaaaaatcatgggaaaaaataacaaataaatgactaacattttgggaagctttgcaatagacgagcatattcatgtacatgagctcccctgaccctgaatcccacagagcacaggcattctctccactttagagatgggtaaactgaggctcaggaagggtaagtatgtgacatgtcaactgaccaggaaataatggagccagggctcaaaatcctgtgtactttttaaatgttggctcccatctcaagttgatggcttttgtctgaccttttggcatgcgtttgttttggcaaatggggaggtagggaggtgggtgggtaaaattgaggggttcactttgggcctccctcaaagcatctctgagtgcggagcagcaagtaatcatccccacagcgaggttctgaagctctcagggcaaaaggcaagtcttgaggctcccaggaggaggcgggtctgaatgctcctgctggttggaatctcacaccttagtctgcagggcaaggaggagctgttctttgtgacttggtttagacaaaagtacatagacctgggtccctgtggccctggctgtcagccggttcaaggctggaggtggtgccaggccccagcttggggctgggacacaggttgctgcccttgaagagcccacaggggcagaagggacagtctacaaatagacccaaagacacagcacactgcaaacttgcagaggctttgagcgctgcacagagcaggacacccagcgggggccagtcatctccgctttctcaggccacagtcagggaagcataaaaaagaaccttggagagaaagggggaaaaaaacccactcttgcattaaatcctggtagcaagcagactatcctagggccagcttgggagagtaaggaaggcactctgggagctggcatggcacaagccaaggaaaagccagtggaaaaagttgggggatctgtgggcagtttggggagcaggtgaccccagcctgagacagaaagcagccattgggaaggcaggcatgagcccacctcagggttgaagggaggccagcccttcccagaggtggagaggggagcctggcagaacgggacttgtccactggtgcttggactttgcaaacaaccgggcttgctgtagccaagcttaccaagtggacacttaccttgcctcttccccgattatttcatatccttctgtaactctcaccctgagacccagcctggccttcccctagctgcagattattctgctccaaaagcacagcagaggacggctccttactcgaggaatgcgggcggcggtcgtccagagccgatgatgaaacgggctatttctgccccgggacatcagcagggctctgggctctggctccaaggcacacactctcctgtttttaatgtttccctaaacaaatgttttccttcccacctcgggatatttttatttgactctaggtgctggaatagctttagcaatcattctggattgaagttggaatcgtggttagggtccggctaagcggcaagcaatttctcactccccaagtgatctgttactcgtggctgatttggaagtaaaaatagcagctgaggctgtttgtttaatctgactgttacttgacaccacgcgggtgttgcagtgcggactgtttgcctcttccccaccaagaacaccatttggtttcccccggctgggtctctatttaggtaagcttcgcggacttcccgtgtctggccggcttctggtcactgatcttcctcaggtgggtaggtttgtgagctagaggaggcttgggtcctgaatccactctcctatcacctttgggcagcctggataaagaggaaagaagtcttggctgctgggcagagccgggtttctctcccattcccgaggaggcctgagcagctggacacgcagagagcggaaggtacagcccagacacttgtctggctccttagcgtgggcagggaggctcaagttcatggcgggagggatgttcccgctgggccgatgctgtgctggggaagtagttcggtgccagggtgctgtgcagggtggtatgtgtgtgccgggagcccattggtgttggggctaaggttcttggtgtgctggatgggcctcggggaccacgtacccggaaccgtgtacatgtgtgactttgtccttaggtgtcatctgtcagggatctctgctcccacatggctgagtgcacagatgtgcccaggccactgcgctgtcaaatgggtgaccccatggtcccaggttttcagcattcagggctgagggaggctggctttcttagctcccccagcgctgggccaggcagggtcacaccagctgtaacaaagagaaaaactggtgactgagacgttctggcctgtgggctctgcgagcatgtgtgtccccaaaacaaagcccgccacaggctgcctgttcttacacaccctgggagggcccccaccagactcccacagggtatgcttgactgagtctaaaattacctcttttattttctggtggagaagaattgaacattgagaacggcagtggtcaatgtgtgtggaaagctagatagccttaagaaaaatcattgtgtaggcctttcaggtagctccctaagtataggaacctgggaagcagattaaacagatgtgtgtagtaaatgaggtcctgttttccagcatttgagttccctttgcagtagtggctggtaactctggtctgtggtctgagcatctggttttgtaaataaagttgtattggcacacagccaccttcattcatttgcatattgtctaaagctgcttctacactatatcagcagaaaccatatggcctgcaaaactgaaaacgcttacaatgtggccctttacagaaaaagtttgctgaccactgtgttacaagaacacatcttgagatgggtcaatttaatacaaaaaaaaaaaaaaaaaaagcagtgaaagttcttgctgttagaatagtttgtaagccagacccttcaggaccagtggctggctggctcctgagcctcctgcaccttccagggcccactttttaggcctggctgatacaggaaatgtccagtttgctgtcacggtgctgggagggttagcttagcagtagaatcaccagacacacagcgtgtccatgtggcctgggctgagcagggcagattgtgcttatcggggtgatttataaatagccttccccgggtgacccaagtccaacacacatctgcccctgggtctctgggaacaagtttgtctgctcttggatgaccagaagctcactgggaagggaacaactgtgtgcggtgggtaagaagggggctggtagaatgctgtgtcctggagcagaggggcttagg

SEQ ID NO: 1883909 - DNA, 4001 bp, Homo sapiens; identical to SEQ ID NO: 913464

SEQ ID NO: 1883910 - DNA, 4001 bp, Homo sapiens
atgtccatcagcatttatcaataatccctagtcaccttgtttgcattcctcgatcagttgacctgcaaactagctgtcttgctagttaacctcacgaggactgggggtggcttgccggtcccactgtgttcccagcttccagagtgacactgcacctagtaggcactcaaatatctgtgaaagggtggatgagtgaatgggttggaggaaacccctccctattcatgtccattctgaagataagaaaactcgctgcttctacctgaagggaaaaccttcctcctccaaaaaccctcctgttctatatgaggctttagaaaccaaaggcaaggacgtttctttcatctgcctttcatcctgcaaaaagccctccactcaagggaagaaagggcactggagtttattgagtgggagacaggcggcaggtgggagacggggagggaggagagaaagggaaattcaggaggaaggagtccagcgtggattgctccaaagctcacccaccacgccctgactgcaggtgtgattcggggcccccgtggctctgctgggtccaggtgcaagcaggcacagaggtgctggcgtcagctcgattcgcaggccctggactcctgtctaaacaggacaggcccgggcaaccgcagggcaggggcgtctgccaatgatgggggaggactctgctgcttcttaagctccagcgtctcaagccagggcgagacagcccgccggccgcccggatctccacctgccaccccagagctgggacagcagccgggctgcggcactgggagggagaccccacagtggcctcttctgccacccacgcccccacccctggcatggccgaccagctgactgaggagcaggtcacagaattcaaggaggccttctccctgtttgacaaggatggggacggctgcatcaccacccgcgagctgggcacggtcatgcggtccctgggccagaaccccacggaggccgagctgcgggacatgatgagtgagatcgaccgggacggcaacggcaccgtggacttccccgagttcctgggcatgatggccaggaagatgaaggacacggacaacgaggaggagatccgcgaggccttccgcgtgttcgacaaggacggcaacggcttcgtcagcgccgccgagctgcgacacgtcatgacccggctgggggagaagctgagtgacgaggaggtggacgagatgatccgggccgcggacacggacggagacggacaggtgaactacgaggagtttgtccgtgtgctggtgtccaagtgaggccggcgcccaccatgctcctgggcgcccacgcggcccacagggcaagaacccggggcctcccgcctcctcccccatccccctgcctcccctgggcactgtggcttcctcctgcgcctggttgattcagcccacctctctgcatcccgcttcccgcgtctcttctctgcactcctgccgaccttcccacctgctcgtctgaatgacacggaacgctcccactgcaggcaaaccgtgacgccctccccactcgggagaagcagagctgaccttaggaccgagcaccagggcaggttgcgctgactctgcggccctccaggacggacaccgggtgaccccttagggcacccaggcaagatccctaagaggcacccaatgcccaggccaggggggctgcagccctcagcccccgccaggattcccgcaggctcctggactggaagctccctccgcggtcggattctggagggtgggaggcatcttggcctgcagtaagcggtgctgacggggactctggccacagaggtcaggcctcctgaaaacagcactgccttccgcgctgccccagcttgccccattccttgtccgccaacccaccgtgattcatcttctgaagctgggagtgaaactgggtcagctgtaacctgttcctattcatctggaaggagggaggcttggatgagcaggggatgagagctgcagggaaataaatgagatattcgtccttatttcatttcctttttttttttggtttccatggaaatgatccttgttaaattcagggttgaaacgaggcaggaatctccatttttgtgctttttgaaaatgcaatgaattcctatacgggggagcgggaaaggtgcctcagagagagacaagtctggatgagggaaatattgaatattctcaatcaaatggatacgctggcagcaaagagtggttaaaagtccatcaggacttgaaagacctgagtccattacgttgagaagggacctgctgattgctttgattccccctggcaagtgctccctggttgtgaagtgccaggcactagagatggtgaggggttggggggcagttgggcacacacagtgtaagagcaattcagagccgttagtcctgcactagccctgcaagctgctggcaacacctagagaaggtcgaaggggccctgccagagatcccttcaattctaaagggaggtatgttttgcgggatgggcactagacggagctcatcagaaaaggccatggtggatgtatcctctctccctgacaccccacccccgcccaccaacacccagtgtttcctcctttgtaaaacaaagagctgggccccagccccggccttgccatcatcactgcaccactgggacctccaggatgacaggaccctcatgccacctgcttgggctcagggcaccatcaagcacttggcctgcatagacaattggcacctccctatggggcagccactattattaccttcctcatcttacaaacgaggaagtggagacacagagggctttagaaagcagccctgggtcccaccagtgggtaagaggcagacctgggatttcagtcaggtctgtgccctgaccactcagctacaggtctgacaccaacctgtgcctccatcatggtaactacggtagcgcctctctccagcacttgtgaggagccagaacaacattcttaacacacctggcatgtagtaggtgcttaataatggcagctactgttaccatcaccttcaagatcccttcctgctctaatactgcaagactgtccagggtagtcacccctctccatagctcgagaacaagacaagagcagaaaggggcagaagcaggtgctctggggctggattcctgaggggatgctggatggtggggtgtcaggtgagcactggcccagggccggtgtaactgcaggtactcctgtcaggggaacagaagcagagggcaagctaaggctcagcttgctgagcaaatccccacccctccctgccactctcaggagtcggggttgattggacacgtcctggggaagatttgggaacaagcctcataaacacatggacagagtgtctagagttcattgggcagcagcaccccagggggtggggggctgtgagcaggaggggcaggcagaagcccccacatggctgctgaccgccaggcaaaaggaatagtacatcaggcctgagtaccttttgtagaatgtctcctaaattctgcaggaaggagagaaaccaaggtctccctgcacagggcatctttgtagtcactgtcatacacgtggctgaggtttgacatctaagccccttcttcccaggtgcaggcttgaggctcttacaagggttgggacctacgcactgccaatgcctgggccaggagggcacgccagtgtctttatttgtcttcctcccagcctcccagcgattccgccagggcaggtctttttgcaaccccacacaccagtcattctggagccacctgggcctggattttgcaggtgctgggagcctttcatcaagagctctttgtgctcaggcaggcactggctggggtggtggaaaggtcctacctgctctcagcttagaactggcagccccagatcctccctgagggggagtcctcagaagcagagtagtaagtggaggtgtctttttttttttttttttttttgagacagagtctggctctgatcc

SEQ ID NO: 1883911 - DNA, 4001 bp, Homo sapiens
aacattctataggaagtcatttccttattataatgcaatcccagattctatttagctcatttggtttgtttgtttatttgctttccccgggggcaaaaatatgttattttcttattctggcttaaaaaattttaagtcataatttctgatttcaccagtaaaactaaacaattttggctctagccagctgttgggaaaactcaaaagaaatttaggtgctacagaaagagaggttagtaattccaattgttcagctcttgcctttagagtattctctgagttgtgttggagtatgttattgagttgctgtgaactactgctgccaacttctaccctagagatggctatatttcagagatgagtgaaattatatttgtaaacaagtttataatcattaataaagcttaccaatttaagctcttcagaaatacacatccactattataattttctattgtttaattacaacctttaatagagacatgaagacttttaaaatgtataagaactctaaacttaattaaatttgatttcatgatgtttatttggtttttgtaagtttcaggtgtcaaattatttctccttagagatcctggtgaaattccaccattgactgttccaacgtactgtttaaaaatccctaagaatatttttctttaaagttgacaactgtgcactctgggatccagatgctatattcgcagtacgatgattttgttctgttttccacacatggccttttcatacactgtctcccagggatgaaaaattctgccttgaatgagaagttttaaaccttgcttgaaaataataaacacgatactttacatgtttatggccatttaagttaaaaaaacgtgcatttacatgtatcatattgttttactctcaaaattagtcttgtaaagggaaaaaaggcattaagtaattcagtaaattgtctgctgcatgctagccactatgaagggactgcatgatagacaaggcagtcccaaaacttagaatttccttgggaaggtaagacacgaacagaattaacagcaatggggtggtacataagcgtctcttccaattgagaaatagaggggcaaaaggagatttatgtgccgcattgtgctaggaaaggcacatgtattatcccctgaaactcgaaacccgtgtttggggcatggtctccacatgatttgcacagtccaccacagtgtgagtccccacgggggtccttttgacgtcgagcccatagagtcgtgatggagtcttagacatgaggtagaactggcttttttactcgtgaaaacactgaggctcatggaggtgaaatgactcggccaaggtcacacacactgatagcggcagaggcgcggccggaaccaggtcttctgatgccagcccagtgcctccctacatctctactccctgtggaaactatttgcttccctatcgcccttcgtctgggtgggggatgtcattttcagtcaatttacggacttttcaaaaagagaagggtggataggagattggagaaaagtttcctttcggtcagtgaagaggcctgattcgttccaacaccatttatggacctgctcctgccaggcactgggcatccaggacacagcgaacacagatcccctgccctcaaagacgccctagttaggggcgtctccgggtctttgatgacctcctctcacgagcggtccccagccctccccagggctcacctgccggcctctgcaggtacccacgtccctaggacccgccactgggccaggcccaagcagcatcaagccccgggtccccgccattgcgcccgcgtcgcgcgcctccagtcgccacggcaaccagggaggtgctgacccctgacctcgaggccccgccccttcacgttcccgagaccaacatggagaaggccaacccggaagtgccgccgcagccgcccgcccggtgttaggagccgccggccgggccaggccgaaccaagcgcccgcagccctgcagcccgctgcccgccccacgtcccgccggcgccggggcggccgcgttccccgccctcccccactccacccctggctacccgctcccgcccgagaggaggagctgaggcgagggggaggaggaggagggagaggtttgcgagagggagcgaggccgcgttagccgccggcggttcgtattaccggggtcgggaggaggagccgggccgagcctgcggacgaacgccgggcgggcgggaggcgcggaggcagcggaggctgctcggccgcaaggaggcaggcgggaggccaggggtgcagaattggggcgggggctcccttcacccccgcagccctccgcccgggtccgtgtggccaggcctcacgtgccccgcaggcctggggaaggtggagacaggggcgggggtccgcgcagaggcctgcacggcgcggccaggtgatggtgggcctctgtgtttctccagacgaaaggggacccccggagcggccgtgcccctgggctgcccccgcgaggcgttttgacatcagccatagggaagtcggggagccctgagcctgcctgtttccgttaagtgtccttaggatgcagtgattaaggaattaggctctccctccgggaggggcactgcctgtgctagggaactcgggggcagagaaacaggacaggatgatgctgtccgagcaagcccaaaagtggtttccaacccacgtgcaggtcacagtgctccaagccaaagatctgaagccaaaaggcaaaagtggtaccaatgacacatacactataattcagctgggcaaggaaaagtactccacctctgtagctgagaaaacccttgagccagtttggaaggaggaggcctctttcgagctacctggattgctaattcagggaagtccagagaaatacattcttttccttatagttatgcacaggtccctggtgggtctggataaatttttagggcaggtggcaatcaatctcaatgacatctttgaggacaaacaaagaaggaaaacagagtaagttatgtaatttattttgaatttgggggagtttatatcttatttatggtttttctgttcttggaaattatccgtatacttcgggcgttggtttttggattgaaatatgatccagttttaagcaccatatttgcatgaatctgaagtaaaagtagcactcgtgatgaaatattttttaaatggaatcattaatgatcccttattctttctgttaaacatctgtcaaataattgaatattttgtggtggattttaagtaagttaacattgtttcagtatgaggactggatcacagtattgaccaactagaacttcatataaattgttatggattttaaaccttacaattatcaatgaaatggaagatgagaaattaaatctggcaatgtaatgttgatgtgtcgcactttgtagctgtcaaaagataaatcaccagatttagaactcagtatttcgtttcagcgttataaacacagcttttattttagctcagccatttttcagggtcagtgtgccttgatgggagtctatacctgttagaaaaaaaaaaagttttaaaagtatgtacagacatcctcaacttcgaatgcacttacattttcctttgaatttgcaattacatcagagttattgtattcagaattgattttccaaagctattgtgtttagaccatattaaatgctgtaggatggagagaatgataaatttttgtgatgaaatgatttgataacatcttcagtggtcttttcagtatgacttttgagcttgagttagatacattttaatttaaaaaatcataatataaattaacactaggatattgtgtcttaaattgaaaaaaaatatgtttttagagttaagtatactcaccccttccataaacttaaaaggacattatattaatgaaattagtgagagaaaaatactggttgaacttctaagaggactttccatttccaaaatagtgttggtgttttgttcagttat

SEQ ID NO: 1883912 - DNA, 4001 bp, Homo sapiens; identical to SEQ ID NO: 913476

SEQ ID NO: 1883913 - DNA, 4001 bp, Homo sapiens
atggattgtttgacatgggttgttggaaaatttgctcaccccatggagaaaaatatagttagatccctatctcacaccatatgggaaggagaactccagatggattagataactgaatgtaaaaaagtaaaactatgaagctaatggatagaaaaaaatgatgggagaatacctttatgaccgtggggttaaggaggtctaaataataccaaaaaactatataaaaaatatagggaaaaaaagagctaaagagccacagtatcaaagttaaggactattgttcccttaaagacataaaggcagagtttctagtcttctaaagcagattgatgtccaggcttctcaaagatatctgtaaatcaaaagaaaaagaaaaaagatcaatagaaaaatagacacagacactgaaaaggcagttcacagaagggaatctcaagtagcctatgaatgtataaagaaatggtcaaaaaattcactagtagttagagaagtgaaaatgaaagcaaaaaatgagcttacactactttcatcatattgacagaaattagaaaattagctaattagatgagtcaatatttgcaaagcacttagaatagtatctggtatttactaaacactttatgagtgtttaataaaaaagacctatcaccttctggaagggatggatggaagtgttggatggaaaccccacactggagtgcagcgtagggcagtaactctggtacacaatcttaaagtgcttggtaagtacccagggcttgtactaggctactgggcatcgttgtgctcttggaaaactgttcatctggccagatgagtttgaaaatatcacaccctctagatagttacagccttctaggttcatgacttggctggcgtacagagattttgtgagaataaaaagtgcacacctttctccagtagggcacatggcacgggaaagagagtagagacagtttttcagcctccattgccccatggctggatgtgtttgtgcaggacgcagctgcataagcaaatgtccctgtgcatccctataactttaacaatcttactccttggcatatatttcagaggaatttgcacagaggtccttaagggaccacggacaaagacgatcatggctgtattacttgatgtattggagaattagaggcggccttgttacctaacacctggggaatggaagtgaagtgtggtagatgccccttatgaaacgctgtgcagtactcagaagcaatgaactatatgcttgccaatcgcaacgaggacagatccttaaaaagaatgttgagtgaaaaaagtagaaaataagataatctccaaagtccagtagcattatttaaacatttttaaaaaatacactgataaaaattttgtacatttcccaaaaatacatatggaagcacagcagcatgaatgcctatggggttgaggataggggttgggagtagggatggggataaagggggaaaataaaaccagagaggagtcttacacatttcatgaaccaaggagtataattatttcaactatttgtacctgaagtccagaaagagtggaggcagaagggggagaagagggcgaagaaacgtttttgggagaggggtcccagaagagagattttcgcgatgtggcgctacatacgtttttccaggatgccttaagctctgcaccctatttttctcatcactaatattagattaaaccctttgaagacagcgtctgtggtttctctacttcagctttccctccgtgtcttgcacacagtagctgttttacaagggttgaactgactgaagtgagattattcctcgttgtctcggaaggcagagtgtagccgccagtccttccctcatccggaaccttctggtccacatttccttccaagcgttagtcctcggctctccatgcttggctccctagtgtcacacaccgtcctttctgggtggcctcttccaattcgccctcttctttctcctgggtgtctccatctgcccacaccgtgggactcctcccagcctctcaggggcaccgccccctcacttccttggctccgccccattgggatatatttgcatatttctctgaggaaccctgcccaggtgccagccgcagaagctcctcccctttcgaattcccgctagcgcccctagagggcgtgtccgttgccaggcgacgggccgacgcgccgagcgcgggtttccgctcggggcgggcgatagagacagcgcgtcgcgcctttagcttctttcccagactccggcccagctcctgcgatctccacagcagcctctgaggccgcccccagagagcatcaggatggctgaggtcaggagtcagcgcccctctgtcgcctttcccttgacccctccccattgtccctctcctactgacgattgtcacaaacggtgattccaatatttccccccatcaacatcttattcccctgcaccctcactcactcccgcgcctttctccgttggctctggcctctttacctcctgtttctccttcatttgtgtggacaccccactatccccactgtggcatcggcgctatgctaagtgcggtagaaaattaatgaattctgaaatccacacgtgacatgcacccagccctagatttttagtcatggagtgataccataagagaggctcacacagaaatattggagatgtcttatctcacaggggaaaccgggaagaaagcttcacagatgcctgctgtcatcccaatcaatggcccttgtccacctgtcacaccctgatttcctaacatgtgatcacctgctgtcacacagcttcattaaggctcttctgcccatcacctctgccccgtgtgttcattgactcctgtgttaacatctcgtatcaccccaccactcccccatattacagtacaccccattttcagcctctccaatgaggggttatttctgcaacccttcagtgactccctgcctgccccttagccccctcacgtataacctcaagagcctcgggtccctgtcattacttgccattcacagtccccatccactatggccctacccaaatccttcatggccccatcagagcccttcccccatcacccatcccacggtctgttccagccaggaccagctacatgatttgcaaggcctgatgcaaagtgaaaacacaaagtctcttcaaaaattacaaataattttaagacagaacagcagagcattcaaccaagaatggggcctttctgagcaaggggccctgtgcaactgaccagttttcactcccatgaagccagcccaagccccatcatctttcagcaccatcgtgctccaccccctccccaccccattctagttactctcttgcttcctctgcaccattcacatcccctcatcattgcttttcctccatctccagtctagctttataaattccgtcttcccgtggtcaacacctccttcctttccttatcatacgatctctttcatatcatccatcttcctcacgcctgggctccatcactcacatctctctctgacatccatgctgctgtggccacttcacttctccccattacccatagtcatttgtatctctttcttcccatttcctttcttgttccttctagttctttattgtcccattattgcttttgagtgttttctcctcttttctcccaccagtcatctttgtttatttcattcttcattccccatagggaagccccagcctcccagaggcaccagcccctcatttccttggctctgccctattcaggatatatttgcatatttctgtgaggaaccctgcccaggtgccggcctcagaagctgctccactattatggattagttatttccatttccctctttctgttactcctctcgtttcttcctttcttctacttttcttcttacttgacctcagccaactttctcgattctgctttcacaattctctatttcccctctggcctcatcttatattgcagttctcttttccttttccctt

SEQ ID NO: 1883914 - DNA, 4001 bp, Homo sapiens; identical to SEQ ID NO: 913482

SEQ ID NO: 1883915 - DNA, 4001 bp, Homo sapiens
gatcttgcttatcaaacactgcaaccagctagaaatgaaacacaaatgtgcatttataaataaagacatttaaattactaccaaaaatttatactactttaacataagtctacagtgggaaaatacccgagtgaccccagaatgttaagttttaagaagcaaaaccttggctgggcgtggtggctcatgcctgtaatcccagcactttgggagggcaaggtgggtggatgacctgaggtcagaagttcgagaccagcccggccaacatggtgaaattctgtctctactaaaaatacaaaaattagccaggtgtggtggcacacgcctgtagtcccagctactcagggaagctgaggcaggagaattgcttgaacccaggaggcagaggttgcagtgagtggagatcgcgccaatgcactccagtctgggcgacagcatgagactccatctcaaaaaaaaaaaaaaaagaaaagaaaagaaaagaaaaaaaagaaaaaccttaaaaagacaatgtttctgttaatgttgatgctttatttctacatttctgaagtgaatattttatagacaaaattctatggctgaaaaataatgaaactgtttgctatcacagcatgctaagatgaaagtaagtttaaatatgttctaaaatataggctatattgttaagtggaaagaaaaaatgcaaaacacagagcgagaatgtgtatatatatatatatatatacacacacacacacacgtggtataagctacacttcatataatgagaaggggatattaaaaattatacatgttatctgcacatttgtgcataagatatctaaaaaggataaaaaggaacctaatgaaatgggaatctaataaaaggaaatctaataatatgagcatgcagaaagaggtggggaagaacataactagcctaagtaactttggaaaactattttcattgttgaaagctaaagacaaaaaaaagtcccacaaatactattttctaattagtaaatttatttctcaacaagcatacggtttcacaattctcaatctactatacacacacatacacacacacacacacacacacacacacacaccaggaacaaacaaacaagttaacatattttggaaaataaaagccaattttctcactgttagaagttacaaagaaggaaaagctagaataaactcagtggtgttagagtggaatcaaaggcaacagtaagaactcacagtttttataagtaggtaggtaggtacacagtcagataggtatagacaaatgtcaatgcatgtgtgagtacaccaacatagagttcttagctctgtcaatggagagatcctagagtaaatgacattccagtgctaatgagcacacctagtgctcagatcatggtttctagtaccattctccagttaatgatgaaccagggctccctagaaatagggttaatttcagggctgaggtcagagaagatgcatgataagcctggaacactttgtgatgccaaaaataaggaagaactcaaaaatgatgaaggcatatcaaaaggaaacaggtgccaacctgaaggggctctcaatggccaatgttgagtgttgggagaaaagctgagtgttgggagagaagctgaggcagggcttggaacacgtccagggtctaggattaaaacccctcgtggtctttggaatgtgtctagacttgctggctccttgcttctagcactccctttatctcaagtagccgtatgtttcaaagaaaatgctaaaccgtcacagctgtagctcattcacttgatacaccgcttcctttcaacccccacatcttcactgcctgtttctttgtttgatcatcaataaatagtgtgggatcccagagctcagggcctttgcagcctccacactagcattggctgcatggtcccactttctcttttaacttgtcttttctcgttcctttgactccgccagacttagtagcccccatggcctggtgttgggtctgatcactccaacagttgagacaacctgaaaataaaataaataatattagcattggatcataatccaaagaatacactaaacagccatgagtccataataatataaataattgaataaataagtggtgtagaagcaacagctgtttcctactagaacattccaaataaatgcagaagtaatgatggaaagaaatcattaggcaacctccaccgtaataactgctataggtaaaaatctactcatgggtcctaggactaatgggggagaatacaatatcaaacaggatatttgtatatctctaaatgtctccccgtatgatacatttcagctaaaaagggaaaaatatttggcagcccccactgtaccaagattaacatcaccagtaatggcaacatcacgtaccatctgataaaatgccctgagaagtatgtaacattacttctgtgacattcctgccacatgaatcgtatttatttcatagactgtaccttcatttgggtttgtctgatgttgcctcatgattagatggaaggttacttcatgatgaaacattccacaaacccaaatggaagtgcagtctacaaaatatttacaaaataaatataattcttaaaaagtatcaaggccatgaatacaaaagaaataatgagaaaattatgcaaactggaggaggctgacgaaaaatgagaactacatgcaatgaggacagaaaatgggtactggagggagaattcagatgcgctctgaacattagttgactgtactgactcagtatgagtttttcacctttaataattgttctatgattatgctaaacattaacattagggataggtgaagggtatgcagaaatactgttaatattatttcaatttttctgaagtatataattatttcaaattgaaacgttttaaaataaaaattgattctatttcttcttataactaatacagctcttaaaatgttagtacacttattaaaaatcccattgagaataaggtctaaggatcaacaatgactgtcaccttgggatattcatcctacagccccatgcctagaggaactaaccttaggattctgatgagaaaaccatgcctgaagccaaaatccaccccttttctgcctccaatccaaggacagaaatatacatgtacagaattcaaatagcacacataattacaatcctcattttataaatagttttgtcacttggaacaaatgctatttccatgaatatgtacattttacatatcatcaatccatttatgaaacaacaaagagggtcatagagacatgtaaacaaacaagaagctcagaaccctgctgaggtataatataaaaacacctgattaaataatctggaaggagggtaaatggtatgaagaaatcaaaacaggatgaatagttgagccactcaaagttacagggagcaaactaagtgggaaaataaatcgttaacagttacaaaaactggaaatgtgcttgtatatatgagacaaattgtccataaaatcaacttgtttatctgacattggctggcaaggatctccctgtactagtaacacagacattcaactagattaggagtcatccagcaacttttcctgaaaatggcaaaacagtaaacatgtttggagctgtggtccacatcatctattccatattctactcgacctctgcagcatgagagcagccatagacaacacataaacaagtaaacagggttacgtttaaacaaaactttaagtataaaagcagtactgatagggtttttgcatatgttactttaattatgactttaattgcttaaagtatttcctggaaacacgaagttgttaacaagtgttagttatttttgtttgagagaatttcaagagattgaaattatcaacagaggaatgtgaaagtcgttgggcattaagctaagccataaaaactttaccctgaaaatcgtgggggtgtccttgaatgcccacgagtttaatttccattttctgcct

SEQ ID NO: 1883916 - DNA, 4001 bp, Homo sapiens
cctcccagaaaggactccacaggggtactctggatgagccaggacgttaacatcgggagttaacgtcccattcaggagcccattttgccccccagagaccttcctcctcttccctgcttgctgacggatgcctgggatgtctatccaaaggagatggtttagtccgttctctctcttctacacgggccagaaaattgccaagctctgtctacatccatgaaactatattgtgacatggccacttgacatgggaatatagtgacatagctaaatttataggctagtgtgttttcaacattttcttaccagcaatgatgctcaaatgctctcaccctatctctaacgcccctcatgttcttaatcacatcctcagcctaattgcatccttgggcttcactcagggataaggataaagttcagggatgcattctggtcagcaaagtccactgtacacattacatgaaaataaaaaaacattcttttttcttgttgtcctatgtcaggatggctgcaacaaaaccacaacaaaatttcctaccccgagctgtgattctttccatctccacctgggtcagcagaatctccaggtagtattagctcacctaattagctgctttccctctcttgcagctgaaaaccacacccacagcacatcagtcacgtccggccctgtgtgaaagccctgttctcttcctactgacattccactttgaagctcattgccctggccaagaatacatacctgctagtgtgaccctgaaatacactgctgcctggtgttttgcccgccagctcccggcatccaggcgtcttctggccaactgctggagacacttgagcatcaccctgtgccaggagcagggcccagaccagtgttgtgccacctcgatccctcaggccgcacctgccatccgctatgatcctcaaaaccgggaagggctctcttctccaaaaacttcctccctaacaagctccactgataaattaaaggcttcattcccccatcagataaaaggctaaaacgcaatgaacgatcccggaaaaagttaagtaacagttccacctggaaacttgaacggcccttcttggcaaggtgattttaatcaaacagaattagaagacacggagagcctggaagagggaggtgggaggatgtggtcaagggctgcccagcgacaaatcacttccgccacgctggcgtatggcgcctttgctatgtgccaggcacggcgctggatgggctcttcgtgcatcatcttcatttacgcggcagtgacccagtgaagtaggcattatttccattttgcaggagagcaaacgggttcagatgtgaagtatcggtctaaagccaaacggccactaaccggcacggcataagcgttacgttccacaaggtccctgacggccacctgggcgcacaggtggtgagagcctgggtcaccccactcccactggatgtgccctggtggcgaccggggcacagcccactgtcaggtcgatgggaaagactgcttggcacagaggctcccgcataggcccaggacacggggcagggctggtcacagccatgagttcgttgccttgacctcaaatgccagctgcaacccccgtgagccagggacaccctggcggagtgcacgcacgcgtcgcggcctccctgcgctagcccggcgcgcgtgactgtctaatggggccggcgccagcgtcccacaccgcgaactcgggcaagcgaggacagaaacggtttctccactcacaaccgctcctttgcactcacatcccgtctgtttgggtgtccccgggttgggacattaggttctgttggtcccgctttccgcaggcctgaccctaagcgtcgtcgtcgggaggtggtggggtgaggcgggggcggtgcgtggcttacctggcgttagcttgggatcccgcgcggccgactcccttttccccttcactgcagcgtccttgtgctgcttctcagtgggttggccctagcccccacccttgaccctcgaccccggcggaggtggagttagtcccaccgcacctaggggcgcccctcgatgacagcacaggcctgctcccggcctgagcacctgcaaggccgcgaggaaccctggaacatccggttgctggcgcacaactctctgggaccggaagcaggtgaggcagagtgggcggagccgctcaaagcccgcgtccacgttctgctcccatgccctgctcccatgccctggctgcaggcgcctgcggagtctattgccctctatccctcctgctgcagccaagcaaagagaggggcagagagcagctacagtcaccatagccactttctaaggcactccagaacttttcccatctcaggcagaaaaataaaacccagcaagaattctttcccctacttcctgttttacactagaccacaattcttaaacttggaagccaagcatttggtccttcggatattttggtctttttggtttcactctcctttggggtagaggtgccagagaaaatacagggcgctcagtctcaggaaaacaataaacgtttaagtatcgtccatgcattacttgggacatactgaaactgttgtttatctgttattttcaaatttaactaggcatcctctggttttatttgctaaatctggcaatcctactttgggaaaacagaggccacttcttgtaccctcagtcagggtagtgtcgtagggaagaaggcgtgtgtttgtccctgggaggtaagtgatcttgatatttcacaatatcatctcctcacacaccaaaaaagcctccccttccatgaacgtttttaaaggaagcataatagtggcattttatctgccaaacccacagagttgtatcctctcaggtatttatttggaacaaataaagctgtcatgtattacataagatagaatgcacatgtttctgcaaatagcgttgatgtacggcaggcaagccccaacactgtttgactttgtccaggaaagaattcaagagtgagcccctggtgttagcaatctattattgaaccgtactgctccttgccgggctaactcataggcagtgtgcccagagccacacttgtgggctcttggcaagtgcatttatacccacttgtgcccactttcaatcacatgcaaattgagggttgggttattcagaactttctaggaaagaggaaataacttcgagtcactgccttggaaagggccagtagcttcctggttgttgccatggcgttggtaaactgaaatggcactgatgggagtgtcttatgtgaatgagcaatgagggcagccaggcacctggttttgtcaccatctgctggttcctgctggttttttcacttcatcttgtggggatagggaggtaagtcctgctggtctcctccctcatttccctctcaaagattagatattgctccttactcttaaggggacagcagaagagcagaggtctttcttctgtaactgcttctttctgattttatgggcataggccctgcctagtgttggaggagtaaaatctctggacctgatctaaggggccctatggaaggatgtttgtattctccgagtcagacaactggatgggtggcaagccttgtgcagcatcatcttcacatggaattgtcatagtctagaaggcacagactttactaagaagttaaacagcgatcaggtgtggtggctcacgcctgtaatcccagcactttgggagaccaagacagatggatcacctgaggtcgggagttcgagaccagcctgaccaacatggagaaaccccatctctactaaaaatacaaaattagccaggtgtggtggtgcatgcctataatcccagctactcaggaggctgaggcaggagaattgcttgacccaggaggcacaggttgcggtgagccgagatcgcaccattgcactccagcctgggcaacaagagtgaaactccatctcagggaaaaaaaaaaagaagttaagcaagggtcaaaagtta

SEQ ID NO: 1883917 - DNA, 4001 bp, Homo sapiens
tttttttttttttttttttactgtgaactctgaaaccaggttatttgacttctctgaacctcaatgttctcatatgcaaaggggggaattagaacagtacctttctcagaaggtcgtcatgattatctgagataaaccacacgcaactctcgacacatgaaattaaacattgtacctggctcatgtttgatttgttgttgcaggggtggtattggttatatttgtccttccctcaagattgagttctgattactggttcgtagtagaagtccagtaaatactgaataaatacctaacaagtgggtgaattcgtatatagatgtagttaggtagcccaaaagattaaagtagaaactcttctgagacatgatactgttactgggatgggaaggctaaaattattgcatattttaaaatctggaagggtagaatttactgactcctaaatttaccctttcctgaaatgggagaaatgcaggtaataatatttatggtcagttctgtttttattcagcaaagcatgaaaactatttatttaaagaaatagactgacactacccttttgctcttagtatttggtctccagcattaatctgatgatcactgatattgactgctgttcctattaaaccatgtttaatataccataaatcatgtcaaattgtacaagtctatatatttggaggaaggtaatttttaaagaatgttagcctgatgtatttatttgcattctgatttatttacttgcattttttatgtcctagaatctattataatcctctatcaggtgatcaaactttatgagattttaaaaataatagtttcgacttccagcaaatgacatacaaaatactctgatgaaattgaccttatgaacctaagtatttcccagggttcctggaccctaagaaatacccttgagcaaaccacagtggcttacacctgtgatcctaacactttggaaggccaaggcaggagaatcacatgaggccaggagctcaagaccagcctgggcaataccttgtccctacaaaaaatacaaaaattagccaggtgtgtggtgtgtgcctatagacccagctaccagggaggctgaggtgggaggatggattgcgcccaggaggccgatactgccctaagacgtgattgtgccactgcactccagtctaggtgacagaatgagaccttgtctccaaaaaacaaaataacatactcttgaactaagaaaaatgttcactaaatgcactaaggtaaaacattattgaaaacaagatacaattcattttctaataatgctctttggagttgataagaataggaatcatctgggaaaacaatgacatgttcagagcctcagtatcaacgcttgtaggtagtatgtagtttggctccatatagcatgtggcaggcagaggtgacctcttgagtgtgaaaactgagctgcaggggcagctgccaattacagttgtgtaatcaccttctctgaagctggtccactgtcacagaatgaagaccctggttcagctgcgatgtagtttggccaagcatctttttttccaaccctgtgatttcctgatgagcaaaactgaaacagtgattcaaaacataccggttgggttatccgatgggaaataaaactctaagtccagattagacagtacctcatgatttttcactaaacgaaaaacaaatatagtcgtgcttttttaccacctgcagtcctaattgaaagtaatgattctggagccagcctggctgggtttgaatctacctcacttcctggttgtgtggctttgaattcatcagtttgcttcctgtgctttaaattcatcagtttgtttagtttcctcatccgtagaatggaataattaagttacctatcccaaagtggtgttacggagaccaagggaggttttgtttgtaaaatcatagaacagatcctgaagcagaataagacatacccactgctcttgctcttacccttccagaagagttggccatgacttgattatctccaagacaacagtgactcctagatgtgtcttcagcccctgccttttgtgacatcatttgcattttttcaattgcccaccagaggtggccactgggttttcattttgggttgcgtatacctaacctaattccttctctgattcccccagctcaatgtaaatgttctcctcatcttgtgttctcttagccaggtcattctgcagctgtgtgctctagcaccctggctgctcctcagacaccttcacacatctctgctctgggatcctgtgctctttcccgctgcatgtccacagagcttgcaggctcccccacctgatagagattctgctccagtctccactactccctggaatacgataccccagtcacactccacctcatacccttctttagatttcttcatagcacttactatctggcattatatagtgtctggttcacttagagattctttgtaatgagaacaaaaaatcaaagctatgcaggtattcacttggctcttttgatagaatgtggttactgggtaccagggcttcatattgcagagaaatgatgaaaagtttttatgattttcacatggcctcattatcagatatgtcttgatcatttttggaaggtattacccactttacagacaagcttaaggcagaaaacatccaaacccagaacttggtcatcttggcacttttattttattttactttattttatttatttatttatttatttatttatttatttatttatttttgagatggagtcttgctctgtcacgtaggctgaacagtgcagtggcatgatctctgttcactgcagcctccgcctcccaggttcaagccattctcctgcctcagcctcccaagtagctgggattacaggcatgcaccaccgtgcccggctaattgttctatttttagtagagacaaggttttgccatgttggccaggctggtcttgaactcctgacctcaagtgatctgccctcctcagcctcccaaagggctgggattataggcgtgagccactgcgcccagcccatcttgacacttttaatattagtcttgaaacaggaacaatatgttcatttctgtagaactacgaaatggggacaaggacccagcaccctccagggtggaattccctgagcatttgaagtagatattttaagcaaggatgaaaaattaacataaagagaacaatgaatactctatgaagtaaacagtcatcatttgtacttgtggtctttacggaaggagctaacacctgaggagggaaagggcattgcagttgtggttctgtttacacacccagcatgggattctgagtggtgtagtccttggggacaatgacgcttcagtgtgcaggctacttctcagctcagacttactatctaaacctctctgcagaaaggctgctggggcacctcctgtgcctgcaggggagagctccagtgcttcccttccctgccttgttatcccctgctggtgcccagcagattgcagagggagcccagcccttccagacatcccacttgaactgggcttaaagcaaaaacaaagaagtaagacttaacatgttttgtactaagggagctgcgtggataccggtttcctcagcggctcaggaggctgcctacctagctgtccccacccagcaataagtgattggcggcagaagcaaggcggccaactcaggtgtccctgaggcctggtgagcagtgctggttttgggaagggggctggggggctgtggcaaaccagcagcacctgcctctcctaggggggcagctccaggctaaactggcctgtgggccccaaattcttcagagaactggattccagatgtgtgtgttgatgtggacaccacacacttgtgagcttctgggaaggaatcctctcatccaccaatagccacctccatgttttggagtgcggtctgtagagtttggccgcttagatgctaccctacagaagactggaggaatggcaa

SEQ ID NO: 1883918 - DNA, 4001 bp, Homo sapiens
ctcattttccttaccagtggatataattaccctattggggcacaaaacctgtttcttgcctttagtgaccctcccccttttagccctgccaaaccatgtgtccatgagcctcccaagcaatgattcagcttgggatcatccaaggacccagtggagagtctcttgaaagtctgctgagcactgatagcctctgttttttgttgttgttgttgttgtttgtttttaatgaacattgtcctcgtctcataatctttccgttcttctcaaaggtctatctctctaaatagtctagtaatcccaaacctagcttcacatccattttttttttaaattaggaatgtaggcatgcacgtatataaagccttaaatactaaacaggcacgggtgtattcaattccattctgattcctgtccatgaacttaatcatagttttcaacattcatgcatccctttcatcccatcctttaaagccttgtgattttggcatttcatggtcttactttcaactagattttaaagtttagctggtattaaattaccatctcaaagagaaaacgtaaagtacaaggtatgaattagacagacctatgttccaatgaaattgttgcctttatttcccaagtatatgaacttagaaaagtttctctaaggtttaagctttaaaatttgctcatttgtaaaaacggagaaaatgatagctattttagaggattttgggggagatatttaggttatgcatgtaaagcacatagaagcttattgccccaccccagcagacattaactaggtattatcttcaccacattattacaagtttgtaactagtaacattcgttaacaatcaggctgcaaaattgttattattattgagacaggggcttgctctgtcgcccaggctggagtggagtggcttgatcactgcagccgtgatctcccacgctcaagcgattctcccacctcagcctcccaagtagctgggactacagacatgcgccaccaaatccagctaatttttaggtggttttttttttttttttttttttttttttgtagagacgatttctcattatgttgtccaggctggtctcgaattcctgacctcaagtgatcctctcgcttcggcctcccaaagtgttgggattacaggcgtaagccaccgcgctggccaagctgcagaattctttagccatcaaagatgatgcctcaagtagaaaggcacaagctgccttcctgaggaacacagggagaactctcattacatcatagtctcaccgactctgtctgaaggaagtgatgcttctcgtatctcaggagtgtctaatgtcatctggcccaccggcagtttgtgtattcaggaggctctggctttcaggtttgctcccttgggacctcttgtgtcacgtcgctcgttctggaaaggaaaaggggtgaaagaaaaagggaaatcaccaaaatgcaaaatctgttaccagatgccctattccgtcctaactaccgagtctggtggcgtgggctgctaaatcttttcgcggaaagattgtcaggcgccaccccgaggtgtttgtcagcacagagatgggggagaagggtgagctcacccgagaattgaaaggcaggtggtgagggatgaggggtgaggagtggagggtggccataagcttctgcgttttggctaaagtacagacacaaagccgcggcgtgagggtttgcacagagtggtgggaaggagagaatgtatttgctgggtacgcagagcatttctgcactctcaagaaggctgcccgatttgtcagggttgcgccccgagcccgcgagaagggcagggactttttgtgataagcgccttcccaaaggtagtgtctgttaaacgcagagccttagcgagtgctgctcgcagacacgccggcttcgcagaaagtctcagtctagcaggtagcttaagcagacatcaggtgcgcgaatttgctctccctcactgtttctaagcctgggagcacgccccctccgcgccggcgaccgcgggtcgcgcatgctccgtgggagggagtgcgccgcgcctcccgccggaagcgttctctcccaggttgcgtttccttcctgtgtgaggccggctgagggcacttgctcttgctgtttctgcccctgggtgagtagctggttcccgtggggcctcatgggatggttgtcgtatccttctgaggtcctttaaggaccgtctcggacctgggaacccccggaggaaaggtcaccccggtcttctcccacgccctacctcagtgccgcccccaagcgccccgcagcccttagtatctagaggattaacctccaagggcgtcccgggcctcgccttggcgtccggcccggcctgggcccttagggtctgcttagctcttccccaagactcgtgccattcccgagggaatctttgtcggcatcctggtcactgtgggggtttgaggtcgtcccggaagacttcagaaccaggcgaacctagacgaaggcggctggaatgaaccaggtctgattgtcgcacaggcgcggccaccaccttgtgcaaaatcgaaggtggttcttcagggccgggcacgctttcacaaaagatggtgatgttaataataacctgccctctttgtgaagattggcaggccttcattgtcataggctgtattcgtagggcctttatgcctgcaaaactgggacttttgagtttgagaaacgatttgtgaaatactgcaatgaattaggagagaaatactacagtgaatgctatgctatgaatgctatacatgtcaataaattgctcatagatgaggtagtacgatttcacggttttccactcggaaatggagaacttaaaatgaaacgacctgataccatatttgcctaacaaataactctaggttatagtgttttaggatgtttcttagttgcatacagcactatcatcgtatatgtacatatttgtgtattcattttgttgaacctaatgtttatacaggattgaaatacgctccctgctgttgtatgcgcatgcagcttttattgtatgttcgctggtgatggtattgctgctgtaacagccttacattttaggtatatcaataccaaatgaatgatacatgagtgtacaataaagtatatatagttacagtctacaaaacaagtttcagtttcattgaaggattttgaagtaatttaaaaaggtagactactattttacaagtggccttagtagacctaagtctttattacattaaaaatttcagaattgggaaggatataaacgggttttgtgtgttgaccttttatgggattaaaagttgttactatcttgatgactgggatgtgttcataacagccctaatttgttcatgtagttcaatgaatatccagtagatgacttggttggtagttttatcactaccaactctaaaacgaaaacgttttactggaatgccaccgcttttcacagattaggttaataaaacccttatcttgtctaaattattttcctctgtgagtataccccacgtagtgatataacacgtttcaactgcattttcaactttgtggaataaagactagaaaagtcagttttttacttcctatgagaagtgaaatattgtgtaacccgttttttttggaatccatgctgatggaagatagcacactttggtttgttccatgaagagagatttcagttaggtgccttctcctttttggcttcttttgctttctttataattaatataatagccggacagtgtgttctttgaatgaagtggtgatatcttaacaattattgtatatccaatatatagtgggcgtcatatatagatgttcagtaaatgcaaattgaatgaattaaatcatttaccatccctaggccaaagtttcttcctccaaaatgaaggctttcaattatttagttgttaagtttaaattaaatctaattattgtgaagtgaatggctcctagtggagaaatgtggaaccttttg

SEQ ID NO: 1883919 - DNA, 4001 bp, Homo sapiens; identical to SEQ ID NO: 913530

SEQ ID NO: 1883920 - DNA, 4001 bp, Homo sapiens; identical to SEQ ID NO: 913534

SEQ ID NO: 1883921 - DNA, 4001 bp, Homo sapiens
gaaggcattgacccatccattttatccaaaggaggcatattaaaacttctgagttctgctggtccagacagtccaccagagttagaataaaatctgtcttgcctttgtggaggaagagctgaatcaagatatgattgcgctggtggaggaaacatcatcctacggtcctgttccctcggaagtgacagggacccagtgtcagaaggagacctgtgaggatcggttaacctttcacagcttgattctcctctttccttggtaatctgatggtccagaggattccctgggcctcttgagcctcttccttccccccctggaggcaaaggtgagagtctgagtggaccctccaacagagttgcgggagagagaaaagctctcgtttcagatgaaggccgacccaatgatgagggaccatatggggaatgctctctgccaaatgctgtatttggaacatcaagtacataaggatctttttttagaagttttattttatactctgtttcagctaatttttgtctgttgtgagcattttctttccttaaatcattgaggtttctttcagcagcccaagctgccaaccagttatgatgtgcctttttctcatgggaaataatctgccgttgataataatgaatagttctctccaattcttcttcaagatctttggctcgctgtctgtaggtctccagctctttagtggcatggctgatctttttgtctaccttagaaagtttctcttctttctctaaccggctattttcctctactgttaatttcctgtagagtttcatttcattttcttgatataattcagtcattactttaagtttctgttgaagcttctgattctcactttcaaaatgtgtgttttctgactgcaaagatgcttgttcagtccgaagatttttaatatgctctgtaagctcttcctttgttttatcaatttcaggtaactggatataaatttggtttctttctccttctaaggtttttaaagaagcatttaacttagtagcatgaatcagtttcttcagagctccttttagaggatcatctaagtaagcaccatcttctgattcactgttcacttctaagttatcatcatccgttacgtcttctctaagcctagcagcccaatctttcatctttagcaaatgttcagtcagagtcttgatgtgattttctttatcatttagaacttgttctgcatgtactttggagtcttcaaatgttattttctgtttattaagttcattcacttgttcgttccatacttcagcttcttgcaaaagctgtttctggctttcctgaaggtgagagttttcattcaaagcatcttttattgctatcttcagttgtttctcagtcattttaaatctcttgaagatcattttggcttcagctacttgtgatttgagggattctgactcatctgctagaggctgtatcgtttttgaaatatccgccatcaattcattttgttgcgaatgtttagatttctcttcttttaactctttttctagacagagaatttcatgctcaagttcagaattggacctgttcaacttttcacaggttgcctccaaacttcgtgcttctgctgccgccttctcaaagctggcatcctctaacgatgacgctacttcatagtcttcatactctttttgaacaaggctaaatttttcaagtagtttacatttttcttcaattagtccagaaagcattatagcaagctttttctctcttcccacataaagccgactcctaaccgatctaaaacttctccacagaaaaaggagaacagcaaaaaatgcagcaacagctgcacatatcaccatttcccatggaaaaccatgaggattcgaatccagtctcatactttcaggcagcgctgccacaaccctgcgtggctcccccaggaccagccccaagtaccgctgaggggtagcccctggctccaacatagcgccaaggctgctctggcggtcgccgcagtaaccccggccacaacaagcagcggagaactcgcagccttgcgtccggaacccgaatccgcacccggcaaccggagcagaccattgtggagccggctgcgggggggagctgggggatgcgggcgctcacaggcccactctgcccacccagcccccttgttacactacatcctgaggtagcacatgttggacccgcgcaagccccaccccttggtttggttttggccaggcagccgtggggaggtggggagttttgttttgttttgttttgtttggggggggaggggaacggagtctcactcttgtcgcccaggccggagtgcagtggcataatcttggctcactgcaacctctgcctcctgggttgaagcgattctcttgccttagcctccggagtagctagaattacaggtgcccgccaccatgcccagctaattttgtatttttagtagagatgaggtttcaccatgttggccagactggtctcgaactcctgacctcaggtgatccgcctgcctcagcctcccaaagtgctgggattacaggcgtgagacaccgtgcccatcctggattatctgaatttatagcacaacactgctaaattattcccatgatacaaaggaggcagctgaaacgcagagggggtaattaactggcctaaggatacacagctagtaaatggtagaactaggtcttaaatccaagccatctggctccagagcctgccatcttaaccacagggctgcacagcttcccatgtggcatttgtggaactaaaatacaaagcaggccgggcgcagtggctcatgcttgttatcccagcactgtgggaggccaaggcaggctgatcacttgaggtcaggagttccagatcagcccggctaacatggtgaaaccctgtctctactaaaaatacaaacattagctgggcttggtggcacacacctgtgatccagctacttgggaggctgagacagaagaattgcttcaactcgtgaggcagaggtcgcagtgagccgagatcacaccactgcattccagcctggatgaaagagtgagactctgtctcaaataaaaaagtaaaaataaaatatacccacaaagcttcacaatgaagtcctaaattggctatcataaaatgatgaaaagtgtgatgctgtgggctgtcagggaaggggagccagaggtcattattgatcagagcgaacagggaaggtttaatggaagacaccctgaatgatctatcaggttggaattgctgaaatggagtgccaggcttcaggttgcaatacttcttgactgttaccaaagaataatgagttgggtatcttattggcatggtgtatattgcctcttaatttgataaagttttgtttatgttgtattgtgtcctagtctttgatttaataatccagattgagttcaataaagtatccaagttctaccaagttttctgtcctctctctgcctctctgtgtatttctctctcacaggcgtctccagaatttggttactgaggaacggtaactagtttcttacttctgttcccagcctagaggctctgtactctgcacataaccaccagcaaagttttggaaaacacagcagccaggacccatctctgtagtgactttgcaggtgattctcgggcagggccagagtgaagcacctctgctgtgatgcgagtgtcttatcactgtgcatttccttgcagtccagttagctagcgtggtcacatgtgtcatagttcaatgacagtagtgttttatcgtttccattgggcagacatgttttgagcgcctgctgtgtctcaagccctgtcctaggcactggagatgagatgaagaaacgatgagtagaggccttgcttacgtttatcctgcaactcatgatgaggcttactctgcaactccagtgctcggctttttacacagtaagtgcccctgcttaccacaccctggccacactcatgtgtttcagattgaaagttgcctgcctagaacgcct

SEQ ID NO: 1883922 - DNA, 4001 bp, Homo sapiens
gccaactggatttaatatgtttatgatgcaatgttttctattttgaaaatttcagtttttattcaagaaccatattattacccagaattacttttacttagattcatctctttgcaaaattttagaggcaaaccaactaattgttttctgttttctaccggctcccatcccctgcctctgccaacagtgtagagactaaaaaactccaactctttcctttttttttttgtgagacggagtctcgctctgtcacccagcctggagtgcattggcgtgatctctgctcactgcaacctccacctcccaggtccaagcaattctcccgcctcagccttgtgagtagctggaactacagtcatgcgccactacgcccagctaatttttgtattttcttttttagtagagacagcgtttcaccatgttggccaggctggtctcgactcctgacctcaggtgatccgcctgccacagcctcccaaagtgctgggattacaggcgtgagccaccaagcccagccaaaactgtaactttcttatctttgaacaagatgctattgtcaggaggggaagggacaaagggggagccacggcaacaaacactcttacagggaaggtctgacattttaacctgcaatctttatattacacattaaaagtctacattgacgtttcatgtcttttgaaagttttgaccgtgaaccaatccccacctctcttttagaacaaggaggtaaataaagtctgttaagtcaccagaataaatctggagacacattttctgttaaagtaagaattttaaagtaatcagagcctcataggtaaactcctttgagaaaccccaaacacacacacacaaccatttttctgcagccctggctgtgacattttatacctttcacaattattttaagcactctccttttttctctttccttctgtgttcaaattacagttagaagaaactaagcagcttctatcaaggtgacttaaagcagcccattaagaataccatatagcctctcccgtggcaacctccattctgattttaaataagaaatccccaaatatttgaataggaactgtcctgagatttggctactttaacaaaggaaacaattaggcacttacctggttccttcacttaggtaccatctggataggttcaaagaaaaattaagatgggtactgaaaagttgggatatttgagtttttattgagaaaaggaagagaatagctcaaagaagcctaaacaaagtcccacaggataataaacagagctacagacactgttgtctcaccatctgtttgagagttcctctggaatattgtgcttgcctctggattggcagaaaggttaaactccaaagctatatgtatagagggagaaaagaaaaaggacgtaatcatttataaaaatttatcaactcatttattcaactgctgcttattcgacaagagccataaataaatggtcccatgccagcctgggagaatgagatgagagagcaagaactgggcgattgggaggggaggtgaaaagaaactgactggactcggtggggaaagactaaggggtgggaattcaaggcagagccagcttttgttcctggccagcccccgggaaagctggctacaagcagaaaggagctcgaagtgtaggatgcctcaaagggaaccttggggacagcagcagccagaggcaaaccgagggtagatggcacctatcacctccttaccttcaggcatctcccggtcacgaacctggtgcatgtggaggtcctcaccaacttcaacagtcacctcagcaggctgtacagcagcagccatgggcgctcctgccatcctgtcctcagctactgcctcatagatctcagattcagagggacacaccgacccctgctgctgggtcaaactcgaggctgacgctagggtgcacacgacaggtcagtatgttccccatggggcgcctctactgcctgccaccacctgtgcctctgctcacagctttggccacgcactcccgctgtcctaggccgaggctatgctgcacttgcagagatggtcttcccgctcctcgcctgcccacctcacagtgcggccccgggcaccagccctggtcccggccccggccccggccccggctagggctgtgggccaaggcccgcaccctgctgcctcccctgagttgacttgtctgggagggtgaagaccagccggcttatttaataggttgtgaacccaacaagcgctgagagacacaacaactgcctgaagagagaacagacggagctcctcctccttctgtagtcacctacagactgaagcccactggccccaggtgggagcccaggcatgtggcacacaatgccccaccccacacttcacaatgccctccccgacacctcacagtgccccaccctgcctgccacccctccccaacagctcagaatgcccctgccttggctgccccaccctgtggcttatgatgctgctgctctcctggcccctcgtgcagtgccagtgggactaaggttttcattcatcaccagcttcctgagattttagtcctaagaaaagcacagggtagttcattcctcgaagccagcttcctctatgagttctacataaagcctcagtagagtgggtcccattagcaaccaagttgaacaacttttatttgctgtctgaatatagatacacctgaattgttgactgcttttgtaactaaacactcctctcctgtcttccaacgagtggtcatttttgtccgcaacttgatcacagcaatccctggggccctagctctactctcaataaagagttatggctgtgtgttttgaatgacaccttaggacccatcctgcctccacctccttctccataaaatagaaacctaacttgtccctccaagctctgaaatgctgaaacttaccaactcccttttctccccgctatttcttccttccatggcagggactttcagattttctttcttttactaacaaggcactaaacatgattttctcatacaaaatcgagagccataaagtggcttaccacagtcctatttcaataaagatgaatactcgacatctggcaagtagtgtgtgcctgacagtgtccccactgtgctatgctcatttaaccctcagaaacaatctcatgttacagattttacagaagttgttgggacagagaaggtaagtaaacccccccaaggtcacatgactgctaagggtggggccatagtttgatcccaggtagtctgaattccccaattgcttaagcatgattatcagaaagtatagcagtctgttttcacactgatataaagaaacacctgaggttgggtaatttttaaaggaaagaggcttaattgactcagtttcacatggctggggaggcctcaggaaacttacaatcatggcagagggggaagtccttcaggaaacttacaatcatggcagaagggcaggtccgacttacatggtggccgcacagagagtgggaacatgtgaaggagcaactgtcaaacatgtataaaaccatcagatctcagctgggcacggtggctcacacttgtaaccctagtactttgggaggccaaggcaggtggatcaactgaggtcaggagtttgagaccagcctagctaatgtagtgaaatcctgtctctactaaaaatacaaaaattagctgggtgtggtggtgcatgcctgtaatcccagctactcaggaggctgaggcaggagaatcactggaactcaagaggcagagactgcagtgagccaagatcgtgccatggcactcttgcctggacaacagagcaagcctctatcccaggaaacaaaacaaaacaaaaccctataagatctcatgaggacttactgaatatcacaagaacagcatgaggataactgcccctgtgatccaatcacctccccctaggcccctccctcgacacatcgggattatggggattataattcatgatgatatttggg

SEQ ID NO: 1883923 - DNA, 4001 bp, Homo sapiens
aggggaagcacagagctgggcagcccacagcatacttaccatgtctccaaaggtgttcatggccattgtgaagctgtgtttcccttggctgtattcctgattgtgctgctcagtcatcttcatgttctctcacactgctctcctccatccttcttcattctaaaggcaaacatgtaactgatgttcttcatttctttttttttttgagacggagtctcgctctgtcacccaggctggagtgcagtggcacgatctcagctcactgcaagctctgcctcctgggttcatgccattctcctgccccagtctcccgagtagctggaactacaggcgcctgccaccatgctaactttttgtatttttttttagtagagacggggtttcaccgtgttagccaggatggtctcaatctcctgactttgtgatccgcctgccttggcctcccaaagtgctggtattacaggcgtgagccaccgtgccccgccaatgctatttatttctaattaaaacccaacatatgctaaccaagtgaatcttcagacagagatgtaagagtaaccatggccagggaaggcttgacacttctaggagatgttttccaagctgagacacaacaagggtgtatgcccatatcgtgctcataatcagtgctattaagttattgtgttagcttattggtaggagccagcctctagaagccactctctggccatatgatcccaatagcaatgcccatctctctggtgttcccctggacagtttcagatgccaccaaccatgtcatataatctcttgtgctttgccttccacttggtccattgtgcgtctagactgtggtcacgtgttagagcagctgaggcaattcccaggaaaaaggcagccaggaggagtgaaggattcatgtttcaaaaatctaggaagggaaaagaaatgaggatctgattagaccgatcctaaaaagccattttactaccccctgagaaactagggccaccatggtagaataaaaatatttaaattattcttccaagcatttacctaaggactgtggaagaggccaaggatgtggctggagaaaaacagggcaagtggaggtattggagggacccaccaaaatgaaaagcagcctgtccagagctgtaggagttgaaacagttttctgggatgatgatgacaggctacgaaaaggacaggaaggtacctgatgggcgagaagcttaaggcaacaaccgggaaactaggaaaccgttggcccaggttttgtaccaattgtgctgaggtcatccaggcaaaacctcaagaatgaagacatctaatttcaagaagggacaaagggatccccaataattgggaagtcacatcacaccttgttcttggctaatacacaacagaaggtgaagtatgttttccaaatgccccttgtaatgaaacagttattgaatgtcttcccaggacaaactgggaaggagagcacccatctaccgccgttcccgcagtcctgcagtcctgcaggtgggccagtcctgccaacactccagctcccctcacagagcataaactgaatcaggtggccgaaccaccggaagccagagtccccagtgtccgcgcccacacaggggtgggtaggcagcttcccaggctttgggctggggacccaggccaggtcccctggctcttgctcccgccctccgctcatgctcactgtggccccaggacgtgggcgatgttgcagggagcaaggggcgcctctgcctgatttgccggggtcgagcctccctgtcccacccccaccggccctgggaatactgcggcctggcactccggaaaatccctcactcacagagctgaaggacttgctgggtccctggtggcccctgtccaatcttagcccactggggtctcagctgctgtagccacaggtggacaggcacagtgggcaggtgctgggtccaggagtctcctgtcgcctaaggccgcccgaaagcagctaattgacctctaaagcccctagacccccctgcccccttgccgcccaggcaggcccgcccccaccacttgcccgctctgcgattggctgcgccagccgctgggcggggccttccggcgtgctgactcctggcatgtggagcagctcagtccccttgcctcagtggaaccgggggaggggagctgggggctacgaagagaagggtcggaggtctccctggagggttcggatcaactaagtaccctatttaatgccctgggcgggtggtttatgaaaagaaatttacaggagccctgtgtgcattttcagcttaaccctgcttttcccttaggcctagaatttttgattaaaatctcctgcagggcagagagccagaggactgtaatccagtggttcctgtttagtccacagcaaaggtgcggctggctggaagaacgcacagcctgcaagcagaagccttacctcccaattaagggtgtagaagaatctgggcgtgttgctggtggctcatgcctgtaatcccagcactttgggaggctgaggcaggcagatcccttgagcccagtagttcgagaacagggtgggcaccctggcgaaaccccttctctactaaaaatacaaaaattagccgagtgtggtggcccgcgcctgtggtcccagctagtcgggaggctgaggcaccagcatcgcccagcccggaaggttgaagctatagtgagccgagatcgcaccactgcactccagcctgggcgagaggagaccctgtctcaaagacaaaaaaacaactggtaggaaaacgcaccctcaaaacacatgatgagatggtcgagaccagaccctaggagggtggggactggctgggtgggtatccagagaccatgggcgtttcataatgcattgtttcccgtctcctccactcagcgactcttcttcccctgaagtcttgcattaagtaagtgaatgaatcaatcatcaagttaatgaagctctgactttgtacttgttgtcctttgcttggtacagttgggcactgccttagaaacaatctccaggtaattttcccaactgcttttgtgaggcccagttttccattttaaaatctaagattacctcagtaatcttgcttttacagcaaatgggcatggagcctgacagatatatttaaactaagttatggacaagctgcctggtgcattaggtagcataggagctaaccttgtgggacatctccccatattcgtaatattcacccctacatctataatcaataaatgcttgtttggaggccatagaaactcttcctgagatctgacctgtgtcttctgctatctgcctgatttctccccatagaacaggaaaacactgtgtaggagatattgtgaatagaaatatgaatataggccgggagtggtggctcacacctgtaatcccagcactttgggaggccaaggcgggtggatcacctgaggtcaggagtttgagaccagcctggccaacatggcgaaaccccgtctctactaaaaatacaaaaattagccacgcatggtggcaggcgcctgtaatcctagatactcaggaggctgaggtaggagaattgcttgaacccagggaggcagaagttgcagtgagtgagatggcaccactgcactccagcctgggcaacagagtgagactctgtctcaaaaaaaataaaataaattacaaaaattagccaggcatggtggtgggcgcctgtaatcccagctactcaggagcctgaggcagggacaacggctcaaacctgggaggcagaggttgcagtgaaccgagatcgcaccactgcactccagcctgagagacatagcgagactccatctcaaaaaaaaaaaaaaaaaaaaaaaaaaaagaatataaataggaaatacagtgattcaaataagcaattgttagttcctcagatcagaactgtgagttctatactagactcttacatgttatttcttctggtatcttagcaatgattctgaataaagat

SEQ ID NO: 1883924 - DNA, 4001 bp, Homo sapiens; identical to SEQ ID NO: 913552

SEQ ID NO: 1883925 - DNA, 4001 bp, Homo sapiens; identical to SEQ ID NO: 913566

SEQ ID NO: 1883926 - DNA, 4001 bp, Homo sapiens
tcaggcaatccgcctacctcagcctcccaaagtgctgggattacaggcgtgagccactttgcctggccaaaaaatatgcttctaaccataagccagattcgtctccaacttttcctcttttccccttcctccactttcaccttccttcctccaactagctttctagttaatccagctaagaacacaggtgccggatgaaaggtgcctgaaaggtgactgccttgcagatgatttaagctctggggttgccctaagggaagtggcggccagaaagaactatatctcaggagcaggactgggagggaagagccagggagcctgtctggaaccctgatactgtgcaatggccagccttccactcctctaaaaccttgcttagccatagagggtcagactacgggagcaggcaggtatctttaaatagttcatttctgccatattggggtccatctggaggtcttaaagaacttgtaactctatggaccccattccagaaaaatatataaatgttcacaaaaaagttgagatcatgtcaaaagcttcattgacatccttgagcttattcatgaagccaaggctaagaacccctgatctaatattctccctccaccatttttcctaaggacaaaacagatcagcaaggattattggtttgttccaccttgtgcagctgcttagaggggagtccaagtccaaagtgcaaattctgatactcttgttctttctaccatatagtgagttcgtttccataaataaaaacgacttctccccttgaagaagcagactaagaagacactgctttttgagggaagggaggaggcatgtggctgggactggcagtgtgggtagacaaagtgcctctcacccccagcgagatccactcattccaacgtagatatttgaaatggacctgggttcccactctacagaggagcactgcgggatcactgagcgcagtcagagttccagctttgaaggaccttgtcctgcagtcagggaggtaagcagtatgtgtccacaaacggctgtcgtggaagagaagacattcttgggctttaagggggactgcagatcctttccaagtcatcaaaggaagcaaggtagtccgctgatttgtctccctctgagacatttagggggagagcgcctcacttgccagaaagaccaaggactgcaccgcagacacccacctttcttttcctcatccggcgacacatccttcctcctgccaacatcctaactcctttacactctggggaccagctcttctcaaatgctggcgcggggaacagcctatttaccgcagttgaggcgattttactgggaaattctcttaggagctccttggagagggaaagcctcacggattcggcggaggtcttaatctggagatgtccaaatttaggggaaaccctccccaccatttgtctccaggctgtattttggagttctcagattaggaccctctggactgggggcaagatttgtatgagggggtctccagcagcttgtgggctggccgcgtgccaggcctgactccgtgtcccccacccccggctgcgcctgggcctcgggggaccgggaaccagccggcgccgcgtccccgcctagcgggcgggccggggacccctcccctccgcccgtcccctcctcccctgctgccgcctcccggagggacggcctggggaggggagagaggagggacgggccggcggcggcggggctgtggccacgggggagcgggtggcggccgcggggccccggtgagccgggccggggtgcacgggggccgaggcggcctccgagccgggccggagctgtcgggagcctgggaaacacggcccaggcgactttctcccgggagttgtagtcttgctctgggggcggcgcgcggcccggctttcggggcgagttttctcgcggggcgggcggcgcgcgcggaggctgagggggagggggagcatgcccggctggagcccggcctcggggcgcgccccggccgccgtccccacctccgcctcctccttctcctcctccgtctcctcctcctcctcttccagtcccgccgccgcggcagccaacatggctgcgctccggagcccgggaggcggccgctgctgagcgccgcccgccgccccgggcccccagcccgcccaggccccggcccatggctcccgccgcctcacggctcccggcgccctagggctgctgccgaggtgctcgcctgcccgcccgccggcctcggggggcccgggaggcgtccggcggggcggggcggcgcggcccgccaccatggagccccagcgccgggagctgctcgcccagtgtcagcagagcctggcccaggccatgacggaggtggaagccgtgctcgggctgctcgaggccgcgggagcgctcagtcccggcgagcggcggcagctggacgaggaggcgggaggcgccaaggcggagctgctgctcaagctgctcttggccaaggagcgggaccacttccaggacctgcgggcggcgctggagaagacgcagcctcacctgctgcccattctctacctgaacggcgtcgtcgggccgccgcagcccgccgaaggcgcgggtgagtggcagacccttggcccccgcctctgggacgcgccctccgcttctccctcctgctggccgagggtacctcgccggggccgccgctccacctggcgatggcctcggtggactcgctcctctggcccagttggggaggcggcggtgcgcggatcccgaagtcccgccgcctcccccagtcccgccgttcgctgtgaacaatgccccccgctgaaggccttcactctcaggtgcctcgacgacagggtccccgggggccaccaggtccagtagcgggtagggggtacctcggaggatgtccatcagtcccttttctgaggctcctcaccgtccgctagctttggcaccctgtgctagcctttaaccaagggtaccgtccagaagaatgggacttgggccaggacccctactcttaagttttggtcgctgccatcctgtgccggggccacaactgctttttcattttctggctgtcccagctcctttttctctgctcagagcccagtctctcccagactggtggctgattgtgcacaacgcctgcctgggtttctttggaaactgggcccggaaaagttggggaagttgcattgcaccatgggaaaatcctagtagtggctgctggggctaagttctctccctgagagcacagagctgcttaacgaggaaggctggtgactggttcccttgagggtgccttttggaacccctgtgtctttggtcttggggatgactgatttgtaagtgtgtgtctgggtgcaggaacggatactggcgggagtttctgacaagtggtaggcttgtcctggcctggccgtggagtgtggaagccagcctttttagacaaggcagctggaggaagaagacatggcactgagggaggaggagaactagcatttattgggcatctactgttgtggcaggcgctctgctttatcacgttcagttgtcgttgccactatgtgagctttctgttattctttgccagagagaaaactctggcttggagtggttaaaatgctcagaaagtattgggcaccaggaattttgaattataacctattgtttgatttaacttgttcagagccaggaaacaaagtgccatctttctaggtcttgtccctgttttaacagtgaatcgataggtacagtaaaaataaataaggatatatgtataaaagaaaaacaagtgaaccgagagggctgagaaactgcccttagcaacctgaaggtcaaaggctgatgggacccatttatttggctgttaaaagccccacttattaagggaatgattttataaggcattcctggtaacagctctcttacgttggccatcttaacctcaatttttgtagctgcaggaaactgacagagagactaaattgctggccacacagcaggtc

SEQ ID NO: 1883927 - DNA, 4001 bp, Homo sapiens
ttatctttaaaaaaatgaagatgacataaagatgctttcaggcacagaaaaggtgaaataatttgtcaccagtagaccctcactacaggatgtattaaaggtagtctttcaggcagaagaaacaggatgccacatagaaaagatgtttattataaatcctaaagtaaccacttaaaatgcaattatacctagcagacaaaaaagtagacaaaatggaacaataaattccaaaaaaagaagacaaaaacgtggtaaaaaagaacaggtagaatgaatagaaaacaactggcaaaatggtaaatttaaacaaatatcacaatggtagatttaaacttaacagtggtgatttttaaaatatactcataaattatttgatattccttccttcaagagctagggtttgatttccctccctgtgttttggattggacttaataacttacttttgatcaatagtatagagcaaaaattatgacttgtcacttctgagattgaattataagactgtgggtcctgtcttgagctctctctctgtctctctctcatcacttgctatggtggaagtcagcctctattttgttcatggccctatggacaggcccatggggcaaggaattcagagaagcctacagttagaagccatcaagaaactcaagtcctaagtaaaagagcacatgaggaatagaagacaccaataaaccatgtgagtgagctcagaaaaaagcctattcttaactgtaccgctggccgactgcttgactataacctcatgaaagaccctgagccaggaccacccagctaagctaataagatatgtgacccacaggaactgagctaataaatatctgtcattctaaaataaaaattttgtgtaatttgttatacaacaatggataattagtaagctgtatctgccagtcatcatattaaatataaatggtctaaacaccacaaataaaaggcagagatttcaaatagggtttttaataagcaaaacccaagtatatcctacctaaaagaactctactttaaatttaaagatatggctgggtgcagtggctcatgcctgtaatcccagcaatttgggaggctgaaatgagtggatcacttgaggccaggacttcgagaccagctagctaaatggcaaaaccccatctctactaacaatacaaaaaattagccaggcgttgtggtgtgcacctgtagtcccagctgctcgggaggctgaagcaagagaactgcttgaacccgggaggcagaggttgcagtgagctgagttcacgctgctgcactccagtctggacaacagagcaagactccatctcaataaataaataaataaatttaaagacacagataggttaaaagtaacaccatgctctatcaggccgtgctatcctggcttatgcaagagacagaaatctttgcttggttcttttgctttggcaaagattgaaccaacctgatggtgtgtatgatgaagtgacagcttcaggctctgtggttggagcgagacctggtgaattgccagcacctgatgatcaaaagaaaaatcaacatgctaacatttacagtgccatttataatataatgcttagtaaaatcaatcattaagtattattcgaagggaaaacaaagaagtgacttcttgttaagaaaacagccccttacctgtgcagatgacactggcatcctccaggtgcccacagttgtgcctggcctggtccccacgcatgcattgacccagatggctctcactgcccacacactgcatgtcatccagtaagatcttcccagagcctgcccgaaagtgggcccctgtgggggctgccacagcctggccacactgcagctggcggcacacgacagtggcctcagccaggtcccagagatcatcacacacggtcccccacgtgccctggacgagaacttccacacggcctgagcaccttcctgtgccgttcagcagcctcacctccatccaggctcctggggaggcacaagaagtagggacactggggagtggcctttggtgtcaggacattgccttagtcttattatgttgtgctgatatattgctgatgtcataatacttatatcttccatatgatattatttcataggaagaataatagtaagaataataatcataaattctaccactcacatttcatgggtgattaccaatagcaggtgccatcctaggttctttataagcttgatcttatttgaccattacatctctcttttgggtctattattacctctgtttttcacatgaagaaagtgagactcagaaagtccaagttagctttctcagggccaaagtggcaatgtgaattggaactgggtagtttgattagtattttgtacagctttctaaggccagtgaacttttttatatgtatttccctccctgaagttacccttctccttccttctctcaagctgagccctgtgcctcaggttacatacagagtagagagctgatatagcctgtaggatgttctggctttggtttcaaagacctgagatcaaggaagagaataaggtttgagggagagaagtgcttattctacctttatgtgtaactaaaagggtatttcctctgggttaggcagacagaaatttctatgggtcttggaaaatctgggctggaactcctactccctggaagtgcctcaaggaggccagaagaccctggtgagcagttgcattagacatctagagaggtaatgctagatccctgggctcccaacttacacatgtcgcctaagcctacacatggcacaagaactccagaggacccctgacctggggggggagtcctctcagccatgccccagtggacgcttgctagtctttctgtggaagtcgccttgctatgggggaatgtcccagactggagattacagcgcattctttctagcactaaagacatttcttttctttgctgccaacacagttatactttaaaccacagaatattcacttaatgcctattatgtgcaaggctctataaggaagagtttacaccttaagggctttaatcagtgataggatggagaaaacaaaggagaaatcatctcagattatttctatgtctagtgaaagtaattgttaaacctctcaaaaatctggaattctgatggttgttttatttagtaattcagtgccctgatcatgatatttatattgacattctgtgttctagaattttctagaaacactggtgaggcttttttcttaagccaacaggagaagtaaaaaatagaacctactactccattagatttcttaaacaaaaagtttgagagtctgtgtctcattatattaacagtgctctagcttacaaaataggagtggtagtacaatacaatacaatattacataacgtcaataatccaatgcagaaatatttttcatatctaacatatgggttgttttgagaccaagttagaaaatatatgtgaggaaaaatgtagtggaaatgtgagtcgttatgataatcataagtagattatgctcagaagggaagggaaggttttccgagagattctaggtcaatcccccctttacaggctccagttcttctgagccagcagcctccatttcataaacaacccactcctacttgcattattcagtgtgaccattaactactgttctcaactcaaccctgccaggaactatgcataaaaaatgaacctcttttctcaacaaagctcctgcgagcaacctgtgtctgaaaatggggccagctctctgtgcagcactatcgacagggcagactgcctatggcttagccctaaggagggcataaggttaggacagctcttaccacagtccatcggttctaccccgaggaggttatgaaataaatcagaatcctcccccacaccctgatttgaagcagtctcaaatcaggggaaatgcatcgtattcttcctcccgaaatgtccttgtggtgctggagtctagcgggtctgcacgtgttcatt

SEQ ID NO: 1883928 - DNA, 4001 bp, Homo sapiens
agaactgttcttggaaaggaagctaccactttcttctgaaatctaaagcacacacatacaaaactattttagcacaaccatgaaataagaagccatccaatatgttttatctacaaaccaatcttccagttttctaggtttctttcttctgaaaagcttattgcaatgacatttagacaaaataggtaaaattaagagagcaaagacacagaagaattcctattataaaaacttcccagaagtaatgccatttcaaacatgctcatgatatgagattttccattttaatttctgtaaagcgttctgtgggacactcattacaatgaggattaagaataaactggaagccaggcatgatggcgcacacctgtagtcccagctactcaagaggctgaggtggaaggactgcttgagcccaggagtttgaggctgcagtgagatacgatcatgctactgcaccccttcctgagcgacagaaaaagaccccggttctggcggagaaaaaagaaaggaaagtataaattggacaacattaaacaagaaatttctaccactggtgcaagccttcccaaagtacaagtaaaaggagatgttttggacacgatcctttttgtaaatatgagacttatgttacggaaaagggtattgtccgtggttcactgaaagtcctatcatgagccacagaattgtacttagaaataatttagtccaacctgctaaagtaatgccggaaatctttcgataaaatctcactggacagaaagcaggcttaatacctatcgatttagctcaatcctttacagagtaattcagaactttattacttatatttatagtgggtaagtcaatttgtcaatactttcatccatcggtccaagctgtctaaaattatgcaaaataataatctctcaagaaaacagcccttctcctattaagtacctcttaagtcttccccgtttgactgaggcatcagtgagggaccaaaggagggtccaaagtcattacctctccagtgataacaccaaacgcctttcacattacactgcaagttatcttttgttacctgaccgtaggttctattattttgcaaacgctttattcctgtagtccacctaacctcaggccatgaatttcgcaagattggctatgatgccttaaagatgtttctcaaaaggtattgctgatcaaaagcccaaacgcaaaagtccctcaacgctaattagcattattgctataatattgaaagtaattccacattatgaccgtggttaacttcctctgatcatttatatacaccatgctgagggtgcagagatcccccaaggataagttaatccaactaaacatcgagaaaagcctacggcggttgcaatttcctattataaaaacattccagtggccgaaactcctcaacttagggagagaggtgaaatcaagggaaacaatgaactgctcggcgagggagagtccaggctctggctgaatgtggccccaaagaacaccttgggaggcaggccccgactccggaggctcgtcgggtgcccagggagctgcaccgggtccctgggccccgggcccggtcagtctgaggcggtgcggacgcagcctctcccgctccttctttcaaatctcccgctttgttcccacaccctcccccctctccgctcacagctccgccggcagctccgcctcctcccaaaaactcttctccatcagcagctccagttcgttcagctgctccatcctggacgcggggatcgcaaactgtagacagaaaagacagcggaaccgggggtaacacagaaagcttagaaaagggaaaaaggcgcgagcctgcgcacctcgcgcgcatgcgccaacccgcagatgtcccaaatgacctgcgccaggccgcccctcccgcgccggcgcgttccacgtggggcccctcacctgagcagcagggctctgtcccctgcctttgctcccttgcttaggactgggaatacagggagtcttcatatctgaagcagactaaacgctcctgccttctctcttgacactccaacccgtgtccgaaacctcccgggttcacaccattctcctgcttcagcctcccaagtagctgggactacaggcgcccagcttagtttgaacacaacctttacacgcttagtttgaacacaaccacatttgtagttgcccaaaaccaggcgcccctggttagccttcagaattgtgcactccctgggaaacagcctctcccctttttttcagaaaacttattgagaaaatagaaactgtcggataggaactccttgatcatgccacggctaaatctacaaaacttctggccaggcatggaggctcacgcctgtaatcccagcacttcggaaggctgaggcgggaggatcacgaggtcagcagttgagaccagcctggccaacatggtgaaacgccatctctactaaaaatacaaaaattagccgggcgtggtggcatgcgtctgtaatcccagctactcgggaggaggctgaggtagaataaattgaacacgggaggtggagattgcagatcctgcaacggcactccagcctgggtagagcgagactccgtctccaaaaaaaaaaattctacaaaacttctaatatctgcaccattcttcataacctctttccaccttttttcaatagcagacaaagtgttcttctggttaaagggcaatcgctccacttgcacttggcatcccagggcttcaagcattctcaagggcatcgcttcttcaattattctcttgtatcatcagcctcgccctcactattggattgagcctctaatatggcctggtgtctcccatttttaaaagatgtttccttgctgggcacagtggtgtgcaccgatttttgatatttatatacttctctcatctggaggcactgacaagaacatccagagccatgttaaatatcagtggtataactgttatcctgatttttgttattcattttttaaatagataaaatgcgccgggtgcccggtggctcaggcctgtaatcccaacaccttgggaggccgaggcgggtgaatcacttgaggtcaggaggtcaagaccagcctggccaacatggtgaaacccagtctctactaaaaatataaaaattagccgggtgtggtggtgcactcctgtaatctcagctactcagaagaccgaggcaggagaatcacttgagcctggaaggcagaggttgcagtgagctgagatcacaccactgtactccagcctaggtgaaagagtgactcagtctaaaagaaaaaaaaaattggcaaaaagttaatatatttatcatgtacatgggctttcaaatatgtacacactggaatgggagttattctattagtatttgtccctgatatcaacagctttatgacctacctttgcaagtgatataacatcacggtagtcacaggcccactcagccagattcaagggaaggggaacacagttcctacctcttgatgggatgagtgtcaacgacacataagaaaagcatatggggcctggtggctcacgcctgtaatctcatcactttgggaggctgaggcggaaggatcatctgaggttaggagtttgagaccagcctggccaacatggcaaaaccccatctctactaaaaatacaaaaattagccagacatggtggcgcatgcctgtgatctcagctacttgggaggctgagacaggagaatcgcttggacctgggaggcaggggttacagtgagcaagattgtgccaccgcactccagcctgggcaacagcgagaatccatctaaaaaaaaaaataaaaccatatgaattgggatgtgttctggtcattgttggaaagtataaaggtatactctgccaaaatgtcctttattagattgaggaagacccctttgttctaaatatgattcattttgataacgaataaatgctggattttgtcaagcagttattgcatctatagaaggactgtatggttt

SEQ ID NO: 1883929 - DNA, 4001 bp, Homo sapiens
tcagtatactttagttctacttttttatttgactcacaaccattcttaggtctcaagtattcccatgtgttttaaaagcctgaagtcagtgagatgaaattcaacatcaagaatttgaagtaacttgtaaggaaaaataatataaagataccattggggcagtggctcacacctgtaatctcagcactttgggaggctgaggtggaaggatcacttgaagccagagtttgagaccagcctgtgcaacacagcaagaccccgtctctacaaaaacttaaaaaattagctggctgtggtgttgctcacccatagttccagctactcgggaagctgaggcagtaagatcacttgagcccaggaggccgatgctgcagtgaactgtgattgttccactacagtccagcctgggtgacagagaaaagaaaaagaaaacattacataatttggctagagcataataatttgattttctggtttttgaaaatttgagttgcaataaaaggatatttcagtgtgcgatttcaattttccgtagcaaatgtatatatagaaaaatgttaaaatagatgtatttgaataccttaaaaaatacaagaaactggaagaaagataatattgcaaagcatctacatatatcctaggccttttgtgtacaaggttatttgtgacaattgtaaggtattatgaaggcaggtaggattatctccgttttacagatagggaagctgaggcctagaggtggaaacttgcccagtgatgtaagattcatctcccggttatgccctcctggaaagcccttcccaacatattatgttgtccatagagggaaaaatgagcaaagacagatggcttaactctggtgtgtgactaagatataggaaatttatagaggaggttctatcaatgtgccgacttactttgtgttttatgttctgagaacgattaccagccatctcaaattctgtggttgtcaaagctcccctggggttgttgctggttggcccccacttgctttgagactttgatgccagggcaggttgagaggaactgacttcagctgagtttgatcttggatctgggaaagagaaatgctttgaaaatcacggcaactctgggaagtttaaaagatattaatgtatcctggagagtttgaggctttgcagaaacttattggcagagcagaatgattctgaaaaatgctacatcagtgaggggatatttgataaggtattttctgccaactcgggtattcacttagcattgtttatcctttaagatatgtatacacatacttcctctgtgagtttaccctactaacaaagttttatccccagcctcaaccttgctttgggtctccaggcccaagtttctcaccatctcttggatgattgctccagcccactctgctgccacctgggatccaacatgttcaaacccagctgtgaacttcacagagtattaaaagaaagagcctttgcttcagcagtttatgttattaagacggaggcttgggtcatgttatctctctccaccaatgtgtaaggtgaaagtcctattaggtaagagtttttggaagacccgtgttttgtgctttttgggtttcagtatagggttttttcctacagggctagagggaaagtaccccagcatttccaaccagtggggtgcaaaattatttgggtctacagctttacctattcctttcaagaacatttttgaaaaaacacatctgttaagttgaaccatgtgtaactgctgaatgctgatgtttggccgttttctacttaaaaaaataggccagcagtttgtaaattcaagctaatatatgaactttttgaaaaagttgttcttggacactaaaaggtaagacggacgccagatttccagagcaaggggaggagagacccgagcaacatcacttccctgaagacctagctcctgcgcgcggccggggactgtgactccacatgccggcgttacttacccgggcccgcgcctgactcgccacacctcattttgcggccgccgtaaagcgcggatgcgcggcgtggccacgccccttcagtgcttgtgacgcaggcgccctgggctttttgggcgcgaaaaagaagcagtcctgggttgtacccggcgcagctgggagcggctgcttcctccggggtcgtatctccgcccggcatggggctgctggacctttgcgaggaagtgttcggcaccgccgacctttaccgggtgctgggcgtgcgacgcgaggcctccgacggcgaggtccgacgaggctaccacaaggtgtccctgcaggtacacccggaccgggtgggtgagggcgacaaggaggacgccacccgccgcttccaggtatgcagggtcccgccccgaagccgaccggctgcgcgggcctccccctagccttttggctaccgggccccgccccgggggagcgcgctgagctccgcttggcgccttctgatctttatttctcgcgccgccgtttcggtgggaggagcaggggtgatttacggatactctttgccctcagatcctgggaaaagtctattccgttctcagtgacagagaacagagagcagtgtacgatgagcagggaacagtggacgaggactctcctgtgctcacccaagaccgagactgggaggcgtattggcggctactctttaaaaaggtaaaggactctggaggtttctttgtgactgttaccatcattcaatcaacaaacctttattgactgcctctaagatcttgtattttgtgttaattttgtaggaattaggaattttgagtttggccttgaaatacagatacacgcacgcttactgaaacgggctttaaatttcctgttaatgtgattgttgcactgaaaagggccgatttattttttttgccggatgcgctttattttacatatccaaatgtaagtcctgattccggatcacctctcactcttggaaatttcacttaaatttcccttccctggtccctagttagcagttaatgaagattggatttaaaaaggaggactccggagaagcttaggcatagaaaatctggttcaataatttcaactcaagcaactgttgtattgcagcaattcaacacccaactctagttttactaacgtacgttttatttaaagtaaaattcccaaagttaaagcaaatctcctttatcatcagatatctttagaggacattcaagcttttgaaaagacatacaaaggttcggaagaagagctggctgatattaagcaggcctatctggacttcaagggtgacatggatcagatcatggagtctgtgctttgcgtgcagtacacagaggaacccaggataaggaatatcattcagcaagctattgacgccggagaggtcccatcctataatgcctttgtcaaagaatcgaaacaaaagatgaatgcaaggaaaaggagggtaagattttgaatactgtggatttatattttgactgcttccaaaaaggatttgagagtatttacagcagtagaagtaaacataaaactccagaaataaggactagggttaacttggtctatagtttcgatctaataaaatgggcataccagttcatcaagagaaactttttctagcatgttgtgctcaagatgatttttattgcatagattgtttaaatattaccatagtaaagtagcactgaaatattttttcatgtaggccaattcttgtagcattcctgaggcattcctcaggagataaagttagtggaacccgggtacacaggatgggcagtgatccttactcggttgagggggtaagaagagaatggcagacaccgtcttgttaaaagtgcagatgtttgggcctttgccccgaatttgattcttgagttggatacagaatttttcttttcttttttttttttttaaagaaaaactttagcttagcggtccccagcctttttgataccaggtacctgttttgtggaagacagtttttccagtgacagtg

SEQ ID NO: 1883930 - DNA, 4001 bp, Homo sapiens
ctctacacttctttggacattaatggaaaagaagacttgactttatttttatttatttatttttttgaaacaagatctcattctgtccccctggctggagaacagtggcacggtcatggctcactgcagcctcaaactcctgggctcaagagatcctcccactttagcctcctgagtagctgggactatgggtacatgccaccatgcccggctacttttttatttttttgtaggggcagggtttcaccatgttgcccaggctgatcttgaactcctgggcttgagcgaaccacccacctctgcttcccaaagtactgggattacaagtgtaagccaccattgccaggccttcattttaattttttttttttaccgctcctttcagagcagggctaccccataggcagtgtgcccagagtagccctgatttgttttatagattgttcactccttgacattcaggaatcttaagtgaatgatgagtactgacactcttgtggattccagaagattatttctagctttcaaatcacttcatctcactgagccttaactacgttgtctgtgaaatgagaatattaggagtcttttatcatgtagaggttctttctttcttgccattatatcttttcttcagttctcataagtgagctttatttctactgtgttatttttataattactgaactctctgttaaacctttcgtgtgtgtgtatgctgtatgttgtcttcatgccaaacggcctttctggttctggccaattttggggtccaggctgtgaccagaggataaaggttagtcagagaatgtgaatgatctgaaaaatccatctcatgccctccccttaagtagaaagtttctcgtctaggtctccttcagaatgggctggctggttagatttgtactaggggccaccacagactgaaaagataagcctgctatggtcctgggatggccggtggtttacctggtggtcttccaacatgggcttgacttaacttgaatttctggggcaccattttggacctaacaggctcttaacctgcacctataaagacaaaaatgaaaccaaacccagctttagttgggaggctgaggtttttagcagctagtcattttttcctaggtgcattttctctctgaaatgatagggactggataacttctaaattccttccagctaaaaaagaaaaaagtctgattctgtgattctttatattggtttttgtattgttcctcttcccttccccccgcatctgttcctttggtgaactttgtttcctatgtttagttccttattgtattaagcctcccaactgtaatcaaagtgtgtttattctgtttgacttaacaggagtgaaacccttctctctgcagtgttgtaatgtgccctctgatctccctgaaaccagctcggttccacccaatatcatttccatttctacaactctctttatctttgaggacttaacttttgaaagtatattcatatttagttcacccctttttgtacccctaatatccttcttgacctataacaaattctgtctttactagaaatctttcagcattctaacgttctttgttagctctctcacgccattgcccttcctgaatattacaagggaacactgtgtaattacacaaaggaacaagcatcagagttggtctgccctgagttcaaatctcagctccaccatttactaaatggccttaacttgacaaaaattacttaacctcttggagcttcggattctcaatttgtaaagtgaagataatacctctctcataatgagatagaaaaataaaacagtcacatatccggaacatagtaggtgctcataaatggccatttctttgtgttttatctgcccacctcccttcccctttataagttgcgccacccacctgtcactccatggtttcgtctctgagttccagattgatagtccctgctccctgttggacatctaccctagaccgtaaacacttcaagtttgattgtctaagtggaatgtcctgtcccttcctcttctcccgtcttccccttgccacccctcctccatctgagacagagctctgttcagtggctgctctccagcctctcccccaggcaggaagccaagttttcccccaggctttcctttctcaccggcctgatcagtcattctcctgaggcctccatctgaggtttttttagggcaggtctgttaggggtttgctcttagtcctagggtgtggacctctagttctgagaggtgggccttattcctaaggtgtggcccttcggaggtttcaacagaaaactggaagtgtttattgaacctcctaacttggagggactcaaatttcaaactgtgtcttcccagagccagacagttggtgaagatctatctgctgggctcttctggcctccagctttccacggggttccttggagtctcatcacctgcatgcacagttgaaggattgagaggcatttctgcacagattttggggctctcctctctgtggcttactgttttccaggatttcccccttaatagctaatgtcttcagagcccccagactggaacctttggctgctcagcccagtaagattgccccatgtgggctttcttcttttgctttatttcccggcgtcctaaaagactagggagtgccctgaggggaggactggagacaggtgcatcttacctagtttgcttcccttgttttgagtcatatcccctccaaattctgcctgcttttgattgcttttcagtgcctgcatatagttattttttaaaatatctgtcagaaggctgaggtgggaggatcacttgagcctggcaggtcgaggctatagtgagctatgatgatgccactatactgcagcctgggtgacagagtgagaccacatctctagaaaaataaaagtaaataaaagttaaaaaaataaatcttgtaaagtgtttttggtagttataagtagggagattagtacaatgtgagctactctaccattactagaccaagtgtgggcactagggttttgcacttgctaataacatacatggttatgatgagaaggggacctggtgtttcaaattccacgttacctgttttgcatgtaaataatattaggatatctaaatgaagagctcttacagagaaaactatgaaactagagagggctctaaacaaaactagagagggctaaaggttcagggttggaaggctacaaaataggagcctcttatgttattactggaaggaagcttatatagccacaatcccatgtttttgtaaataatgggtagccactcatgactgggtcttgaagtctgtttgggggttgcaatcagcagttctgaaaaataaaagtaaatagaaaaaactttcatactacattctatgtagtaaaagtaagcatgtaatactttgtgtatgtgtatgtgtatagacataaatgtattatgtaaatgtgagttacagcctaaagtgtgggtcaggccaggcacagtggctcacgcctgaaataccagcactttgggaggccgaggtgggcagatcacttgaggtcaggagtttgagaccagccttgccaacatggtgaaaccccctgtgtacaaaaatacaaaaattagctgggcatgttggtgggcgcctgtagtcccagctactccggaggctgaggcgggagaatcgcttgaacccaggaggtggaggttgcagtgagctgagattgtgccactgcactccagcctgggcgacagagtgaaactgtgtctcaaaaaaataaaataaaaaataaagtgtgggtcacagtaaaaaatgtttgaaaaacacttaaatacaacccatttattttataaatgaagagatagagctcagagaaattgaaatgtgtttccaaggtaactgggtcaaggattagggcaggaatagaatctggctctcttgacacctagaatgcttttccagcattaccacatttgaaggcagaagcacagccgt

SEQ ID NO: 1883931 - DNA, 4001 bp, Homo sapiens; identical to SEQ ID NO: 913594

SEQ ID NO: 1883932 - DNA, 4001 bp, Homo sapiens; identical to SEQ ID NO: 913597

SEQ ID NO: 1883933 - DNA, 4001 bp, Homo sapiens; identical to SEQ ID NO: 913600

SEQ ID NO: 1883934 - DNA, 4001 bp, Homo sapiens
aacccaggaggcgaaggttgcagtgagccaagatcgtgccactgcacaccagcctgggtgatagagcaagactgtgtctcaaaaaacaaaaacaaacaaaaaaaaagatttaaatcggcatgaaaaatttgggaatggagaggcaacagtaaaggagtagtggaccttattgaaccccttaaacatagaactgacccttggattgtggttccagaacagacactactgtagagcctgaccgaggtcaagataagtcgggagatagagaagggtgaaagtgagaatgctttcttatgttattttccatggcatggagtaagcagatacttcaaccacttaatgatttttcctaagttctccccctctctctcttgctcacctattctcctctcccgcagaggagtcttttgagaaatatctcctgtgtggtaaagaaacaagaaacaattatttgaagtgcagcagttcatttagtttttcagtctgctgtaaaataaggttaatactttaaatctgtatgacttagtttacataatacagtagcccctgaaggatgcataagaaactggtaacattgttccctttggggaggaaacctggaaggccaagaggaggggttttgctgcatacccatttggaccttgtaaatttgggaatgtattacctatctaaaacagtttctaaaaatggtttttactaaaactaattttttgctggcatataacgcatggctagatgtgtgggacagtcaccagaattaacagtagctctttatgtgaggaaggtttggggagagtgatcttcagttttcacttgcacctttgaatattctgccatgtttgaattccttagaatgatcaagcatcttttttgttgttggggttttgttttttgttttgttttgttttgtttgagacagagttttaccctgtcacatgggctggagtgcagtggcatggtcatggctcactgcaaccttgaccatctgggctctagtgatcctcagcctccccgagtagctgagatcacaagtgctaattttggaaaaattgtttgtagagacagggtctcactatgttataagcccaggctggactcaaactcttgagctcaagcgatactcctgcctcggcctcccaaagtgctggaagatactggaacaaatttgctaagatgataagtgtgtttaattctctcctttaaatgttttactactgtgagtactttagaaaataatgtaaatattttagagggttttgttagccaggtttgtgggttttgtaagccaagttaataaatgctctagtttgtgacaccttttattctatcttattttacccagtgtttttttttttgttttttttttctagtacatatgattcagacctcccttcctaatgtctatattgtctggtcgttgtcccaacaacactttcatacataagcaatagcttgtcttccagatgccaaatctatgctgaaatcacattgatccattgattttaaagagaataggttgtttagaaagtgtgggattatacttctaaaggaagaaggcaacagttattctctccccacccgcagagtcggggagtccccaagaccattgtcacttctcacactaactacgagtctgtcggcggtctccaagaccaccctcaggtttgagaatttgctaaaggactcacagaactcactgaaagctgttctgcttacagccacaatttcttaacaatgaaaggatgtacattaaaatcagccaagggaagaggctcgggaggcagagtcctggagagttctaagcgcggagctcccagttcctctgctgctggagttacagatagtgctaactcaccccggcagtgatgcatgacagtgctcaccaagtgtatcaatcaatacatgtacaactgcggaagctcacccaagccttggtgtccagagttttcattggaacttggtcagatagacatggttgactgccacgtggctgatctttgtctccagtgcctccagaggtcaagctgttaccctggggcccaaagtccccacagtaaatcccattgttaggctatccattgtgacccaaggacccccaggtaaacaaaggcgttcttaccgggcaggacatttcaaggacttagtggttaccttctgggagccaaggacaaagactaaacctctgtacaagatttaatcctctactgcacaccgcacacaattgagttctaggagaacaggagcaaaggtgtcctgtagtatctgatagctctagaaaaattgtagttagaaggctctagaataaaacaaaaccttgttcatctggtctgacttcctgcctttgaacagagatgtaataaactattttacagataggacaactgatactaagtgcttatgtgacttgaccacacaactggtaaaatgtgaggtgggcctcgagccccagactcttttctgctggtcccttttcctaaggctcctgttctgaaaaagtggcctgtcttgacaaaaccaaatggtggggcagggaaacaatgattatttattgctttgtccagacttagtatttttgtcaagggaatattattaaatagaagttggatttagaagatttaagattctcattagcttcctttatagcattttgaaagtctgaattttcattaatacattaacattagatgggtttctagatttatattaaagaaatgaacgttttgtatttaaaactttaggtcagaatagcaatgttggaaagttgaaaacactatctggggctcttgatataatggtgagaactgagcacgcattccagcttatccagaaggagcttatagaagaatttggccaggtacatggagaaaatgactgtctttggtttttgtgtgtcttaagctacatggtgaatgtatatagtggacgtgtgtgtgtatgtgtgtgggtatatatacacacatgtacatatgtatgctatgcactaaaacattttaacagtgatttgttatatttgcctggtattcatctcctttctttaatttgcaagtattttaaaatatttttaagaatatatctcaacaagaccatagttaacaaattataaagtctcttaagtttttttgttgctgttggtgggaatttgttttgttttatgttttaaaagaaaaggcctgtgccctcttttctaatttccactagaatgcctgggagcagttgaatggtgaatgggcctaagcaggctcctcaggaaggaatttctcgttttctgggcattccggcattcattttaccttctgctgttgctaaaagcttcctgaagcccccatgttgcgcccacctattgctcttctagccctgcttggtcaaatcctgtgtggtaccgtacatttctgcgttgtgtctaatgttggaaagtcaggattaatttcttctacaaaagtgcctattggggctgagacattttaattatgtgttttagtctatcaaaatgatcataggtgtgctttttgtttgtttgtcttgtttagggttaaaaatgtattggatgaatgaaactgcagttccatcacttggtacgatatgaaactacagttgttggatagctcgagtaaaataactttttgttgtttttagcctaagagtggtgacgccgctgcagctgctgatgcttctcctagtctcaatcgagaagaagtgatgaaactcctcagtatatttgagtctcggttgtcatttcttctccttcagtccattaaactgctatcttcaactaaaaagaaaacaaggtaaattaagtggttatttgtaggaatttctttcctagcaccctacctataaaaattttctctactaacatcataaagaaaaactaggggccaggcacattggctcacacctgcaatcccagcactttgggaggccaaggcaggcagatcacttgagttcaggagttcgagaccagcccggccaacatggtgaaaccccatctctaccaaaaatac

SEQ ID NO: 1883935 - DNA, 4001 bp, Homo sapiens
ctccctctccctcccccctcctttcctttttcctttcctttcctttctttcttcctttccttccccccacccccacccccaccccaaacaaacgagtccccaattctcgtccgtcctcgccgcgggcagcgggcggcggaggcagcgtgcggcggtcgccaggagctgggagcccagggcgcccgctcctcggcgcagcatgttccagccggcgcccaagcgctgcttcaccatcgagtcgctggtggccaaggacagtcccctgcccgcctcgcgctccgaggaccccatccgtcccgcggcactcagctacgctaactccagccccataaatccgttcctcaacggcttccactcggccgccgccgccgccgccggtaggggcgtctactccaacccggacttggtgttcgccgaggcggtctcgcacccgcccaaccccgccgtgccagtgcacccggtgccgccgccgcacgccctggccgcccaccccctaccctcctcgcactcgccacaccccctattcgcctcgcagcagcgggatccgtccaccttctacccctggctcatccaccgctaccgatatctgggtcatcgcttccaaggtacgtgccacgtcgcggaactgcagcgcgccgctcccgccgcatccttcactgcccccggcctgctccgggtgggcgcttggcaaggcctgggcggaggttcctccggctcgcgggccagcgcgccctgttgggaaactaggcggcgcggggccgggcgtggtgtcgatccccagtctccgaagctacgactggtttggagtgatggcctgcgggccgcttgaccctttgggaaggggtgcgaacggagaagttgtcccccagtgcgctcgaatcagagcaggctgggctgtgcgtgcccggcgccgcggagcccagagcccgcgggatccccaggctcctggtaccctcggcaatgcccccaaccgtcctggctccgaggggcgcggacaggactcggccgccaggcttgctttcgactgcgttcgaccctgttcaccacccactttgcgccccttcagtccagacccgcggcttcttagtcttccaccctcttctggaggcgagaggatcctcgcgccccgggagaaaagtatgggatttgttttttctttcctgcttttcggaggcctggggaggggcgggaacccgtgcgggaggaaagctccagggcttggcgctctcgccgcgacctgcttaattggggcgccgagcagccacagcgggaaggcaggttcggtctggtttttgtttttctttctttctttaaaaaaaaaaaaaaagaacctggtcaggaaactgtcttagagggaaatatctgttcgtgtgttttcatttcttgcgatattttttatttgtttgtttttctctgggtacggggtgggaggaggagagttaaaacttcagaaaaaggagtaattagtttacggattggagtcagtaaaagacctacctccggcggcagccgatcaatactccgcggcttgtccattcattaacccattgcgttcctgccggagcctagaatcgggtagatgtcacccccctccccatattttaaaaaatcaaaccaaaggaaaaaaaacccaaaaagccttttacccttaatcccgaactggatttgcctgcatcctgcctggactgtcggcttgtttttctttgtttgggttttcggtgaatcgatttcctatgctaatgagtgaacccaaaactctgaggctttgcttgaaaagtttagggctgcccttcctcattcgctatcagtcatgcttatggtcccctcaccagacccggagccgctgggatcttcctgcgttacagactgtcctggcggtgtctgcaagtcggtaaccccccgggtttcgatcccttcgctcgcgtttctcttctagttctcgggagccgggagccccggagcccagttcgcgagaggcagcagcggctgtagccaagcacacccgccggccagatttctgtcccgatcgggcttcaacgactcgccccgcctctatacttttccggaggggcaataaaacaaataatttaaaaataaatctccatgaaaactctggagagcagcccgccgcctttccaccgtgggtcaaagttccccgagaggttagaaagaagagaaagtagtttcttcgggttgtgggcgccaatcccctggccaggctctgcggctccctcccctgcctccagcgcccggcgaggaggtggcgaggcccgcggcgccagggcggctgcggagccggccgaggtcaggagcctggggactggctcctctgcgacagcggctggttgggtgccgcaccggtggagacccggcgttccgggccgggcagctgagcaggcgttcccttcgtgagcccttgggaggaccaccggcccccgcaggtcgagcggcgcggctatgcgaaggccctgagcacggtgccgggccagcccggctcgggagaagtgcgcggctccggtcagagcagccccccctaatgggatttctgctgtgctccccgcagggaacgacactagccccgagagtttccttttgcacaacgcgctggcccgaaagcccaagcggatccgaaccgccttctccccgtcccagcttctaaggctggaacacgcctttgagaagaatcactacgtggtgggcgccgaaaggaagcagctggcacacagcctcagcctcacggaaactcaggtgactgcggcccgggcgcgaggaacccatctaggcgtgcgccccctccccaaagctggctcccaagcacacccatgagcacggagctctgtgagggccttccgcacaggtcctggtagctggttccacgcctgggctcgggatgtatgtctcaaggtgctggctttgttgggctccagaaaggggctgtaagtgccaatctgccccaggttctggggaaacgcgccgagttgtttctctgtccagttgggcatgtcctggctaagacatccctgcatttctggtgagacttttgatgagagtgtgaagacccctgctggggtccaggaagagggagagcacagtggggtttctgggtgtttggagctggaggctggtaaggacaggatgtgggttaaagatgagttctgagcgactgtgagcccacggctcacaccgtcggctccagtgacttccctgaaggagatgggcgatgggaaggtagagggcaagcgtcctgtgtgtaccctatatcagagaagtaaagttgggaggctgcagagagggtctgcctcagggcacaggccttctgcacagcagggtccctgggcgggcctggcttgggtttatcccagggtggggagggggtttaggactacactaggcgctactgtacacggagccgcagggcggggtcaaagttcccagcaaacagtaacgtttttttgggcagactaagttgtaacacttttcctgggcagctcagaaaggtcgaggcttttgttttaaaacatgttccccaccccaaaaccgaggagggcctggcgggtttgtgcggagcccggcacaaggcgcggcccggctgatttctcctggacagccgaggcggcggtggtctttgtccgcctcgctgcccacgctgcctggagtctttgtgtgcgtgtcaagccccgagcgcaccgacgcgcgccttgggccagcgccggggagaaatgaaccgtcctccccctcaattagcaaactcaaagcaaattaaattcagccttgttcccgctcagcttttttcatggagcactttgggcgactgtggctttccgggagagcaagacggaccggcctgcggcctcaaaggagggaatggaatggatcccaggggtccagggactggcactgggctgtggggtactcttatccagatagaataggagttgtggggggagggtatcagaggtgcagtcactgccatctcccttacctgtacaccactgctgtga

SEQ ID NO: 1883936 - DNA, 4001 bp, Homo sapiens; identical to SEQ ID NO: 913609

SEQ ID NO: 1883937 - DNA, 4001 bp, Homo sapiens
gagtggtcacacaacttgccctagtttacaaagctggacaggtagaatagagtccaggtctgttttctacagtcattcactcttctaccagtgttcagttatatggaggaaaagggtgtcatacaaaacaagtaggtaagaagatggctctaagttacaaagacggatttgtaacttaatccgtccttgcctcagtttctccatctattaaaacagggatttaacaaacctaactcacagtactgctgtaagcattaaataaaatatgtctagcaattatcacaaagattggcatatggtaaatactccataaatgtcaactacttgagatcaaactttacatttattatacactaagtcaagcccacatatagttgtctaaagcgcttgaaaactaaataaactggtcaagtgtttgaagtgataaatacaatgaaaatttccaccttaacaatgttttgtccaggtactatgccaagaacccaatagacctacctgcaagaaaccatacaaaaagcaagattccaggctggcatgacgatcaaattatgtacttcaatgcgtgtgaatgcatttataagcacagtctcaatacataaataaggaacaaaatatttaaaatgtataaacagatcatttctctttgctttctttaaaatactatatcagaatcacctgaggaacttgataacaatttttttaaaaactattataactacgtatattaagccttgttaaaaccacaagttttagaggtttaagccttactaggtcagctcttctgattttgagagtttaagtgaaaatttaaattataacacagtatgtggagtaaacctgcttcaaatattagtttctacattattgtttctataaaaatagtaatcttctgtattttaatatcaactcatcacatattaaatatttcagtcaaatcaaaatttcatttgaaatcttcaatctaaaaaatacacagttaagcgcttaaaaagtaattttaaccactaggaaatgttaatgattaactcacatttgtttctgtttcactccatgacaaagtctataggacaccctgcagagaggaaaactcacattaatatacccataattttactttcagaagcttctggtaatcaaagacttattatgaggtgtcttcatgttaccactgcgcagtagcaaacttaaaatattctaaagattaatctattttctcatttttttaatgcttttgttaaaatctcaacaagtactaacatgttatctaaatttaaaccttaaaacaataacacgacccaatatgtgaactctgcctattaattctaaaacttttaataatagtttgcttatgtttgagacttaaaacaataacatactgcactacacccatcttagatattttctaggatcaaagtctatctggagcagggcaagctgtggttgagggtggttgggtcagcaggtaagagccttatgaccagctctaaacgcctccacggtgaggagcacctcgagctaacagaccaagcaccaaagggtggaacagctcaaggttgcatttaggagactccagcctcggccgcccgtgactcctcgacgagccccacctctctcggttccagcatccggcccgccccttcctcccaggctaccacagtatcgcccgccgagctcccgggctgcgggaaatgacggaaacaaaaacttggtacacaaagaagggctaggtcagaagtgaggtcccaccctggcaagaagggcgacttttctagaaaaacttagcggcaagttaacgggaagcgcggcgacacagttcctacgattgtggggggcactctgccgccaggcagtctcatcctttgtcctttgagaggcctccttgaagccgaaggctcttaagtgtccctgggcaacccttgactcgatctccattacgggccctcactgacagcagccatgacagttgcttccggatatattgaatcgccgcggccagagtctcccggaagtgacgcaacgcggagggatccgcgttcggcagtgggagaccgaagcgaagtggttcccggaagcggctgcagctgggctgctggtggcggggcgggggtagagtggggagagaggttgtgggtcttacaaccaaccaaccccaacacgttttacgtgttaggcaggcattgtgctgaacacctcattggcaagccatttaatcccttccttacaatcccagcagtcagaaatgtatcacttacattttatatatggggaaactaaggttaagagagggcaagtaaatttgtccgagatcgtatagctggtacttggtgaacgtggtctaacccagacaccgcgttctccctggtgactccattttgtaaaaccagagctgttggcgcatggcatcctcgtaagcccctttaagttaggcactctgttgcccagagaggggccaacttgtagccagtatgctctttatggtgaacacaaggcccacgtgtgtgcctgggtccccttggctgaacctcggatttcaattggtttctgacaccttgcctttgcagcattctccgtctgcagcgctggttacctgaggaaactgtcaatgattgctaggctctggggaacattttagctccgtttaggcccttttaaatccaggactaagacagttggaggcctctcaccatcaccagatactctagctggccttaacagagggccaaggaccataatcttggactttccaccagaccaagtgtttgtttggcttctgtttctttagaatatgactgaaaaccaatctgtagtttgtttagtcttctttctgcattgaccagtactcacataataaagtgggactagccactaaggctatgtttttgtaaaaacaaattatgcctagaaaaacacaagaaatacatcaaaattaacagtgatagtgtttgaatagagagtgattttatttttttctctctgctttctcttttgcatatctgctataaaacccttttaaaatagaaaaataagcaaactggctatggtaaaaacatttttaattgcctgctgttataatgacggcaaaggcatgttgtcacattttgataaatgaccgtccttgatacaaatcacgtagagaaatcctgtttgactagaaaagcattggatttttgtgagtcagtgtattctcaaaattttcgatattttgttttggttctataatcctcacaggaaaagtaaaaaagcaaattgatgtttttcacacactttcgtatgagagtatgctaccaccaaaagtcttccctaaaacaaagttgcaggggtcaagtcatgtggggcgtttggatacttgaaatggtggagaacaaatataaaaagctatttttattctggctgctttggggtacagttttaagcaatttatttcagactgccaaagaaagcttcattctttattcacatactctacttcccactattgcttattagtgacttctaaagcagtgacaaaacaagtaaaagaagatagaaaggaaaaatgagaagggatcacgggaagaagaaaatgtggaggaacaaagacagatggtgatattggggttactttggaactccagggtagcatgtaacagccttcttatccaagtcctggcacaggcctggttgcctactaaaaggtaaattagcatctatgatgttcctgctcacatactcagcacccacagtgataagtcttactaaaaattcatcttgatgcgcattcaaattagacatatattttaacaaaaatggaggggttgaacaacaagaaatgtaaagtaaaatcccatcatttttcctgtttttttatcttaccatgtcattcattcatcctgtggttagtagtataactataaactggaagttttgcctgcagcattataaagcaacaactatgaaacgccaaagtgaggtgctgacaagatgcatgttttccaaagaaatgtctttacattagtctggct

SEQ ID NO: 1883938 - DNA, 4001 bp, Homo sapiens; identical to SEQ ID NO: 913615

SEQ ID NO: 1883939 - DNA, 4001 bp, Homo sapiens
gtaaatcccagagcttttggggctttctcatgctgcaaatggctgtttctctggttcactcaaagcagcatatgacagcatccaaggatgacactaagctcagtaaagggcaagactgctggtagccagctctgacctccccgtgaagtatggctactgtgttcataatacaggatgtgtgaggatcaaaggcacactattctgctagctaaagagatagcaaaccacccccccaaccctaaaagctccttccccaggtaaataaaagtatacgaggggaaaaaaattaaactacacttatcttacagagtaagggttttgaaatattaatgtaatccctccttcaaaaattttaactagagtcatctggtcatttctgattacatcttaaagatgtatccagattcaatttctgttggtttatccttagacatttctagtcaaaagtattaattttattcccaaatatcttaaccactagtatgactgcagtgtattatctcccagagttatcaagcactggaagagaaaaaaatagatgttcaagcagcaggcaacatttatggccctttcacacagtagcatctgagtggctactgaatagtccaggaataattctaaaaacaagaaaattcatgcatgttagtaaatatgttgtagttttcacagttgaaatttcctcagacattgcactttctttataagggaatcctgatttttcttaatgttatggtgagtcaggacttgaactaacagccttttcttcttactgtgtttcttatgcttcttattcttttttgttttttctgttgctttttctcgttcttcactgcttttcttcttttttgctcgcacctcctcaatatactctgattcttacaaggactcagatgataaaggtttatcttcagaatacatctttctctttttgctgagtcctttaatatccttttctttctcagttccatcttttgacttctttttcttttttaaactatccttactgtctgattcagtttctgacatggagctttcagaagatttatgtgaacggttcttctttttctttcttcattttccttgtttcttatcctcatcttcagaatcagaagaattgctggaagaatcagagcttgatgaagaagatgaatacctatcagatttcttcttttcttttttctttctctgtcttttttttggatgagctctcacttgcagttaacaatttctccctgtgtttttccagttctttcttccagttctcattcattttttcttcaaattcagccaaagccttggaacctttctttttcttttctagttgctcttttacttcttcccaggtaggccttggtcaattcagataatcctgtattgttggccctgaagactggattggaccccttgatctcgccattgctattgggtgcatataggccacccgattgtcccgcttccccatggtgctggactgagcacacagtggcacgccgagggaaaccaggccagagagatggccgaagagggcctgccacaggtcctcttgccgcctccccactctgctctgcttattttttaagaagaaaaatccaatggtagaaatgtgtgtgtagaataagcccattttaattaatgagttaatacataactatttgcatagatcacagagccaaaaacacgcatatgctgtgttctcattttatttttatttcaggcagaatttattttgcttaagagtaatttctggcaacaagatataaagggaatgtaactcctcattcctgaaatctctccaatatcttttgataaaaatgtcagtaccaaggttgcatacaaatgtaataataaaccacaagccacactttaatggcataaaaaggacttttaaaaaaccaagatgtcgtttattctccctcctaattattatttttaatctttttttttttttgagacagagtcttgctctgttgcccaggctgcagtgcagtggttagatcttggctcactccacctcccgggttcaagcaattctcctgcctcagcctcctgagtagctgggattacaggcgtgtgccaccatgcctggctaattatcgagtcagataatcctgtattgttgccactatctttttttttttttttttagctaatgagaaatgccacacagtgtcttcaatattgtttacaactgcaaattgccttcatgaaaataatttaattgctcctgagaggcctgatagatgtccctgaattctgtccagccatgccatgactgacagaacagagaaaccaggaaaaggtcacacacggtttgagaaaccatcaaaatgtggtgtccatctcctggccaagacaggaatttacagcaccattgtggtgttcaaaaactgtcagaaaccttaggaattgtcacagttaccacaactacacattccagcaaagaggaatggaagacagaggcaacatgaaccaggagggtagaaggtctgtcccccagcactgaagcaggcacaaaggcataacgtgaaacactcatggagaataaacaaacagtttaaattgcacaattaaactataaaattcaacactgactgcaaactggcttttaaaatgtgtagacctatcaccctactatgttttatctcttttaccaaaattctgtcagttcacctattttgttacataggtattttctcccttctgtagtcagactaaactatattctaatgccaatgctacaaaaagggaagccaggtaattgaagcaccaggctgcatgaaatgttctaacgggaatccagtgctatgaagacactatggattctaatgggaatccagtgctatgctatcctgataataagcccacacctctagttcagcatttctcaaccttgagctactggcgttttgtgctagataattttgtgttgaggcggctgtcttctgcagggtaggatgtttagcagcggccctcggctctaccctctagatgccagtagcaccctctcccagctgtaacaatgaaaaatgtctccagatattgccaaatgatccctgtggaataaaatcacctcaggtggagaaccaccattccagaagaaagtttataaatcacagtaaaatccttaatggatctcaaaaaaggagaaaaggaaagaaagataccatgaagaacaagaataataaaaataaacgtaggctgaacatttttaaaagacagaggtctagcacacttctaaaagtcaggtgaggaattacccaagattgcctttctttttgaagaagacacttaagaaccaaatgtagcttaagtctgagttttcttaaataaatgtgttagtaaatctttattttttgtgtgtgaccaaacactcatcattagcacttatgtgcttgcttcttacagaatggacagattaccgtgtcttgaattttgaaaccaaggtttatatccaaactacatcacttacaattcactggccttcaacaaattatatcatctttcacattagttattaatatatataatggggagaataacactccttcatgtgggttattgtgaggattaaaagagattacaacaggcatctattataatgcctattacaaaacaggtaaataatcaatattttctcctttcctcctcataaagtttaacaggtaagaaaaaactgcagatggaagggatcctgggatgtcaccacaggcaagaggacataaaaagcatctgttctggaaacaggaagattgagggagaaggagcccaagaaagcagagagcagcagtcacagagtcaggcaagctaagaaaaatccagacccagtccagtcgccacctggtgttgaataactgggtgtgttttactgtttaatttaggcattttcctcactttccttttttaaaattttataaaacttctgattgtttcttaagagatttcatggtgcttttaaatttatacattaaggagttattcttgaccatataatattatctttg

SEQ ID NO: 1883940 - DNA, 4001 bp, Homo sapiens
gactaaagatagttaaaaattattaattctaacagtgctttgtattgaaagaaaattcttatgattttctcagtagatattaaaaacaatcagaaataaaccaatgcacttatggtcagttgatttttcaagagtgccaagataatttaatgggggaaagaataatcttttcagcaaattgtgctgggacaactggatatctgtatgcaaaaaggtgacattggatccctacctcacaacatataaaaaaaaaaaaaccctaaaaatcaaagacttaactgtagtagtcaaaactataaaactcttagagaaaacatagatgtaaattctgagaattgaaaacatatgtccacataaaaacttgtacatgaatattcacagcaacattattcataatacacataattcacctaatacagaaagtaaaaacaacctacatgtttatcagatgatgaaagaataaacaaaatatagcatatccatacaatggaatatagttcagccataaaatgaagaactgatcccatgttatatacggatgaaccttgaaaacctgtgaagcgaaagaagccagacacaaaaggcaacataacgtataatttcatgtcaatgaaatattcaaataggcaaatttatagagacagaaagcagattagtggttgccagggattcaggggaatgggaggaatgggacagactgctaacaggtatgggatttcttcttagggtgatgaaaacgttctggaattagtggcaatggttacacaactttgtgaatatgccataaaccactgaattgtagtatgtgaattgtatctcaatttaaaagacttataataagtacaacaaccattcctgtaataagttccttagaaactaagaataagatttttttcagataacatagaatatctcaaacaaaatagcaaaatatctacatgtacttccattaaaatcagataaaaaatgtcatttattacaatttttatttgacattgttctagaagttacaaccaatgcataagatgtgaaacagaaatgttgtatacaatagacagaaaataattttcagaaaaagataatatactttgaaagtgcaaatgaattaattaaaattatggaaaaaataatcaaaggatcaatatataagatggatttcaagaacttccttttatattagacatgactaattaggaaataacatggaaaatattccatccactagataagtagctattaacagaaatattgcaagagtgatgaaatgtctaagtgattatttttagttagtaattgttgataaattttatttcttctgtagtttttattattttatattttctatattgatcaagtatagcttttagaataaaaaggcaataaaacatttaatcaagcattactttgtgtgcacctatactcttagctactggggaggctgaggtgggaggatggctagtaccaaagaggtagaggctgcagtgagctatgattgcaacactgcactccagcctgggtgacagagcaagaccctctctctaaaaaaaacaaacaaaatattaccttagtaagaagtgactttggggacctcctcagttcacacttgtagtctgcaagccatattgtaagaaccccagctcttaacttcttaatccttagttcttcagaattaaattagctttaattttaagagcactttataatagatgatggcccagccaactcaaggcaattaaattacatcattctttttgagatgtgtcctcattgtttaccaagggtgaaagctatgagaggaagatcttgagagagaaccagggtgggaactcagttgacagagggtaaagatgatgagtctggggacggaaacaagatggcatcaacaggaccatacaagaagaagtggaagttgaagagaatgaaggaaagatgaagttcaataaggcagatagaggtgggaagagagaagtggcaggtgttaagaataacatgtaatgctttgacctgaaatgtgacatcacaatggggtcctggaagggggattgtgggggaaaacgagggtcatgtcaaaatggtggagtcctgacagacctttcatgagaatttctgtggtgctcagtaatgggttaaattgtgtcctctcaaaattcgtatgttgagggctgggcatggtggctcacgcctgtaatcccagcactctgggaggccgaggtgggcggatcacttgaggtcaggagtttgagactagcctggccaacatggcgaaaccccatctctactaaaaatacaaaaattagctgggcatggtggtgggtgcctgtagtcccagctacttgggaggctgaggtgggagaatcacttgaacctgggaggcggaggttgcagtgagctgagatcatgccactgcactcctgcctgggtgacagagcgaaactctgtctcaaaaaatcatatgttgaatcctaatccctagcacctcaaaatgtgactgtatttggagttaaggcttttaaagaggtaaattcatatgggagtgcctaatccaatatgaccagagtctttataagaagaggagattaggacccaggcacacacagagagaagactgcatgaagacacaaggagaagatggcatctgtgagtggaaaaaagaagctcagaagaaaccaacccagtgacaccttgatctccaactgtgtcacagaactgtgagacaatacgttttttatagtttaagccacctggcctgtggattacggcaacctgaaaaaatgaatatagattctgaagagcaggagacagagacaggaagacagcagccacaaaggctcagggaggtccacatttcaggtagggaggcttcccaggtggggtccttaggggcacaagcacgtggtgagcactctgtccacatttgttgatgtaaatgctggtaatagcataaatacatttgggagcaagcaactcacttttggtgaacacagggtggtctctggcctgagcacagagggtgatgtgggcacatgtcagaaggttttgcagaaagagtcaggcgtgtggggatgtggtgctactttcagcctcaaatgcttccctccctgtgaccagaaggtcccacagaaaaatgagctgggcacagggacaaagaggatgtgctgagctttagaaaagacagagtaaagagattcatgaaaatgtcaggtctacagcccacagcctgggtaccagaagccagagctcatgtgtgcatgtgtgtgcatacatttgtgtgtgtgtgtgtgtgtgtgtgtgtgtgtgtgtgtgtgttacctgctgctctgcactgggccatgctaacacctagctcgggccaagcacaaggaccctgtgaagaggctcacaaatgactcctgactcctgaggatttatgtaccatctgctgctggacttactgcagtccctccaagcacaccctcaaggactactgagctggggtgccatcagtcttgggaaaagagagtgagaattccctaaagcaatgtttggcaaacttgactactattcttttcaaaggccaagaaacattcctatggaccctgccttgacttcagttattgctgtggaaataaagcagcacaaacacaaacagctaagcttatagttgctttacaagtgcaaaacaaaaaccaaatgtgtaaattaaacacaattgcaaacagcaataaaactcaaactaacaacattagtttaatgtgactatgggtgtttgtgaaaccgatttgcctcttctgtgaatatggaactgaatgccattcagattctcctgatgggtgatgggctctcatgccaagggctgggaagtgagtcagagccttacaggagtcgcatgctgatagagcttgatgcctttacctccacaggagtcaaactgccacgtgtgtcagaccagctcatactagactttggttacaatccattgcttctctaacacttttagtctagacttgctccaagctgggagt

SEQ ID NO: 1883941 - DNA, 4001 bp, Homo sapiens
gcagacagcagtcttagtcttcttccaggctggagtggagtggtgcaatctcggctgactgcaaccttggtctcaggggctcaagcaatcattccacctcattctcctgagtagctcaaactacagatctatgccgccatgtccagttaatttttttttttgtagatatggggtttcaccatgtttcccaggctggtctcgaaccgccttggcctcccacagtgctgggattacaggtgtgagccaccatgccagcccagccttagtgttaacactgttataggttactgtaacatattggctcacagtgtgtgttctcgggtctgcctctttcctggttacctaatcataagtaagttacttctcctttctgtacctcagtttcctcaactataatttggaaataatattccctccctcatagtcattgtgtgaattaaatgaacaatgtataaaatggtaaatactgaacacttgataaatgttagctattattaaaggagagactgatatttaaatgattacaatacaatgtaataccttaggataaatacataaaaaacaacttttttccttccttattttacagctttattactgatttccctctaaaaagagatccaaataaatgtggagcgactcattctcattatagagtaaggaatcacaaagtaccatagtcacgtaacaaaagcaaaaaaaaaaaaaagcaattgttttacctttcaactgctgatgttatgtacaatctatcacaagaagcatagctgtgcattcatgagctgattgtattaacctctagaattttagaaacgagcacataggagggcgtttcaagtattcctgatactccttgtcatcttctgcgaatctactagcaaacatctcttcaaaatttggaacagctttggcagtgtcagtcattccgaaattcccaaagatttgaggcagctgtattgtttaatgtttaggttgtttaaatccgccaagggctgtgtctatctagctcgggccgaaccccgccagcgagacactaagagaccgcaggagaggtggcctctggcccaccacaccgtggaactccagaccaccccagctctccaatgtagtggagacccttccgctagccatcgaaaataacttaagtcacttaagctgtacttgggataatcaggttatttaatgaggtgataactgaggtgactacaaaagaaaagtctgggattgggtgtgtgagcaaggtgcatggggacagtggtatgttctaggttgaaggctcaccctaggccaagcaccgtggcacctgttttacaatatcataactttaatatcacatccttgcaagatatgtagcttcgttttactgaggaaagctcagaaaagttaaataactcgcccttgggcacacatgactggaaagaaattgggatttttattttagtaagtaagttggtcaggcacaagggcgactcagcagagggaacttcaaggaagtgtgagacaacagctggagccctgagctgggagagtggaggacgaattataaagagttttatgcctgccataatgagaagcttgtccttgaacttgagggcaatgctgagagtgcaaaggactttaagcaggccctacacagtggcagccaagcaggtcataaagagcaagatgatgcccaggcagatcagggattctctatctacagagcgtccgcctaccagctccttcacagcagcggattttgctgcaagagaagaggcagcaggccaggccttttccttcgcccacagcgcctacgtcgaaggctcccaggctggttgctccactggctgcttgaggtcccctctttccagacccgccgaactggcggccggtgctgtggccgatcccgcgccgctgcctcgggccttggggggcagcgccacccggccaacccgcctctgcagcgttcctggcgtcagcccctatcctccagcttcctccgccccaacctagggtagaaccccaaactccagtcccagtccacttccgcagcttcctcccctcagcatggcaggtcggatcacgtgcgggttctgtcacgtgacatcaggtcacgtgaggccggtcacgccccgggcagcttggctggggctaggcttccggggctctgcagtcctcggcgtgtgctggcagcttcggagcccaccgagccgggcggctaggatggtgagggcgccgggcaggagagaggccggcctgggctggggccgccgtccctgccgccctcaggctcagcttctcttctcgtttttttcgctgcagatgaaccggacgacccccgaccaggagctggcgccagcgtcggagcccgtgtgggagcggccgtggtcggtggaggagatccgcaggagcagccagagctggtcgctggcggccgacgcgggcgtgagaggcgggccccggggacgcgagagcggcaggggtgacgcttggcttgcgcgcaggagggccggaccgcgactgcccctgcacctggcccgtcccgttgcctgccctcttaggaacacacgccccgtttagcccccgagaatgccaccctggcagtccccggccaccagggagaggggcagacactgaccgtggcccagacgcgacgttcccttcatggggtttctggctcagctccatccggaggggagatccgtttccgccacactgagggattgctcgggcactagggaggcgattcctgttgggacctggactaaatggggtgggaaacaagccagtatgtggatatcctttaatgggatttttcaaatcgggggcccaaaaagctcagaactgttggagtcccaaatgaataggatttttgaataagagtggtggttgattagctaacccttggtctgtgatctctgtagattgacaaccaaagaggacttttaaaaggagacagggttttgccctgtcgcccaggctggagtgcaagtggcttgatcttggctcactgaatcctctggggttcaggtgatcctctcacctcagcgtcctgagaagctgggactataggcgtccaccacacctgtctgatttgtttatttatttaattttagtagagatgggggtcttgctatgttgcccagactggtctgcaactcctggactctagcgataaccctgcctcagcctcccaaagtattggattacaagcgtgagccaccatacccagtgccaaaaagggattttaaatttttccagaaacgagataggtgtccattagctcactgccactcttttgatgagctttcttagtgttttccaatgtcacttggttttagtacttgtcaaaccagcattccagccgggcacagtggctcacacctgtaatcctagcactttgggaggccgaggtgggcgaatcacgaggtcaggagttcgagaccagcctggccaacatggtgaaaccccgtctctactaaaaatacacaaaattagttgggcgttgtggcgggcacctgtaattccagctactcgggaggctgaggcaggagaatcgcttgaacgcgggaggtgcagtgagccgagatggcgccattgtactccagcccaggcaacagagtgaaactctctcaaaaaaaaaaaaagcatttctttcacattctaacactcaaaggtgaaaggaaatgggttcttttttgatgtgacatgcagaatagttacatgtaacattgatactactgtatgtttattttttaaaatagctactacagtttctacaggaattctcacagcaaactatctctaggacccatgaaatcaagaaacaagtggacggactaattcgggaaaccaaagccacagattgtcgcctgcataatgtcttcaatgacttccttatgctctctaatacccagttcattgagaatgtgagttatttagttatattatcattccttttttgggagtaggagatattgtaattttaaataacttactgttaggttccctcctaaattttg

SEQ ID NO: 1883942 - DNA, 4001 bp, Homo sapiens; identical to SEQ ID NO: 913648

SEQ ID NO: 1883943 - DNA, 4001 bp, Homo sapiens; identical to SEQ ID NO: 913648

SEQ ID NO: 1883944 - DNA, 4001 bp, Homo sapiens
cccgagtccagggtgagggttcagagcagagccgctgccctcccagtccagggtgagggctcagagcaggcccactgccctcccagtccagggtgagggctcagggctggcttatcctcacaacagacctatacatccctgggcatcctagatggggctctggggtgccacccccagccaggacagactggctcatgagaaggaccttcccccacagctggcttcatttggagatgccagggccttggctgctgggagacgagctcaatgagccccatgagggcatgggtccctgaagccccttggccctgcccggcctggaatggcaatgagcaggcagtcttgccagctgagacatgaagcccaggctgggcctgtgtgccaggtcacacccctctcaggatgtgctagcgcctgcctcaggttggtttccaaagcctcatccagtaagaccaggtctctcaaagcaattcctccaacaaaacggaattctctgcctacttcagagttttttaaagtgtgggtggtagtgtgctagaactgaaggatttcagagtcagaagaaatggttcttattctaactctaccttccacctcttggttccctcatctttagaatgggaatctgttgggatgatgagacccaacaccaggtcacgggggcggcaagtccagcggagtcaaaggaatgagaaagagacagttcgagagagaaaatgggagcagggcgctatcgcgagtgtggaggctgcgaaggccccgagttctgggagcccacgctatttattggtgatctaacaaagaaacaggtggtgaggatgtggaggttgaaaggcaacagtgtatcaaatgaatgagaaacatatggctacttgagagaatggcagtgctagaagcaaggagccagcaagtctagcaagccctgcctcagcttttctcccaacgctgagcttttctcccaacaggaatcataaaaaactcagaggctagtgaaaggttaaagcaggtggtccacaccagctgcagagtcaaaaacaaaatacgcatctgctgccatttagaaagaggacacaaactcaggcaagactttttcacacgatgacccatgagtggggcctggctgggcctccccacacatacctgctgacctctgaatacaacatacacttcgggaccaggtgcagtggttcacgcctgtaatcccagcactttgggaggccaagaggaatggatcacttgaggtcaggagtttgagaccagcctggccaaaatggcgaaaccccgtctctgctaaaaatacaaaaattagtcgggcgtggtggtgggtgcctgtaatcccagctactcaggaggctgaggcatgagaatcactttgaacccaggaggcaaaggttacagtgagccgagatcgcaccactacactccagcctgggtgccagagcaagactccatttcaaatacaaatacaaataaaaataaacatgctttaggggacttggatgaaattgaaaatgccctttttgactttgaacagacttggtgacttgttaagaaatctttgaagctttaaagttatggtaaaaataaaaatccatcttccttttcctgcataggttattcagaataggctgttttgacaagaaaggctccccagatttccagagggaagggtccaagctgccagtgttcacccagcaccaggactcatgccctgcccccaggagacctccccaggtctgcacccctcaactccgtgctgacttggtagagcaggagaccagggttcctgaggggccaaggcctctccgcaggtcctcgcctgcctacgtagatccgcctcccacagactcagtctgccccagatccccccagcccaggtagaaaggagccccgggtcctcactggctccctaggtggccttctcggtgcggtgggccaggccctcggcagccagcttccccaggcctcccagcatcgtgtggcagcagacagtggcaaactaggatgctgaggactggcccaacatgcttttatagctgcctctggtgcctgtctaggctctggggcaataagccctcaccccagcccagtaggaggctggacaggtgagtcagtgagggcggcagcaggaaggggctgggcggagccaccctggaactagggtggcagcatcccctgacagcatgaggcttctgtaaccctgtcctagggaccccgtgaaggataggggcagggagcagggctggacagtagagatctggacatgcttcttccttgaggcagagggcctgagtgccagcccccctgagaccaaagcttcccaagcctgggtactgatatgtacctggagacaaggcctaggattccaagcctgctgctcaaggtccccagtgtggcctagtaagaggtttgggggttctatgggcctggagacctgggcagtcctttgggtcatgaacacaagtggaatgagggtgactgccctccccattcctggagaccctggctctgcagagcagtttgcggcctccatgggacagggtgggccgttcagggtggtgccttgcctgagtcagaggggggcacagcactgggcagaagcgtagtcacctggtgtcactcagctgatgctcactcacccaagaggctctgtgaggtcagcggtgccctcctatcccctggcagtcctggaggagtagacagaggcctccaccaccactcagggagatgcttctggccttagctagaatcccctagaaagcagcttccctggctcctggtgcatcgcatgaggagtggcagggctgctccctagttactcatgatggacagacatgcctcaagccacctgccacatgctgcttcccttagtcaccagcccaacctgagcctccgtttcctcatctgtaaaatgggcatagcgtgccttcttggctgtgtccctaatcatccctgagacaaagcatgcaagctcctggtaaacacctgttccctccactcatcattgaggtgccctttggcagtgagctctgaccaaccggtagggtgtgccaaggagtgactgggacgtgaggctgccttggagccagagggctggggaatgtgacttctgctggccaggagccaaggagaggtcttcccatgctcctacttctggggtgcaggcctgtggcaggggtccgaggctgtctccccaatgcaggctcctggagctgctctcctggatgtgtcagggcctgattagtttactggactgtgggccctcccagcctgggactctggagctgagaccctcttgcattcctgcatggtgtttgcgggctccagggctacggccagtaaccctagggtggacagtgggtatcgtgggcagcaggacctctgggtctcaagactgtggccccacacatgccattgctgtctcctttgggcaggggtgaatcggggcttcaacaatttagaggggcctctttatgaaaaagaatacaataatatgattcttgcacatttttcatttatatacgtatgaacttctggacccagaaggggctgtgaaagtcgggggcctggagctcaggcgggtccagatgaccctgtcctccttttgtaacagccagagtccaggatgctttgcccagggcattgggctggcactgcagaggcctgggggatggggcgacacctgggacatggctggtgggaattgttctaggaaacctcagggattctccctggacctgtcaaagccccttccctgtttcttctgaggctgtgtcccccccactcgcacaagggtcctttctatgcctgctcccctgataaatgtcatctgcctgctctagaatggcttccagaccccacagaccccctcctcatgagctcccaccctagggtactctccaccagtccgcgctttcaggagctcaccagacccagacagcctgttgtcagagctcatccacacagcaggaccctggcccactgcccagcccagagccagg

SEQ ID NO: 1883945 - DNA, 4001 bp, Homo sapiens
cagcctcaacctcctgggctcaagcaatcctctcatgtcagcctcctgggtatctgggactacaggcacgcaaaacttaatttattttttgtagagacgggttctgtgttgccaaggctggtctcaaattcctggcctcaagcaatcttcctgcctcagcctcccaaagtgctgggattacaagtgtgacccactccacctgactagggaaggcttattaaaggaggggataagtggaaagaaggggcagagctgagaaggatagaacagaggcccagaagtggcaatgggcaggagagtggacaatggaaaggagagcaatgcagatgcaataaagggatcaattatgctgagctcagaagaggcaaatgactaaagaaagagtcttcaaagactaagtgggagaaaaacaaaaacaaacaaaacttagctttataaaataagctaccactataccataatgacctcacccgtgagtaaaattatatctccaagaaacactgtaaatgcccaaaatgctgcagtcctccacagaaaaaccttcttcttagtttctgattgatcacttactgtaactgttgctaaaggcactttagagccagaatttggtccgaattttgtttatttccttcacatggcatggagatagcaccatgactaaacaattatacttctggcttttagaatcacagttttttattaatgatgtttttttaatactcttaaattcagacacatttctccgatccatttctacagcagaatctcctccattagaaatcaacttcattttcttagctacttgaaggactccagatagagcttcagactggcccactttatcttcagaggtacagcttcttttaatagcacttttgtggaaggtatttagttgggaacacagtattcctgagctacacaactcaatatgtatctcatttggtggcagttcatcttcagaactgaaaagttcttgagatcctgtatgttcttcaagacctttatcagagtttatgtgaatgcggctattttctgttttaggacaaacaggactaaaaagttcaagggaatatgcttggttttgtccactttcatatgcttctgtaaaaccatcaagctgaatcgaattctcttcaggtattcttatctccccgtaacttgcctttggttcagtctccatgtttacattccctttatttacaggactccgccttttatctttcttttgagctaaaaaaagcaacctggctggaggtaattatactgagaaattctttatcagttgatattttaaggtctgagaccttcttaactgctgcttcagaccttgacttatctactgagttcgaggaaaataatcccaaacactggttttgtatttcatgatattctgttggcacacactctctttgtaccacttcaggccctatattaattttttcagtactacaaaccaaatccaacacagctgcacatttatggcccaactgaaacaaatttgtgttaaagttctgaccacatatatctggctgatgtttaggctgttcatctctaattttattttcactgagaagctttgatacttttcttcttcggttaaatgcggaactgtgcttttaaatccacatatttgcatattagagctagttatgtcactcagtctagaggagtgaatcttctgggattctatattctgtgtttcagaaacagaatgtacaaagtcatctttcacatgaacatgtctattcatacagtttgctaagaaatgaccacaaagatctggagaaccaatagaatctgggacttcatagttttcaagatttttgtgctgtttttcatccttcagatataaagaatgttgactgtataaaagctgaatttttttccaggggtcagcaacagacattaaagaagctgtgtcttctgatactgtcattttcagtgaagcaactggagcaccccaaaaaatgtggacttgagatcctccactcatgatttctgataaaaatgaaaaatccaaaattaatatattgtcagcatatttttgcatatggatattaacttaataatgtaccaaaagaaaatataactgagtcaaaaacataattaacataggtgatttttttgatatgccatttaattatataaaattcataaatacacaagaaattattaaggagaaatcacaatattcacaaaaatttttcacctaaagactctctttaggccgggcgcagtggctcacacctgtaatcccagctctttgggaggccgaggtgggtggatcacgaggtcaggagatcgagaccatcctgcctaacagcgtgaaacgccgtctatactaaaaacaaaaaattagctggacgtggtagcacacgcctgtagtcccagccacttgaaggctgaggcagaagactcgcttgaacccaggaggcggaggttgcagtgagcctagattgcaccactgcactctagcctgggcaacagagtgagactccatctcataaaaagactctctttaagggaaataaagctaagcacactcacatcaaacaagttaataggtttttagtatgtttgtttcatttgagatggagtcttgctctgttgcccaggctggactgcagtgttgccatctaggctcactgcaacgtccacctcccaggttcaaccaattctcctgcttcagccccctgattagctgggattacagtctgtgccaccatgcccggctaatttttgtacttttagtagagacggggtttcaccatgtcggccaggctggtctcaaactcctgacctcaagaaatccactcgcctctgcctttcaaagtgctgggattacaggcgtgagccaccgcgcctggcctgtttcttatgttgtaaaaacttgccccatttaaataacaagttagtaaagaatgggaaaagaggcatttgtttaactatattacagtcacctttaaattagtcattttggggcagagcacagtggttcacgcctgtaatcgcagcactttgggaggccaagggggtggatcacttgaggtcaggagttcaagaccagccaggccaagatggcaaaaccccatctctactaaaaatacaaaaattagccggctgtgatggcccgtgcctatagtctcagttactcgggagtctgaggcaagagaagcgcttgaacccaggaggaggaggttgcagtgagccaagacctcgccactgcactccagcctgggcgacaaagagagactccatctcaaaaaaaaaaaaattactcatttttggccagccatggtggctcacaccggtaatcccagcactttgggaggccgaggtgggaggatcacttgagaccaggagtttgaggccagcttggacaacatagtaagaccaccatctctacaaaaaaatttaaaaactaaaaaatttcttaaaattagctggacatagtggtggaacacctatagtcccagctactagggaggctgaggtgggaggattacttgagcctgagaggcggacattgcagtgagccatgatcacaccactgcacttcagtctgagtaacaaagtgagaccctttatttatttattttgagacagagttttgctcttgtcacccagtctggagtgcaatgacgcgatctcagctcactacaacctcctgtctcccaggttcaagcaattctcaacctaccgagtagctgagattacagccgtctaccaccacgcccagctaattttagttttttttagtagagatggggtgtcaccatgttggccaggctggtcgcaaactcctgacctcaagtgatccacccaccttggcctcccaaagttttgggattacaggtgtgagccaacgtgcctggcgagactctctttttaaaaaaatgattaagaatcactactattgctataactacatattccaacctcatttaatcctcatagaaagaataaccttcataaggaataactggtatattagctgttct

SEQ ID NO: 1883946 - DNA, 4001 bp, Homo sapiens
tgcagcctcaacctcctgggctcaagcaatcctctcatgtcagcctcctgggtagctgggactacaggcacgcaaaacttaatttattttttgtagagacgggttctgtgttgccaaggctggtctcaaattcctggcctcaagcaatcttcctgcctcagcctcccaaagtgctgggattacaagtgtgacccactccacctgactagggaaggcttattaaaggaggggataagtggaaagaaggggcagagctgagaaggatagaacagaggcccagaagtggcaatgggcaggagagtggacaatggaaaggagagcaatgcagatgcaataaagggatcaattatgctgagctcagaagaggcaaatgactaaagaaagagtcttcaaagactaagtgggagaaaacaaaaacaaacaaaacttagctttataaaataagctaccactataccataatgacctcacccgtgagtaaaattatatctccaagaaacactgtaaatgcccaaaatgctgcagtcctccacagaaaaaccttcttcttagtttctgattgatcacttactgtaactgttgctaaaggcactttagagccagaatttggtccgaattttatgtttatttccttcacatggcatggagatagcaccatgactaaacaattatacttctggcttttagaatcacagttttttattaatgatttttttaatactcttaaattcagacacatttctccgatccatttctacagcagaatctcctccattagaaatcaacttcattttcttagctacttgaaggactctagatagagcttcagactgggccactttatcttcagaggtacagcttcttttaatagcacttttgtggaaggtatttagttgggaacacagtattcctgagctacacaactcaatacgtatctcatttggtggcagttcatcttcagaactgaaaagttcttgagatcctgtatgttcttcaagacctttatcagagtttatgtgaatgcggctattttctgttttaggacaaacaggactaaaaagttcaagggaatatgcttggttttgtccactttcatatgcttctgtaaaaccatcaagctgaatcgaattctcttcaggtattcttatctccccgtaacttgcctttggttcagtctccatgtttacattccctttatttacaggactccgccttttatctttcttttgagctaaaaaaagcaacctggctggaggtaattatactgagaaattctttatcagttgatattttaaggtctgagaccttcttaactgctgcttcagaccttgacttatctactgagttcgaggaaaataatcccaaacgctggttttgtatttcatgatattctgttggcacacactctctttgtaccacttcaggccctatattaattttttcagtactacaaaccaaatccaacacagctgcacatttatggcccaactgaaacaaatttgtgttaaagttctgaccacatatatctggctgatgtttaggctgttcatctctaattttattttcactgagaagctttgatacttttcttcttcggttaaatgcggaactgtgcttttaaatccacatatttgcatattagagctagttatgccactcagtctagaggagtgaatcttctgggattctatattctgtgtttcagaaacagaacgtacaaagtcatctttcacatgaacatgtctattcatacagtttgctaagaaatgaccacaaagatctggagaaccaatagaatctgggacttcatagttttcaagatttttgtgctgtttttcatccttcagatataaagaatgttgactgtataaaagctgaatttttttccaggggtcagcaacagacattaaagaagctgtgtcttctgatactgtcattttcagtggagcaactggagcaccccaaaaaatgtggacttgagatcctccactcatgatttctgataaaaatgaaaaatccaaaattaatatattgtcagcatatttttgcatatggatattaacttaataatgtaccaaaagaaaatataactgagtcaaaaacataattaacataggtgatttttttgatatgccatttaattatataaattcataaatacacaagaaattattaaggagaaatcacaatattcacaaaaatttttcacctaaagactctctttaggccgggcgcagtggctcacacctgtaatcccagctctttgggaggccgaggcaggtggatcacgaggtcaggagatcgagaccatcctgcctaacagcgtgaaacgccgtctatactaaaaacaaaaaattagctgggcgtggtagcacatgcctgtagtcccagccacttgaaggctgaggcagaagaatcacttgaacccaggaggcggaggttgcagtgagcctagattgcaccactgcactctagcctgggcaacagagtgagactccatctcaaaaaaagactctctttaagggaaataaagctaagcacactcacatcaaacaagttaataggtttttagtatgtttgtttcatttgagatggagtcttgctctgttgcccaggctggactgcagtgttgccatctaggctcactgcaacgtccacctcccaggttcaaccaattctcctgcttcagccccctgattagctgggattacagtctgtgccaccatgcccggctaatttttgtacttttagtagagacggggtttcaccatgtcggccaggctggtctcaaactcctgacctcaagaaatccactcgcctctgcctttcaaagtgctgggattacaggcgtgagccaccgcgcctggcctgtttcttatgttgtaaaaacttgccccatttaaataacaagttagtaaagaatgggaaaagaggcatttgtttaactatattacagtcacctttaaattagtcattttggggcagagcacagtggttcacgcctgtaatcacagcactttgggaggccaagggggtggatcacttgaggtcaggagttcaagaccagccaggccaagatggcaaaaccccatctctactaaaaatacaaaaattagccggctgtgatggcccatgcctatagtctcagttactcgggagtctgaggcaagagaagcgcttgaacccaggaggaggaggttgcagtgagccaagatctcaccactgcactccagcctgggcgacaaagcgagactccatctcaaaaaaaaaaaaattactcatttttggccagccatggtggctcacaccggtaatcccagcactttgggaggccgaggtgggaggatcacttgagaccaggagtttgaggccagcttggacaacatagtaagaccaccatctctacaaaaaaatttaaaaactaaaaaatttcttaaaattagctggacatagtggtggaacacctatagtcccagctactagggaggctgaggtgggaggattacttgagcctgagaggcggacattgcagtgagccatgatcacaccactgcacttcagtctgagtaacaaagtgagaccctttatttatttattttgagacagagttttgctcttgtcacccagtctggagtgcaatgacgcgatctcagctcactacaacctcctgtctcccaggttcaagcaattctcctgtctcaacctaccgagtagctgagattacagccgtctaccaccacgcccagctaattttagtttttttagtagagatggggtgtcaccatgttggccaggctggtcgcaaactcctgacctcaagtgatccacccaccttggcctcccaaagtgttgggattacaggtgtgagccaacgtgcctggcgagactctctttttaaaaaaatgattaagaatcactactattgctataactacatattccaacctcatttaatcctcatagaaagaataaccttcataaggaataactggtatattagc

SEQ ID NO: 1883947 - DNA, 4001 bp, Homo sapiens
cagttcctcagatgtgagtgcaggctgctcccctgtggagggagcgagaagccacactcagtcataagcagtcttgtggagatgggcaagtcctcagaactctctgcagcttccgtgatcaggaaggggccaactgcccagggtcaccttgcccaggacccctcctggcgcccttcacggctcctcgtgaggacccacgccaagcctccttggtgggccccttcccctagctcatgccagtgaaaccagaccttgagcagatagacctaggtctctggctgtggcaggagcttgggaaagccaccgagatctgtattctttccgcaggcctcacagagcgccttccgtgtgttgggcaccaggctggaggagttcagggaacaggatgagctggagccaggccctgtactcctcacccttgagaagctcgtggtctagagggagggtgtctggagagctgtgaatacagtgacacttgaggatcccatgactaagaactcgcagctgaagcccatgggaagcccagggcttgtagaggagcagggccagcctggctgtagcacgccagggaaagccttgcggagcagggatacttgatttggccttgaagggtgagaagaagtggcttagaaaccgttgggtccagcctccttgttttacaaatgaggcagctgcaacctggagcaggcagtaactgcctcactggctccgcctccgccttccctcctgcccctctagccccacttcctgggcctgcattcaggcctctgcctgttgcctggtgtctggacgccagtcttggtggccctccctcagtcaggtctcttcagcccttaccagatgtgacactggtgccactctgctcatgggcctcagcctgtgaggtctccatggggtgtcacccccagctgcaaggatagggactcagctttgctcctccccatgtccccagcactactgaggcagggcagacagcaggcacctgaggtgtgtttgctcgatggcagccttggtcactgcagcgaggagtagagctgctgtgaccattcagctcttctgctaccaccccatcctttccagttcacatttgctgtgtgatgtgattacttctcaccagccccgctgccaccaccctggttccacctgctgttctctcgcaaggattcttgtggtaactggtcccctgcctctggctctttttaacctgttctccacccagcagccagagagaatcccagtcagagctgtccttctctgtgtagcagcttccactggctttacactgaatgcttagcaaacacccagcccttactaggatgtacatggccccatatattcttgtccatgtgactgctttgacctcatctctgccactctgccccctctgctcggtccccactggcctccctattccaatatgccaagcgtgagcctgcctcaggcctttgcactttttccttggcctggagccctctccccacagtaggacatactccctccctccttccttctctggctactcaacctacagttcagtcccagcgccagcgcccaccccttacccccaccacactttctctcctcttttcctttttccctcttgggcacttagcacttttaaacatgtccctgtggatcttgaccgagtccttatactagaatgggagctttgagaaagcagaggatgtctctcttacttgttgttgaatgcacggggcccagcccgtggcaggtgctcagtggatgtttgtggatggatgagcttgcaggttcctgtcacctggcctcttctcattcaccattgtcttactctctctctggctgctgctccagttcacgactgagtgggtgcgactagagtagctctgaccaaaaagaagggacctcaagggtgaggagccatctggaggtcccgagggaggagccctacccgggtccagctgtgcagttggctgcagtggccgcctctgtgcttggtcccttctcagggtgggactgcctggtgttggcttcagagttggttccaggacatgtgggcccaaggtcagctgagctgctcttccaagaggtgtggcctgagcccctgccaggaggagcacggcctcccagccctggccagggaaggaaaactcatctcagaaagggaaagcagtcaggggagagcaggcggctttgctggaagggattctaccatgtgttctcttgtggccacacagattagaatctgtgctttcttcctgaactctccttgctttgttggaaagtatccttctttctgctgctttttgttactggcctgtccgggcccagaaccacccagtgtgcagtgctttgggtccatctgtggtcttcctcctcctcttctctccccttggctccagatgagaggtctgttgtggggagcagccctgttggagatgggctttctcattgctcagtttgcttatgcgcccagaacacattgactgggcgtcagtgcctggcccggcctggctcagcgctgcctgcgctatagcgtgggccagcaggaaggtgttggaggtgcagctacactgagggtcttgggaagtgtgttagttcatatcatgttgctatgaggaatacctgaggctgggtaatttataaagaaaagagatttacttggcttatggttctgcaggctgtataagaagtatggcaccggccaggcatggtggctcacgccggtaatcccagcactttgggaggctgaagagggcggatcacgaggtcaggagatcaagaccatcctggctaatatggtgaagccccgtctctgctaaaaatacaaaaaattagctgagtgtggtggcaggcgggcgcctgtagtcccagctacttgggaggctgaggcaggagaatggctcgaacctgggaggcggagcttgcagtgagccgatatcacagcactaccgcactccagcctgggcgacagagtgagactgtgtctccaaaaaaaaaagtatggcacctgcatctgtttctagtaaggcctcacgaagcttccagtcatggcagaaggtgaggggagaataagtgtgtcacgaggtgagagagggagcaagagggaagggaggaggtgccagacctgttaaactaccagccctcacatgaactagaagagcgaggactccctgatcaccatggggaggccaccaagccattcatgagggatccgctcccatgacccaaacaccccccaccaggccccgcctccagcattgggggttacatttcaacatgagatttggaggggacgaacatccaaactgtatgcccagaggtccaggtacctcctccctgtccttgagcctcatgccacctgctgaggggcaggggtgcacccatttctaccccattatacaggaaggaaactgtggctcagagagcccagggaggggctgccctggtcacagatttcaagtccaggcccttgtctgcttcccccagcaccttctcgcatgggccctgttccagaggctgtgatcgccttggagcccctccaggccttggggagagacacacgatgtaaataactgaagaaatactgaaaataatcttagtctagtgatgacatccacgggacagaatgtgagataagctgatgctagcatttgctttgaacagccagcaaaggttcagaggaagttgacggggttttgctttagcttcctaaactggtaacatcatccccgtgtaaataccatcaagataacaacaggaacgatggaaaataatttttcttttgttttctaatcagactaagaagataacaagtggaggtttaagattttaaaggaaagcatgactgtgggggaggccgggactggtatcagcataggccactttggaattatgggagcaggccccagaggcgcagctcaccctgggtccccagagtcaggccttagtcacagagcgggaaagtctcaatgtgcaagggaaagtcaccagggtcctcgcaaccctgggtgtcatgtggc

SEQ ID NO: 1883948 - DNA, 4001 bp, Homo sapiens
catagtgtctgcaagtaaacatcagtcaaactctctgccttcttggtctccactactggttgctatgggctttctataccatctttcctttcctggactgggctcctgaaggtcagcagcctccctgacctcggtgctataataagttgccttctcttctgcttgcacacaacatctctctactttattcaaacaattacctggtttgcattgtctcactttttctgaccaagttttcttgatcatttaaaaatttccttggggttcaagccagttcacaagctagacctgatttaaaatgaataatttaaggaaatctggagaacgaactaatagtagatttttcaccctggtctacatttttctgagacggagtctcgctccgtcgcccaggctggagtgcggtggcatgatcttggctcactgcaaactccgcctcctgggttcacgccattctcctgcctcagcctcctgagtagctgggactacaggtgcccgctaccacggccggctaatttttttgtatttttagtagagacagggtttcaccatgttagccaggatggtctcgatctcgtgactttgtgattcgtccaccttggcctccgaaagtaaagtgctgggattacaggtgtgagccactgcgcccggccgctccggtctacattttatatctctactcttaagaggcagtatggtacaaggttaaaagtaagggacttctgagccagattatcttcattttaatcctggttctaccagttatttctgtgtgaccttgggcaagttatgtaacttctctgtgcctcagattgtttataagggagataataaaaatccttacagcatatagagttggtgaagttaaatgtggtgaaagttaaatgaataaataaagcatccacactagtacatgacccaaattaagtgtcatataagtgttgccgcattgcagttctcctcagtgacggcctgtgacctgccatttctgtcggctcttaccaaggctcggtgccgccccgggcctctgctccattgtcatagtaatgtttgcactctgctagtcacctgtaaatatacatatttaggatcctaaaaccaatatcctaaaatatgtatattagcagatgatgacaaaaacaccagaatttttatcaaagagaaagtagaaagtatatgggttaatattgtaaggattaggatacacctgtcaaattactctaggttggcttagaaacaaagcaaaacaaattgggtcccatccactattttttggcattctgaaaataactagctcttacctgatgaggtcattcattcatgacctgaccatccaggtcctatctggcaataatagctttttgcaaaaagcaactcttgcctaagtggagatttacatcttgatgagttttgtatgaaagtaaagaagatgcaggaacattatcagtggggcgtacactaaccattggcatttctgagcaacgtgttgcgtagttgtgtgatttggcagcagctggtccattgctgacacgtgtgtgtgttcactgaggcttcactcacacctaaggcttccttggagagaccatgctgccattacatttggatcactacctgcccccaacacacacacacacacacacacacacacacacacacacacgaaccaactttccaagcaccacacccaccttttccgggctctgtaccagatctggaggggtgatggctagaagtgagggtttttgctccatcatgagtagcagctggaagtgggcctgtgcccagctctggtggcagtgggccacctgtggctggtgccaagctcactgatggagatctctcattatgtacctacatcaatgatcagtaaagaacaagccataagaaacttttgggtctctgggaatgttatctttttactcctcatataacttcatggtgaactgttttgaaatttgacattaatttagaatttcttgcctgttctgatctctagtaggattctaggctggatgtctttggaattgaaatacttgttggcttctggttattttgggggtaatccataacagtctaccattcctggtgtttggttttagtgggctgtgaaaaaaatcatttgttcaacactgatgtcgtgatacaaggacgtgaagatgtgagtcattgtgacatcaccagccagaattgctgggattcagtgagatgactcacagtaagaggtcagtgtctggttcagtagttccttcttccacatgtatccctcagtatctagaaccctgaaattggtttctctaagaaaaccaagaggcccataagggtaatgtatactgttgatttttatggttatttttcaaaaactaatattttaaacatatcaaaattatttcaaatggtaatgtactcaatgtaccatttggtttaagatgttaacattttgccatatatgtcataaagtcttttcatgaagaaatcaaaccttacaaatatactggtaagacccccctcctgcccatcatgcccccatcccttccgttatgttgttgaggtggtgtatgttcttcccttcagctttttaacttttactacatatctgtgcattcataaataacatgtagtgttttttgcgtgttatgtagtgtgtccttttgcaacccatgttttccacccatccattttgaattgatctatgttgatgcaggtgtatacaaaactcatacagctaatttcttttagttgttgtataggattttactgtaggaaatatgccatcatttatttagatactttgtaacttaattatcacaaaacactttgtggtatttttaactcagtttcagagaacatattcaaacctaggtttatccaattccatcatgctttctataaacatttggaaaataaagttgggaaagtgagcttgcaggctgcctcctagcatatctctggggtcttcgtgtaagggaaattgttggctgtgtgccccactggcctggggtggcaagaccagggcagccctgtcttcgtcagtgggtctgcactgcaggaagacccctgggtcttcagagggtgctggtcagctacttgggacattggctcaagggaaatacaagatcctttttttttaaatgaacaatgcagtaaatctgtgatatatttgaggctcaagaaggattgagttacagggagaagtttcaaaggaagtgtaagacatggacccagcctgtaagaaacttaaagtgtagcaggggagacaaaactaacatagaacaattgcatgctacacagcttggtatacactctactgcaccccttgttacctttggcaaaaatgagatattctgtgtttttctttgcaccttgatttctcacccaacaatacttagtggaggtcctttcaaagcacctagtatagaacaaattcatttttcaaagggtgtataatgttccactttatggacatagaataacttatttgtccagtctcttataaatgggtcatcttttgttttgttttgttgtaaactgctgaaaactgtagtaatgtcctatgtgtctttgtgtgtatctatttttatttttttaatttttattttaggtttgggggtacgtgtgaaggtttgtcacacagataaatatgagtcacaggagtttgttgtacatagtattacatcacccaggtaatacgctcaatacccaatagttaccttttctgctcctctcaccctcccgcttcaggtagaccccagggtctgttgtttccttctttgtgttcctaagttcttctcatttagcttcctcttataaaagagaacatgcggtatttgattttgtgttcctgcattagattgctaaagatgatagcctccagttccatccatgttcccgcacaagacctgatctctttcttttttatggctgcataatatttcatagtgtatatgtaccacattttctttatccagtctgtcattgatggacatttaggttgattccatgtc

SEQ ID NO: 1883949 - DNA, 4001 bp, Homo sapiens; identical to SEQ ID NO: 913658

SEQ ID NO: 1883950 - DNA, 4001 bp, Homo sapiens
cgcgggacgcgtgcgggattgcggcggcagcggcgcacgcgggcacctgggagcggcgggctgctgcgggaggcgttggagactggctcccgggggctgttaggaccttccctcaggcccgggtgctcagaacgctggaggacttgcttttcttgggccttgatgcgaagtgctgaccccgctgggcaggcggggcagctccggcgctcctcggagaccactgcgctccacgttgaggtgggcgtggggtgcggacaggaattgaagcggaagtctgggaagctttagggtcgctggagggggaccccggttggagagaggagcggaactcctggacaagccctgacaagccaagccaaaggtccgctccggcgcgggtgggtgagtgcgcgccgccccgcgggggcggggagagagcctgcagccttcagaacagatattgctcattttctggcagttctcagacgtaggaaataagtcagcaccgaagcagtggttaagccggagggctcggaagaacggcaccttttctttctcgaaaaagttatatgggggctgaatgagcttctggaggcttgtttaccgttttttattgtcacacagaaaaagaaactgccttgtctcccttccgggaattctctctttaagactgtaagtcgctgcctgagtggtttcattttgttttgtttttctgcccttctctttcttcttttgccctttcttagcttgcactcccatggtgatttctgcttggtctcctgctggggttggtggtactcgttcccaccgcacagaacccggcgcctattattggccaagaaacttgagcagcctgttttgaaaagtccctcgctcagaaatgccagcttgcagatggctaatcaaagagacgtggatccaggaggctcatttgagtaccggagcctctgagagtccatggatttttattttattgggccccaacaaagtgccaggcatagcgagagaagtgtttacaaatgtgatctccgcggattctcacgagagccatgtagtggggaagataaccacatccccattttacagatggcgaaatgaggttcagagagcttcagtaattcagccaagatcacacagctagtaaatgggagatatgggattgaactcagatctaattccaaaactcaggctgttcgctgattgcatctgatatccagattacaccaagaggctgagatgtctgggtccattttatgattagaaaaaaaaatcctgttcctttcagaaatagtgtgcactatttgggattctttagaaacttccttggagaaaattaatgattcaagattgagaaaacatttatacaacctcaggccacactcttctctctcttgttattaaccattgcaccactgcaatgttggctgctttgaaaatctcatagtttttggacagcagtattagtaaagtgtaagaaaattgtcaaagcttggagctatgcttgttgaacttttgtaccaatagcacctttaccagaggctgcgtgtttaaagcccgaagaaaactttgcttttctgaaagaatacacacacacacgcatatgtaaatattcatacatttatgtatatatacatattataatacctataagttaggtataacttatatttgtatatgatatatggcctaggaaattaaggcttattaaataaaatttataaatgcagatgagtcaaatacaaagatcagacataactctatcacctaagtaatcattgtttacgttttgcagtttatcttccatttctcccctctaatatgactcttttaaatttagttacacagaaattggttttgcgctcacgacatgcctaacatcaggcctttatccttaaagaagtttcaacactcttgtgtcacctcatgtgtctacagaaaatgtttgcttttatgccttcacggttatgttttcttagtagtagcaataaataaaatagatgcaaagtgctaattacttggaatacagaagcaaattttaattctattaatgggctggacatagatgggtggggagctgttttctgcttttcccctcttcccctagtcctctgactctggtgataactatagtcaacaagtatccccatccttaaccccttttgcttctctttctctttccttctctcaaccttcctggtgttagttttctctttcctatttctgagtgtttttactccgacacttacaataaaaaagtttgaaatcccaaaaagttgacaaatttctaaaggagacagaaaaagagtcaaacttactttacaaattaatttgagaaatagctgtgggttgcattttttttttttattgtgcatgaccctgttattggccaagaaacttgagcagcctgttttggaaagtccctcgctcagaaatgccagcttgctaattgaagggatgtggatccatgaggctcatttgaattccgaagcctctaagagtccatggatttttattttattgggccccaacaggttttgtcttgcattatttaggacattggccaggcaatcactggacagccagtttgctctcctttacattttgtagaatggttatcttatggtcaaaggaaagggagagggcctttggaaaataaagctgtgtatttacaagcagtcatacagaatagttttgtggggaaaataaagaacagttatttaatttgtaatttaatcatttttcttaaaccaacccaaagagcataaaatggaatatttatttatttttgtagcttaatttgtaatttaataatttttcttaagccaacctaacgaacatattgggctgtttattttcatttttaatgggccatatttacatcacaaaggacttgagaagtcttacaaatacaataaaatgataaaatatgaattaagacattagcaaccaggatggaaaaacacaaatttgtaaatgatggccaggtttgcaagcaaaaattaaattgataaatggcagcacccccactaccagctatagttagactgatgaaaaatcctctaatgttcatgcctgaaatacagttaccacccttagcagcaaattagaggcaaagaagttctggaatttggacgttgtctctgagtaagctctttgagacactggacaagtaatttccttctgaatactcttatactgacacataggagaagtgtcagtgtttcaaaggaatctctttgaaggctactacattgctttaggggtgccagattaccagagtaaactgccagtttgagagaataactgtttcttaagagatggtctgaaacctaagtaaggaaatccccccacttgaaagcccctaggaagttaattgcttttggcaaattatcttgggccccaaaagtcccttgatgagcacatgttttgtaataggtactaaagactatttacttatgatgaaaaataaaataacacaatttaaaacttgaaattgataaaaagcaacttgaaaccaaatttaggacagtgaacccatccctttcttatttttaaataggtaaatatagaaaaaatgaccacatgatgtgaaacaaaaagcaaatatttaaaaactacatttatactttatctcaccacactaatgtaaagaattttgattttacttataaattcttagccttgtctacacatatacataattgcatgtttaatttgagctatatatagtctgttttttgttcctttgcatgttacacaaacctttttctatttctacataatttttatctcatattttttattggatacattatagagagagcatttattaaatgagctgggattactataatttttattatttattttttaatttattacttatttttataatttactattgaaaaaaagcatttcttaaatgtactgggatacatatatatatatgactttttcttgttactaaaaaattactcatagaacttacatattaaaattttaggacttgtgatgaaaaataa

SEQ ID NO: 1883951 - DNA, 4001 bp, Homo sapiens; identical to SEQ ID NO: 913668

SEQ ID NO: 1883952 - DNA, 4001 bp, Homo sapiens
gaatccagcagcacatcaaaaagcttatccaccatgatcaagtgggcttcatccctgggatgcaaggctagttcaatatatgcaaatcaataaatgtaaagaataaattttaaatcacttcattttacggctcagaggtctgttttgtggacacagagacagaaatggagacgtttttaaaattaagatcatattgcacattggcttttttttttttatacggagtctcgctctgctgcccaggctggagtgcagtggtgcaatctcggctcactgccagctccgtctcctgggttcacaccattctcccgcctcaggctcctgagtagctgggactacaggtgcctgccaccaaacctggctaattttgtttttgtatttttagtagagacggggtttcaccgtgttagccaggatggtctcgatctcctgacctcgtgatccacccgcatctgcctcccaaagtgctgggattacaggcgtgagccaccgcgctaggctgcatattggctttttaaaatttcacttatcacttaacattatatgatatgcaatttaaatgttcttaaatattcctgaaaaacaagtttatggttgcacagggtttattttctaccaaaaccaaatttgactatcctcctcctagtgttagatattatgttcaacttttcaccataaaaaacaatgcataacttgcaaaaaccaaaaaagaattattggctgcaatattcaaatgaaatgataaaaatcaaaatcaatacatgttgaagtaaatgtctacaaaatacactattatatcaaattaactgttaaatttaattcactattattatttttttaagacagagtctcactatcgcccaggctggagcgcagtgttgccatctctgctcactgcaacctctgcctcccaggttcaagcgattctcctgcctcagcctccctagtagctgggattacaggcgcccaccaccacatctggctaatttttgtatttttagtagagatggggtttcaccctgttcgtcaggctggtctcgatctcctgacctcaggcaatctgcccacctcggcctcccaaagtgcagggattaaaggcgtgagccaccgcgcccggcctgttaaatttaattcataaaattgttttgttacatttgaaagcaatttgtgagttgaatgcttactcatcaggagcattcctgaaaacggacaggacagtgagttgtaagagccaaacgtgaattacaaattgagacagccaaattgcaagagccaagttaatttttaaaaacactttctgtatcttacggcacaacaaaacacttttactacaaaacatgtattgtataacggatgtggctgcgtttgacagtttgagatgacactgaggagtgtgaaagagagcctggaccttcaaagcttgcaaacggcccgggctatttctccacctcttcgctactcaaagcgctggcatcgtttcctgggaacctgtgagaaatgccgagtctcggacccatccagagcgcccgaatggaaacctaggcgttacgaggccccaggttcagcgtctcacgggtcctgcaccacctgggacgccccgcaagcagcgggcatgccgggcccccagaagactccgaaagccacccattccctaaacggggagggcctcgtccgcgcgtcccagcgccctccccggaagccccgccgctcccacacccaggatggggccacatgggcactaaaaggcgggcaggagcgcccagtctcgagatggctggctcgcctttccagtccgggccctcggggtgcccgtgtgaaaagatgtgacactgaagcctggggaagaagtttgaacctctcactaattcacgtaacgggagccgccggcagcgctgacggctgcacctcccctcccacgcggacactacctgcaggatcggacgacccccagaactgtttgccaacaaagacatgcagggggcggagcctgagcgtcagataccgtgagcggcgtgcagagggcggagcctaggagtcagataccgcgagaagtagtctcccgaagaggttcggacaagcgcaggcgcactacaattcccgccctggccgcgaaggtggcacccgcagcgggaggcggggccgggccttcgggacaaagatcgcgagatttaatggcgagtcacagctacttcttcctggcagagaccggaagtgcggtccgcggagcgtctctggcgcttaccctgctttgggcctgcgttgctgctgctgctcctccgctcccccgtcgtatcgcctgccctggatcgaagtgatgggggatgccaaggaggccggagccgagggtccgccggccggggccgccgctcgaggagggctcagcctcctgtcccagggagaatccgaggaatcttctgcacaggtgagtcctccgcggagggggacctgccagggatgtgggagcggaggacccgctccaccggggagggatgccacggttcccggcagattctggaggcttctccatgtttccctgacacccccaaaacagggagttgaagtccatgctccagtcggcaggtattcgtattaaaagcagttctggtagccgacaggtgaattagatacgatctttcctctcaaggagggtacatgtaaatatgtcgttccaaaacgtggcacagtcgtgcaaagcaggagggaagaaacggtgccaggtagtgactcgccgagaatgagaccgaactaattcacaaagggtgtaaaatgtttgccatgcagaagaggtactgcgtgaaaggttagaatattgaacccagacgccgaacttgctttgggagtgtgcaagtgcaggctgtgaggaacgaacccccaatgcctttctatgaagttagagactcaagagtatttgaaccatgcatgcatgcatgaaccgatgcatcgattactaaatatttgcattaaaacaaaaagcccaaatgttctaccagactattttatgaatgatgtgttattaaaattaaaatacatctttggccgggcgcggtggctcacgcctgtaatcctagcactttgggaggccgaggtgggtggatcacctgaggtcggggagttcgagaccagcctggccaacatggcaaaaccctgtctctactaaaaatacaaaaattagccggacgtggtagtgcacgcctgtaattccagctactagggaggctgaggcaggagaatggcgtaaaccccagaagccgaggttgcagtgagccatgattgctccactgcaccctagcctgggcgacaaagcaagactgcgtctcaaaaaaaaaaaaaaaaagaattaaaatacatctttaatactgaaaataggctttactaaagtttgcatctagttaacatgataccattgagtctccttggtttctgcttctccactttacatgaatacattttaaaagagatgtgggtggtccattttctagctgataaccataaccatcatactccttgactcatcttttttctttgaagttggtgtaaaagaactaagtaaatgttaccatttatgctcaaatttattaagtgctgttagtaacatgtggcatacgttccttgtgaagcctggtgtgacaggttcttgttttctttttataaaggtgagatttttcgttcttagtaattttcattaaagtttcacccaatgtgttaattagggatcagctttatttcttggaggcaatgaagtgaagagccgagctgtggtgaaatactcttctgcccctcctcgaacagcatttgcacgccttgaagagaaaacagacttgaaactcccacctgccaactggttacgagagagtgccaaactagggccagcaggaactaccattcttggcaacagcaagaaaagcaagccattttcaaggtaaatattaatcagtggcatttttacctgcccctccaccctcacttaaaactcttatttgcttttaaattcagtttgtaat

SEQ ID NO: 1883953 - DNA, 4001 bp, Homo sapiens
accttggtctccacaaccccttattttaacacagacattcctttccattgattccaggtctttagataataacttatctctttcaacctattgccaattagaaaccctttgaatccacctatgacctggaagtctccctgcactgcccacccccaattcgagttgttctgccttttcagactgaactaatggacaccttacatgtattgatgtctgcctgtaacttctgcccctcaaaaatgtgtaaaatcaagttgtaacccaaccaccttgtgcacatgttctcaggacctcttgagactgtgcctcaggccttgttcactcatatttagctcataataaatcccctcaaatattttccagaatttgactctttttcattaacagctagtataattcagaagtgtttcaattctagtaaataattgggtattacgtggaatacctgggtgacaaaattatctgtacaacacctgtgacacgcaatttactcatgtaagaaatctgcacatttaccccttgagcctaaaatacaagttggaaagaaaaaaaattctagtaaatatgagaaatgtataatattgagaatacattatatattatcatattatatattttatatataataatatatataattttactctataaacttttatatttcttttacttttaactttttgactctgtaataacacttagtttaaaatacaaacacactgtacagctgggtaaaatattttcctcccttatatccttattctatgaacttttttttatttaaaaaaatttttttttttttttaaacttttttgttaaaaactaagatgtacacacattggcctaggcctacacagggttaggatcatcaatatcaccatcttccacattcacattttgttctactggaatgttttcaggggtaataacacacttgaaactatcttcttctatgataacaatgccttcttctggaataactcctaaaggacctgtttaaggctgttttacagctaaccttttttttttttttccaactgcctttttcctgaggctaaagctagtcaagttgactctgaagaaaaatcaccacgacagcttacatttggaaaaactttgtacatgcaaactacaaacaagaaaaatatgtcagattccttcactaaggaggtaatgggatctcatagcctaatacacagtaaatgattaacaaagaaatgcttttttttctgacacattaaattttcttgttttttgttttttttttgagacaggctctggctatgttgcccagggtggagtgcaatggcatgatcttggctcactgcaaccttcgcctcccaggctcaaaccatcctcccacctcaccctcccaaggagctgggactacaggtgcacaccactacacctggctaacttttgtatttttggtagagacgtggcttcaccatgttttccaggctggtcttgaactcctgggctcaagcaatcgtaccacctcagcctcccaaaacaccgggattacaggcatgagccaccaagcccagctaggacacattaaattttaaaaaatgtttattacaaattcaaaaagatcttataataaaaaaactcaccctttcacatctccaggcctgctttccaggggcaactattcttataatttgtttttagtatttttggcaattactataccaaatactataaatactatatctttaaatgatatgctcctcctaatattatttcttcatgtatcaattatagatatctatttacttcctacaaagacagacaatcacttagctctagttacatatattttttcctgtactggttacctttgcacactgaaataatatgcttaaacttctacatcctgttgtctcatttcttgatttgcactttgttaagattttggtattatagacataagactcaatccttttctttcttctcttcctacactcttccttccatacctctgctgagcaaaacctaggccttacagaatataattctagctcttctttagcatgtcatatagggccctttatgatctagcctctgcctacttttcttatctcctgccattatccacttcagctaatgttcacagtcatgctgaagtaggtatttagtttttggaatcttttgtgaactcttgttctttttatcattgtctcacagccttccatggcctggaatagcctcctcctgtaattcactggcaaatcccaatcattttcttcagcctacatgctacattacgaaatcttccctagtagacatcccttattacatcaaaaagtatttattgagtacttgtttttgtgcaaggtacggttttagatgttggggctatagaggaccaagatagtaacgagtttgcattctaatgacttaacaaacagatttaataaatattcctaccactatgaaacctactatgtaccaggattatactaaataacttacatatgctattttaatccttacaacaattttatgagccctataagtggctgggcttatactcaatctcaagtctgacttcacagccattacttttaagctatgctcactctgctcccattattccttgttcatttctattacaacatttgtcatgttttgaaatactttgcatatggatttccccatatgaaccacaggagataaaaaaattattttcaggacggtgtagaaccagtgccattctagatgtatatgaaagaagttaatacattatatacaatgggtgcctaaaggcattagggattaattgtctcttgaaatcccaggttgagaagggctactttagatgaaggcctcttaagagcctctcaagggtagagacatctgtcacttagtgggtggctgataaatttttgttgaacttgttatttaaacctttgcaattaatacatactcaaaagtattattttggggttgaaaagtcagctgcttcagtcttgcttctagagatggctttgcaggtggagttaagcacttagtattttcttaagagaattccaggggtgttggatccaaactttgagaggccaaagaatgcacagactctgaagccggatcacccagattcaaattccagtctctctgtttgttatataaattgaagcaagttattatttaacatatgccagatacttttataaatactttacactactacctgatttaatcttcaacacttctatttagtagatacctttactatttccttactagctccatgcctcagtttcctcttctattaattggctgtaacaacaacaaattgccttacagagttactgttaggattaaatgagtataaagtgctaagaatactacctggcataaagaaagttagctattactaacagtagagactgtggccagggcagaaaaatcagcttgatgtaacttaccaaatttttcattttatgttaatattcatttcaagggcacagatggaattctttggaatgggtactaaatcttaagcacttcccaatcaagctggctctgcatctccctaagggaaaaacccagcagctggtgctgaaatgaaaaacgtcggaaaaagtacctttaaaatctggatacttttctgcaactcctctgccatcttccaagtccacattatcattatcttttcctgggatctcttgcaacagcctcctaactggttcaacagcatcctccctggctgcctctagtttctccaggagattaaccttttcaaaagatagatgcacattggattgcaccatgcccatgcttaaaactggttatccagtaagcatttcgtaatactcaagtcagtaacttggctaaggcttacagggtctggccttggcccatgcctacagattcactcccctgactcctccccatggtctctacccagccacatcagctttcattcattgttcaacaaatattgatttgcttgtcttgtgttagagagtcattgaggatacattagcgaccaa

SEQ ID NO: 1883954 - DNA, 4001 bp, Homo sapiens
cagactcatttgaatctctcaactagcctatatattgggatctagacccagatttctcagtgcttattagacaagtgcacctgaaagcaacacatgtacctccacttcacacatgcagtgccacactcatcttcctcccctcactcaccctcacttcccctcctcattcttcctaaaacactcctcccctcgcattggctcaccccaccattaacctgccaagggccacatttggagtggtccagctctcccccatctggtttctaagatgtgaacattccccatcaagaacagctcctcagtgccccctcccctccacctcctctctcactgccagtgacccgctgggccgtggcaagctctggttaccttggctcgctggaccctgtctgcacccttcttggtccaccccatcatggctgccagtgaattggtctaagacaaaaactgaacatgcaacattcttgatttgaagtctccaatgcttcccatcacctaagacccaaacccatggcaccccaggtctgtaccacctgccctcccctttctttccaatgtgatttcccacatttctccccacaacaccatatacccttgtcgccctaagtgtgattcaagaaccagcagatagacatcacctggaagcttctcagaaatgccaagctcccattcagggcatgtggccctgccttcatcttcctgttgcacctgtcactcagcacctggcccaggatcccagagggacaattcctacctgcttaagctgccaagaggccagccaagtaccctctctacccatgctcattagcaaaggtctaaatatcagaaggtgccaataaattatggctctgttctcaagataggtcaaccaaagtcactaatataagcaaatttcaccagacaccagaaaaacgctttgggaaagaaagcgaaaagtggccagaacattgccccaagcttgctggaagggccttcaggaatccctcctgtctctgttgactttttagttgccaaaagagggtgatgccagctctgtggctcaggacacagaggcagttagaggctcctaacctcaggcagaggactcggcacagtgggataacatcgagtcactgcggggcagggaataaaggggacataaaggatgaatggctctgttcttggcaccctgaattcctacctcattgtgaggaaaagaatcccaggacactctgacccacgccccggtgggtacaacacagggtgagggggaatggcatgaacagggaatggagtggggtcatcccatgcaaacgtagggaggtaagaaggcccatggacacagggccagcggggctggggcagccagagccaggctagagcagtctcttcactccatcttctccattccgctgtctgattccagaattcaggcaagccaccagtaagtttctaaggctatctatggggggtgagattttttttactcagaaacatctatctgctatctcctgggtttcacatccccatagaaaagtgagggtaagaagaaatggaagagaaaaaaaaaaactaacaaagaaaaagtcttgtttcctgcctgcctccctcccacccagaggcgatttcagcttctgatgttgttcaggaaagttccggaaggaggggaagctggtcagcaacagtccactcacctgcccaggacccttcaggcactgcacagcctgcttgtgggtgaggccgcacagaatcactccatccacctgcaggagtcggtcacctgggaaagggatagatgtcatgtcatgacctggtgcttgaggctgcaggaggttcccttccaggaggcccctgcccggcacccctccatgcagcctggagaagtgggaaaggaagctgaggtgccaggtgtccccctggagtcagcaggaatcctgcctctctgagcagtctcactcccttcttctcaggcacatcacagatcagggatataaaagcctttctattattggctcacagaatggttgagccagctctgttcaaccttatccttcctcctgttttcctgtgaaaccgtttttgaaagtattttcaagtcacttagatatttatatctccaggatgtattttttttatttcaaaaaaaggtcagggaggcatggttgacgctggggacaccagaattctaggggaaatggagataagtaagatcctaggttccccttttggctcaattctggcagttttggagaccaataaaaatcacccccttccatcagagaagtgggagctgagcaagggcaaacagaaggctcaggtgtcctccccggatgtgcgagtgagtttaccgaggcccacttgtcctccaagggaagcagtatgttttcccatggaggccaaagagcaacacaagtcttttaagtcttctactatttttctatcacctatgcttcccagtgtgccactgcagaccccccaacctatcaaatgggcagggcagattctatcacctcctttccaggtgagaaaagtatgacctggggaggcaatcatttgcatgagttttcagaatgggagcagggcaaggcctagaggctgcccctcccagtgcagggctctttacaccatggagcacagagttcccaatgaggacccatccccatctctcaccctgtaggatctgcccttccttggcagctggtcctccaggaacaatggatttcacatagataccaccatatggcacactggtgttaatgccaccctgaaaaacacaacaaaaagctcaccacccatctttcctcctccaggaagcctccccaacctccccagctaagggaatccccacctgcccaccactctatcccatgaccttacctccgactggcactgtcttctgtattcacctgtttgtttagattgtattctccactgagcaataagattaggtgttcataagcttaacaatagcaactatgtgagagatctgggcatgtccccagcccaagcactggtacaaggcgggtgctcagcaactgctcacgtgggatgcaccactatctctatataggtagtgaccagcgtaggtggatatggctgtgggcctgaaggcttgtgcctggcacgtcttgtgtgctttgatgggccaaaggatatgtgcatttttcattataatagatgttgccagattgcatccctatgtgaatatggatatacttattcacatttctaccagctttgtatgacagtaccatttttctacgttccaccagctgtatttggccaagctggtagacataaagtttaaaattttattttaatttaatttgtattcctgtggcttttcacgggtttgagtgtttttcatgtgtttaatggccatttggatttgagtgagacatttcaagaattatttttgaaattaaatatctgcaaagaaaatccaagtttttgccagccaaaggaaatcatcaaactcttctcagcaaatatatatttgtgaataacccaaaatttagtcagtttttcagatgaaaaatagctatgtttggtgtctgataaggctgttaccccaagccaagaataaatggaccatatttggtatcagcctgttcactccatgtggattcatgagccttattgcttggtttcttacttggtcccttaaaatcatctactgatgacaaattcattgcaggcttagggtccaagaaaacacatatccttgctctaggtacatagcattatcacaggggaaagcaaagaatgccctccattcacatatctcttgaatttcctctgaaaattttcatcagccatagagtgtccttactttggtgggagatgccattctatttcccatcaacagttaaatccaacaatgacattcctgaaatccagacccattccagggtctgaaggtaatggatcactttttttttttttttttttttgagacggagtctcactctgtcgcccaggctggagtgcagtgttgtgatctcggctcactgcaaactcca

SEQ ID NO: 1883955 - DNA, 4001 bp, Homo sapiens
gattgatcgagctggaatgggaagggacttctcctcccccaggcccagctcgccagggcctcgggccgtgctgcagtttctggcctttggtgtcgctccccgccccccagccccgcagattcccggcttcttttctgtctgcgcggccgggaccgcccaggcaggcgccggggctccggggctccggggggagggactcggcggctcggctcggctccgcttctttcttctgcctgcaaatatttgctgcctcgctggaaatccgacgatttcgcgcgcgctctgcttgcaaagtctttaagtaaacacgctcaaatgaccgccccgggcggcccgaggcacgctctctccccctccgcgggattagtaactttaggacttcgaccccggggctccgctttgcctgttacccaggtcgggcagcgcgcgggcgcccggggccgcttctcccggcacctcggccccgcggagctcgcctggaagcgccggttgcctggctctggtgggtggcccggccgcgagcatctccgcgccctgggtctgtagccctagggctgagccccagaaagccgcgcctccgctctgcgccatggcctctgctttctgtacccgactgggtttccccacttccactgggacagggtctcttcgcccctgggagggcgggtgggagggacttgcacgtgggcatgtgtttgggggtgtgtgtggtagcttaacccctaccgagtggagaaagtccggctccatttctcacctttttcccaagaggacacacataccccgctcaacttgacgcctaaagcagccgcttccaggcctggggtttcggataggccaagccggctgctgccgacccgcacgccgccccgggccccggctcctctctaggcggtggccgcgccgtcgcctgctcggctgcgggatgcttgctcccaaggtcccaggcgtccaggttgatcgccagccccttaccctggtgagggaggccttgcgccctgcagaagccccgggccctgcggcggcggcggcggcatcctcctggtcgcctcctcgctttcctccacccgagctccgccggctgctccttgggaggaaggggactcgctagaccaggccgaggcccaggtacctgggagggggtcgcgtcaggtctgcgggaaggcgctcaggcttctccgcaggaggccaggatcagctttgtggcggtggcacagggagaatcaggaccacctttcccccttacccccggccaggatccccctttccctcccccgcccgccaagggaggaggaagcccggcctgctcttgccggcgaggcgggtcaggccggcgcctggcctggcccggacccccgcagcccggctctccgcctcaggccacgcgccgcagcctctccagcctcgctcccttcccccttccttccccgtgggtcccgaggccgacctcggccctccctcctcggcatccccctcccatccttttcccttccccgctgccctgtgctccgggctccggggctgggcccgtgacgtcaaacccagtgtggcgtcggcgagactggccggcgcgggccatcaaaagagcaacgtcctctctcccaattacccactgtcagtccgggaactggggcgggccggctgggaattaaatgctaaataccccctaccggctggctccattacccgggacatccagccccaggccccccacccctctctgccagcctcaaaccacccagaccaagaagggccttcgagatcttttatttttctaaaggtgggggttgcccttctccatccccggccagtccgacttggtgctcgcgattgaatttaaacgaataatccctacttccccatccaaaattagcggataggcgcccttgcaccggaaggcctcctcaccagtcttttctttttgtctttgaaataattcttagcctcagaagtcagcattttcaagacctggcatccgcagcgtttctgacgcggggacttctctcttcggctctgaggtctccgcgcgcagaacccatggcagcttttggtcttacgcgtggctgtgagctgggctcacgctgcgtggcgcatccacccctcgattgacgcgcggagaagcatttttcattttttctttcagcttgtatccttaaatcttaatcccgggcttcttagcaaaaatgcgtgtgcattcgtttctccttgtttatggagaggtttccggtgaatgttagacagcaactaaataattaaaaggtttagagagcgctgtgagcaggagaagatgcgggcagcctggctggcccaggagagacgagtggtcagagaatgaaaggaaaatcgatgcctcttaactgggccgcctaataacgggagaccaagtgggctcaggagaaacgtggcggggggggggggagctttctttaaaaaattggggttctttctttctgtcctatatatggaaattcagccctgatttcaaacaaacatcagatttaagaaggtgaggactccaaagaagatccaaacgcgagaccaggaagattcacgtttccactacttcttccaatacatttcactaatctttctacagggatagtgttttaaaacacgacgaccctcacacaccaaggtgaagttgaatattgttgttgttccttcaccgcatgaaaggaatccttcagaacttactttcagggacggcttcttctatctcgaatttttgcatttgtagggaattttatggggtagaggagcgaagagggaacaatgtctccaattcaaataaaaccccaaattaagctctcagccccatcggtgggatagcctgcgggggaacccactccctctcctggcagcattgccctgggggcgagcagagagtggatttggagtcttcttttcccgcctgacccctgctcgcccgagcagcattttcgggccagcggctgcagccacccgggcgccgctaggggatgcagtggctcaaaggaccgagcgggcggtgcaggttggaacccgcggggcggaccaatcgcggctcggccacagcctcgcccgctgattggtccctccaggccccgcccccgctcgccccgcccctctcgctggggcgcctcggagccgcgtgccctccgccccggggtgcccattgcgcagagcgtggcctggagacccgcgagccggggaaggtcgccgtggagtcccgaccagaggccggggttggggtcggtgcagaccgagggctggtttccttgactgtgggagaaacgccgggagccggagtaagtagggctccgggcggggcgaaaggaaaagttgggtccctagagtgaagaccgagttctttctgtccgtctacactgagcgtactcggggaatgagttagagccagtctcttcctcccctccccccttctcatccctcactgttgccactcaagtcaaaagcacacattgattacaaatattaggtctggaaagggcagctgcaacagctgaagcgtgttcactctgggggcttgagagcgcagaaggctcgggaaagaggtgacaatgacaacaaaattgacgcggacgctccagtcaaaggcatctcccctttatccgatgactcaccctcttaggaagtcggcccgagaggcaaatctcaaaataccttgacatgaaacattttgtttttctgatcaatttaacgcgcacgtttccccacatcgatgcgctctcccaaacaccctgcattagatcctaataatgatccatgcgtgcctattttttaaaagtctgaaaaagaaaattctgcccatcgaaatgaacttcatgaatggggcaggctggctgcaccgggacggaatcgtccacccgacccgaatgaattggcaggagccgcggccacatttaaagggccagagcgcgcgttccctcccgtccgcccccaagccccgcgggcctcgcccaccctgcccgccgcccctccgccggcggccgccctctgcggcg

SEQ ID NO: 1883956 - DNA, 4001 bp, Homo sapiens
gatcgagctggaatgggaagggacttctcctcccccaggcccagctcgccagggcctcgggccgtgctgcagtttctggcctttggtgtcgctccccgccccccagccccgcagattcccggcttcttttctgtctgcgcggccgggaccgcccaggcaggcgccggggctccggggctccggggggagggactcggcggctcggctcggctccgcttctttcttctgcctgcaaatatttgctgcctcgctggaaatccgacgatttcgcgcgcgctctgcttgcaaagtctttaagtaaacacgctcaaatgaccgccccgggcggcccgaggcacgctctctccccctccgcgggattagtaactttaggacttcgaccccggggctccgctttgcctgttacccaggtcgggcagcgcgcgggcgcccggggccgcttctcccggcacctcggccccgcggagctcgcctggaagcgccggttgcctggctctggtgggtggcccggccgcgagcatctccgcgccctgggtctgtagccctagggctgagccccagaaagccgcgcctccgctctgcgccatggcctctgctttctgtacccgactgggtttccccacttccactgggacagggtctcttcgcccctgggagggcgggtgggagggacttgcacgtgggcatgtgtttgggggtgtgtgtggtagcttaacccctaccgagtggagaaagtccggctccatttctcacctttttcccaagaggacacacataccccgctcaacttgacgcctaaagcagccgcttccaggcctggggtttcggataggccaagccggctgctgccgacccgcacgccgccccgggccccggctcctctctaggcggtggccgcgccgtcgcctgctcggctgcgggatgcttgctcccaaggtcccaggcgtccaggttgatcgccagccccttaccctggtgagggaggccttgcgccctgcagaagccccgggccctgcggcggcggcggcggcatcctcctggtcgcctcctcgctttcctccacccgagctccgccggctgctccttgggaggaaggggactcgctagaccaggccgaggcccaggtacctgggagggggtcgcgtcaggtctgcgggaaggcgctcaggcttctccgcaggaggccaggatcagctttgtggcggtggcacagggagaatcaggaccacctttcccccttacccccggccaggatccccctttccctcccccgcccgccaagggaggaggaagcccggcctgctcttgccggcgaggcgggtcaggccggcgcctggcctggcccggacccccgcagcccggctctccgcctcaggccacgcgccgcagcctctccagcctcgctcccttcccccttccttccccgtgggtcccgaggccgacctcggccctccctcctcggcatccccctcccatccttttcccttccccgctgccctgtgctccgggctccggggctgggcccgtgacgtcaaacccagtgtggcgtcggcgagactggccggcgcgggccatcaaaagagcaacgtcctctctcccaattacccactgtcagtccgggaactggggcgggccggctgggaattaaatgctaaataccccctaccggctggctccattacccgggacatccagccccaggccccccacccctctctgccagcctcaaaccacccagaccaagaagggccttcgagatcttttatttttctaaaggtgggggttgcccttctccatccccggccagtccgacttggtgctcgcgattgaatttaaacgaataatccctacttccccatccaaaattagcggataggcgcccttgcaccggaaggcctcctcaccagtcttttctttttgtctttgaaataattcttagcctcagaagtcagcattttcaagacctggcatccgcagcgtttctgacgcggggacttctctcttcggctctgaggtctccgcgcgcagaacccatggcagcttttggtcttacgcgtggctgtgagctgggctcacgctgcgtggcgcatccacccctcgattgacgcgcggagaagcatttttcattttttctttcagcttgtatccttaaatcttaatcccgggcttcttagcaaaaatgcgtgtgcattcgtttctccttgtttatggagaggtttccggtgaatgttagacagcaactaaataattaaaaggtttagagagcgctgtgagcaggagaagatgcgggcagcctggctggcccaggagagacgagtggtcagagaatgaaaggaaaatcgatgcctcttaactgggccgcctaataacgggagaccaagtgggctcaggagaaacgtggcggggggggggggagctttctttaaaaaattggggttctttctttctgtcctatatatggaaattcagccctgatttcaaacaaacatcagatttaagaaggtgaggactccaaagaagatccaaacgcgagaccaggaagattcacgtttccactacttcttccaatacatttcactaatctttctacagggatagtgttttaaaacacgacgaccctcacacaccaaggtgaagttgaatattgttgttgttccttcaccgcatgaaaggaatccttcagaacttactttcagggacggcttcttctatctcgaatttttgcatttgtagggaattttatggggtagaggagcgaagagggaacaatgtctccaattcaaataaaaccccaaattaagctctcagccccatcggtgggatagcctgcgggggaacccactccctctcctggcagcattgccctgggggcgagcagagagtggatttggagtcttcttttcccgcctgacccctgctcgcccgagcagcattttcgggccagcggctgcagccacccgggcgccgctaggggatgcagtggctcaaaggaccgagcgggcggtgcaggttggaacccgcggggcggaccaatcgcggctcggccacagcctcgcccgctgattggtccctccaggccccgcccccgctcgccccgcccctctcgctggggcgcctcggagccgcgtgccctccgccccggggtgcccattgcgcagagcgtggcctggagacccgcgagccggggaaggtcgccgtggagtcccgaccagaggccggggttggggtcggtgcagaccgagggctggtttccttgactgtgggagaaacgccgggagccggagtaagtagggctccgggcggggcgaaaggaaaagttgggtccctagagtgaagaccgagttctttctgtccgtctacactgagcgtactcggggaatgagttagagccagtctcttcctcccctccccccttctcatccctcactgttgccactcaagtcaaaagcacacattgattacaaatattaggtctggaaagggcagctgcaacagctgaagcgtgttcactctgggggcttgagagcgcagaaggctcgggaaagaggtgacaatgacaacaaaattgacgcggacgctccagtcaaaggcatctcccctttatccgatgactcaccctcttaggaagtcggcccgagaggcaaatctcaaaataccttgacatgaaacattttgtttttctgatcaatttaacgcgcacgtttccccacatcgatgcgctctcccaaacaccctgcattagatcctaataatgatccatgcgtgcctattttttaaaagtctgaaaaagaaaattctgcccatcgaaatgaacttcatgaatggggcaggctggctgcaccgggacggaatcgtccacccgacccgaatgaattggcaggagccgcggccacatttaaagggccagagcgcgcgttccctcccgtccgcccccaagccccgcgggcctcgcccaccctgcccgccgcccctccgccggcggccgccctctgcggcgcccc

SEQ ID NO: 1883957 - DNA, 4001 bp, Homo sapiens
gctcccaaggtcccaggcgtccaggttgatcgccagccccttaccctggtgagggaggccttgcgccctgcagaagccccgggccctgcggcggcggcggcggcatcctcctggtcgcctcctcgctttcctccacccgagctccgccggctgctccttgggaggaaggggactcgctagaccaggccgaggcccaggtacctgggagggggtcgcgtcaggtctgcgggaaggcgctcaggcttctccgcaggaggccaggatcagctttgtggcggtggcacagggagaatcaggaccacctttcccccttacccccggccaggatccccctttccctcccccgcccgccaagggaggaggaagcccggcctgctcttgccggcgaggcgggtcaggccggcgcctggcctggcccggacccccgcagcccggctctccgcctcaggccacgcgccgcagcctctccagcctcgctcccttcccccttccttccccgtgggtcccgaggccgacctcggccctccctcctcggcatccccctcccatccttttcccttccccgctgccctgtgctccgggctccggggctgggcccgtgacgtcaaacccagtgtggcgtcggcgagactggccggcgcgggccatcaaaagagcaacgtcctctctcccaattacccactgtcagtccgggaactggggcgggccggctgggaattaaatgctaaataccccctaccggctggctccattacccgggacatccagccccaggccccccacccctctctgccagcctcaaaccacccagaccaagaagggccttcgagatcttttatttttctaaaggtgggggttgcccttctccatccccggccagtccgacttggtgctcgcgattgaatttaaacgaataatccctacttccccatccaaaattagcggataggcgcccttgcaccggaaggcctcctcaccagtcttttctttttgtctttgaaataattcttagcctcagaagtcagcattttcaagacctggcatccgcagcgtttctgacgcggggacttctctcttcggctctgaggtctccgcgcgcagaacccatggcagcttttggtcttacgcgtggctgtgagctgggctcacgctgcgtggcgcatccacccctcgattgacgcgcggagaagcatttttcattttttctttcagcttgtatccttaaatcttaatcccgggcttcttagcaaaaatgcgtgtgcattcgtttctccttgtttatggagaggtttccggtgaatgttagacagcaactaaataattaaaaggtttagagagcgctgtgagcaggagaagatgcgggcagcctggctggcccaggagagacgagtggtcagagaatgaaaggaaaatcgatgcctcttaactgggccgcctaataacgggagaccaagtgggctcaggagaaacgtggcggggggggggggagctttctttaaaaaattggggttctttctttctgtcctatatatggaaattcagccctgatttcaaacaaacatcagatttaagaaggtgaggactccaaagaagatccaaacgcgagaccaggaagattcacgtttccactacttcttccaatacatttcactaatctttctacagggatagtgttttaaaacacgacgaccctcacacaccaaggtgaagttgaatattgttgttgttccttcaccgcatgaaaggaatccttcagaacttactttcagggacggcttcttctatctcgaatttttgcatttgtagggaattttatggggtagaggagcgaagagggaacaatgtctccaattcaaataaaaccccaaattaagctctcagccccatcggtgggatagcctgcgggggaacccactccctctcctggcagcattgccctgggggcgagcagagagtggatttggagtcttcttttcccgcctgacccctgctcgcccgagcagcattttcgggccagcggctgcagccacccgggcgccgctaggggatgcagtggctcaaaggaccgagcgggcggtgcaggttggaacccgcggggcggaccaatcgcggctcggccacagcctcgcccgctgattggtccctccaggccccgcccccgctcgccccgcccctctcgctggggcgcctcggagccgcgtgccctccgccccggggtgcccattgcgcagagcgtggcctggagacccgcgagccggggaaggtcgccgtggagtcccgaccagaggccggggttggggtcggtgcagaccgagggctggtttccttgactgtgggagaaacgccgggagccggagtaagtagggctccgggcggggcgaaaggaaaagttgggtccctagagtgaagaccgagttctttctgtccgtctacactgagcgtactcggggaatgagttagagccagtctcttcctcccctccccccttctcatccctcactgttgccactcaagtcaaaagcacacattgattacaaatattaggtctggaaagggcagctgcaacagctgaagcgtgttcactctgggggcttgagagcgcagaaggctcgggaaagaggtgacaatgacaacaaaattgacgcggacgctccagtcaaaggcatctcccctttatccgatgactcaccctcttaggaagtcggcccgagaggcaaatctcaaaataccttgacatgaaacattttgtttttctgatcaatttaacgcgcacgtttccccacatcgatgcgctctcccaaacaccctgcattagatcctaataatgatccatgcgtgcctattttttaaaagtctgaaaaagaaaattctgcccatcgaaatgaacttcatgaatggggcaggctggctgcaccgggacggaatcgtccacccgacccgaatgaattggcaggagccgcggccacatttaaagggccagagcgcgcgttccctcccgtccgcccccaagccccgcgggcctcgcccaccctgcccgccgcccctccgccggcggccgccctctgcggcgcccctttccggtcagtggaggggcgggaggaggggcgggggtgcgcggggcggggggagaagtcctggagcgggtttgggttgcagtttccttgtgccggggatcctgtcccctactcgccagcgccaggctcctcccccccggcgcggatgacactagaacctccttaagttgcgtcgcgccacagctgtctgcgaacactgagctgcctggcgccgtcttgatactttcagaaagaatgcattccctgtaaaaaaaaaaaaaaaatactgagagagggagagagagagagaagaagagagagagacggagggagagcgagacagagcgagcaacgcaatctgaccgagcaggtcgtacgccgccgcctcctcctcctctctgctcttcgctacccaggttggtactggtgactttttttttttttaagtttgattttttgcccccaaccacttgggaggacctaaatcaattttaaaaactcaactctcctcttttggaggttttctaggggctgagaggacggtcccgggaccggtgtccccgagggagggacttgccctccaagtcgtaacagtcagccctgggacttgccctccaagttgctcagccagccccggctcccgcgagccgggctgcagggacgtccccgagagccctgcgggctccgcggccgtgtccccgcgctcccgtgcgggtctcgggtgcgctgggcgggcgggcggcgcgaggggaggttgtgccactccagcaactcaggggctcatccaggtctcccattctctcccttgcaggtgacccgaggagggactccgcctccgagcggctgaggaccccggtgcagaggagcctggctcgcagaattgcagagtcgtcgcccctttttacaacctggtcccgttttattctgccgtacccagtttttggattt

SEQ ID NO: 1883958 - DNA, 4001 bp, Homo sapiens
gatcgccagccccttaccctggtgagggaggccttgcgccctgcagaagccccgggccctgcggcggcggcggcggcatcctcctggtcgcctcctcgctttcctccacccgagctccgccggctgctccttgggaggaaggggactcgctagaccaggccgaggcccaggtacctgggagggggtcgcgtcaggtctgcgggaaggcgctcaggcttctccgcaggaggccaggatcagctttgtggcggtggcacagggagaatcaggaccacctttcccccttacccccggccaggatccccctttccctcccccgcccgccaagggaggaggaagcccggcctgctcttgccggcgaggcgggtcaggccggcgcctggcctggcccggacccccgcagcccggctctccgcctcaggccacgcgccgcagcctctccagcctcgctcccttcccccttccttccccgtgggtcccgaggccgacctcggccctccctcctcggcatccccctcccatccttttcccttccccgctgccctgtgctccgggctccggggctgggcccgtgacgtcaaacccagtgtggcgtcggcgagactggccggcgcgggccatcaaaagagcaacgtcctctctcccaattacccactgtcagtccgggaactggggcgggccggctgggaattaaatgctaaataccccctaccggctggctccattacccgggacatccagccccaggccccccacccctctctgccagcctcaaaccacccagaccaagaagggccttcgagatcttttatttttctaaaggtgggggttgcccttctccatccccggccagtccgacttggtgctcgcgattgaatttaaacgaataatccctacttccccatccaaaattagcggataggcgcccttgcaccggaaggcctcctcaccagtcttttctttttgtctttgaaataattcttagcctcagaagtcagcattttcaagacctggcatccgcagcgtttctgacgcggggacttctctcttcggctctgaggtctccgcgcgcagaacccatggcagcttttggtcttacgcgtggctgtgagctgggctcacgctgcgtggcgcatccacccctcgattgacgcgcggagaagcatttttcattttttctttcagcttgtatccttaaatcttaatcccgggcttcttagcaaaaatgcgtgtgcattcgtttctccttgtttatggagaggtttccggtgaatgttagacagcaactaaataattaaaaggtttagagagcgctgtgagcaggagaagatgcgggcagcctggctggcccaggagagacgagtggtcagagaatgaaaggaaaatcgatgcctcttaactgggccgcctaataacgggagaccaagtgggctcaggagaaacgtggcggggggggggggagctttctttaaaaaattggggttctttctttctgtcctatatatggaaattcagccctgatttcaaacaaacatcagatttaagaaggtgaggactccaaagaagatccaaacgcgagaccaggaagattcacgtttccactacttcttccaatacatttcactaatctttctacagggatagtgttttaaaacacgacgaccctcacacaccaaggtgaagttgaatattgttgttgttccttcaccgcatgaaaggaatccttcagaacttactttcagggacggcttcttctatctcgaatttttgcatttgtagggaattttatggggtagaggagcgaagagggaacaatgtctccaattcaaataaaaccccaaattaagctctcagccccatcggtgggatagcctgcgggggaacccactccctctcctggcagcattgccctgggggcgagcagagagtggatttggagtcttcttttcccgcctgacccctgctcgcccgagcagcattttcgggccagcggctgcagccacccgggcgccgctaggggatgcagtggctcaaaggaccgagcgggcggtgcaggttggaacccgcggggcggaccaatcgcggctcggccacagcctcgcccgctgattggtccctccaggccccgcccccgctcgccccgcccctctcgctggggcgcctcggagccgcgtgccctccgccccggggtgcccattgcgcagagcgtggcctggagacccgcgagccggggaaggtcgccgtggagtcccgaccagaggccggggttggggtcggtgcagaccgagggctggtttccttgactgtgggagaaacgccgggagccggagtaagtagggctccgggcggggcgaaaggaaaagttgggtccctagagtgaagaccgagttctttctgtccgtctacactgagcgtactcggggaatgagttagagccagtctcttcctcccctccccccttctcatccctcactgttgccactcaagtcaaaagcacacattgattacaaatattaggtctggaaagggcagctgcaacagctgaagcgtgttcactctgggggcttgagagcgcagaaggctcgggaaagaggtgacaatgacaacaaaattgacgcggacgctccagtcaaaggcatctcccctttatccgatgactcaccctcttaggaagtcggcccgagaggcaaatctcaaaataccttgacatgaaacattttgtttttctgatcaatttaacgcgcacgtttccccacatcgatgcgctctcccaaacaccctgcattagatcctaataatgatccatgcgtgcctattttttaaaagtctgaaaaagaaaattctgcccatcgaaatgaacttcatgaatggggcaggctggctgcaccgggacggaatcgtccacccgacccgaatgaattggcaggagccgcggccacatttaaagggccagagcgcgcgttccctcccgtccgcccccaagccccgcgggcctcgcccaccctgcccgccgcccctccgccggcggccgccctctgcggcgcccctttccggtcagtggaggggcgggaggaggggcgggggtgcgcggggcggggggagaagtcctggagcgggtttgggttgcagtttccttgtgccggggatcctgtcccctactcgccagcgccaggctcctcccccccggcgcggatgacactagaacctccttaagttgcgtcgcgccacagctgtctgcgaacactgagctgcctggcgccgtcttgatactttcagaaagaatgcattccctgtaaaaaaaaaaaaaaaatactgagagagggagagagagagagaagaagagagagagacggagggagagcgagacagagcgagcaacgcaatctgaccgagcaggtcgtacgccgccgcctcctcctcctctctgctcttcgctacccaggttggtactggtgactttttttttttttaagtttgattttttgcccccaaccacttgggaggacctaaatcaattttaaaaactcaactctcctcttttggaggttttctaggggctgagaggacggtcccgggaccggtgtccccgagggagggacttgccctccaagtcgtaacagtcagccctgggacttgccctccaagttgctcagccagccccggctcccgcgagccgggctgcagggacgtccccgagagccctgcgggctccgcggccgtgtccccgcgctcccgtgcgggtctcgggtgcgctgggcgggcgggcggcgcgaggggaggttgtgccactccagcaactcaggggctcatccaggtctcccattctctcccttgcaggtgacccgaggagggactccgcctccgagcggctgaggaccccggtgcagaggagcctggctcgcagaattgcagagtcgtcgcccctttttacaacctggtcccgttttattctgccgtacccagtttttggatttttgtcttccccttcttctctttgctaa

SEQ ID NO: 1883959 - DNA, 4001 bp, Homo sapiens
gcgccctgcagaagccccgggccctgcggcggcggcggcggcatcctcctggtcgcctcctcgctttcctccacccgagctccgccggctgctccttgggaggaaggggactcgctagaccaggccgaggcccaggtacctgggagggggtcgcgtcaggtctgcgggaaggcgctcaggcttctccgcaggaggccaggatcagctttgtggcggtggcacagggagaatcaggaccacctttcccccttacccccggccaggatccccctttccctcccccgcccgccaagggaggaggaagcccggcctgctcttgccggcgaggcgggtcaggccggcgcctggcctggcccggacccccgcagcccggctctccgcctcaggccacgcgccgcagcctctccagcctcgctcccttcccccttccttccccgtgggtcccgaggccgacctcggccctccctcctcggcatccccctcccatccttttcccttccccgctgccctgtgctccgggctccggggctgggcccgtgacgtcaaacccagtgtggcgtcggcgagactggccggcgcgggccatcaaaagagcaacgtcctctctcccaattacccactgtcagtccgggaactggggcgggccggctgggaattaaatgctaaataccccctaccggctggctccattacccgggacatccagccccaggccccccacccctctctgccagcctcaaaccacccagaccaagaagggccttcgagatcttttatttttctaaaggtgggggttgcccttctccatccccggccagtccgacttggtgctcgcgattgaatttaaacgaataatccctacttccccatccaaaattagcggataggcgcccttgcaccggaaggcctcctcaccagtcttttctttttgtctttgaaataattcttagcctcagaagtcagcattttcaagacctggcatccgcagcgtttctgacgcggggacttctctcttcggctctgaggtctccgcgcgcagaacccatggcagcttttggtcttacgcgtggctgtgagctgggctcacgctgcgtggcgcatccacccctcgattgacgcgcggagaagcatttttcattttttctttcagcttgtatccttaaatcttaatcccgggcttcttagcaaaaatgcgtgtgcattcgtttctccttgtttatggagaggtttccggtgaatgttagacagcaactaaataattaaaaggtttagagagcgctgtgagcaggagaagatgcgggcagcctggctggcccaggagagacgagtggtcagagaatgaaaggaaaatcgatgcctcttaactgggccgcctaataacgggagaccaagtgggctcaggagaaacgtggcggggggggggggagctttctttaaaaaattggggttctttctttctgtcctatatatggaaattcagccctgatttcaaacaaacatcagatttaagaaggtgaggactccaaagaagatccaaacgcgagaccaggaagattcacgtttccactacttcttccaatacatttcactaatctttctacagggatagtgttttaaaacacgacgaccctcacacaccaaggtgaagttgaatattgttgttgttccttcaccgcatgaaaggaatccttcagaacttactttcagggacggcttcttctatctcgaatttttgcatttgtagggaattttatggggtagaggagcgaagagggaacaatgtctccaattcaaataaaaccccaaattaagctctcagccccatcggtgggatagcctgcgggggaacccactccctctcctggcagcattgccctgggggcgagcagagagtggatttggagtcttcttttcccgcctgacccctgctcgcccgagcagcattttcgggccagcggctgcagccacccgggcgccgctaggggatgcagtggctcaaaggaccgagcgggcggtgcaggttggaacccgcggggcggaccaatcgcggctcggccacagcctcgcccgctgattggtccctccaggccccgcccccgctcgccccgcccctctcgctggggcgcctcggagccgcgtgccctccgccccggggtgcccattgcgcagagcgtggcctggagacccgcgagccggggaaggtcgccgtggagtcccgaccagaggccggggttggggtcggtgcagaccgagggctggtttccttgactgtgggagaaacgccgggagccggagtaagtagggctccgggcggggcgaaaggaaaagttgggtccctagagtgaagaccgagttctttctgtccgtctacactgagcgtactcggggaatgagttagagccagtctcttcctcccctccccccttctcatccctcactgttgccactcaagtcaaaagcacacattgattacaaatattaggtctggaaagggcagctgcaacagctgaagcgtgttcactctgggggcttgagagcgcagaaggctcgggaaagaggtgacaatgacaacaaaattgacgcggacgctccagtcaaaggcatctcccctttatccgatgactcaccctcttaggaagtcggcccgagaggcaaatctcaaaataccttgacatgaaacattttgtttttctgatcaatttaacgcgcacgtttccccacatcgatgcgctctcccaaacaccctgcattagatcctaataatgatccatgcgtgcctattttttaaaagtctgaaaaagaaaattctgcccatcgaaatgaacttcatgaatggggcaggctggctgcaccgggacggaatcgtccacccgacccgaatgaattggcaggagccgcggccacatttaaagggccagagcgcgcgttccctcccgtccgcccccaagccccgcgggcctcgcccaccctgcccgccgcccctccgccggcggccgccctctgcggcgcccctttccggtcagtggaggggcgggaggaggggcgggggtgcgcggggcggggggagaagtcctggagcgggtttgggttgcagtttccttgtgccggggatcctgtcccctactcgccagcgccaggctcctcccccccggcgcggatgacactagaacctccttaagttgcgtcgcgccacagctgtctgcgaacactgagctgcctggcgccgtcttgatactttcagaaagaatgcattccctgtaaaaaaaaaaaaaaaatactgagagagggagagagagagagaagaagagagagagacggagggagagcgagacagagcgagcaacgcaatctgaccgagcaggtcgtacgccgccgcctcctcctcctctctgctcttcgctacccaggttggtactggtgactttttttttttttaagtttgattttttgcccccaaccacttgggaggacctaaatcaattttaaaaactcaactctcctcttttggaggttttctaggggctgagaggacggtcccgggaccggtgtccccgagggagggacttgccctccaagtcgtaacagtcagccctgggacttgccctccaagttgctcagccagccccggctcccgcgagccgggctgcagggacgtccccgagagccctgcgggctccgcggccgtgtccccgcgctcccgtgcgggtctcgggtgcgctgggcgggcgggcggcgcgaggggaggttgtgccactccagcaactcaggggctcatccaggtctcccattctctcccttgcaggtgacccgaggagggactccgcctccgagcggctgaggaccccggtgcagaggagcctggctcgcagaattgcagagtcgtcgcccctttttacaacctggtcccgttttattctgccgtacccagtttttggatttttgtcttccccttcttctctttgctaaacgacccctccaagataatttttaaaaaaccttct

SEQ ID NO: 1883960 - DNA, 4001 bp, Homo sapiens
tcgaactccatctggcagctgcagcgcttgatctgcgtctccgtctccggggcggctcgtcgggccagttggtccgcgcgtcccggggctcagcccttgctgcctccggccgccgcaggtcgctgccgccgccccgtctcggggcgcccgcctggccaaagggcgcgaacagcaccccgcccgccccctgcgcgccctcggggctgaagcactagggcccgtcgggcgacggcgtgcccggggagtcaagcggtggcgcccagactccggggccggctggccagggccgggcagcctgggcgccgacagggccgagaggccgaggctgtgcgcgggggagcggggagccggctgggggcctgggccgcccgcagggccgtgggcgcgcggcatccgggctgtcggggctgggcgaaggtaggctcagcgtggctccgacgggccgtgcagcttgcagagctttgggacctcgccggggtcgggtgacccggggccgttgggccgccggccgggggtgttcgctgatttgatgtacagcgagaaggagcgcttgaggcggttggtgtcctgcaggcggtcagaggagagtacaggccgcgcagccctgctgcagcgcgcaggtgtctgggggcgtggggggcagtgggggctccccgcccgcgctcaggccgccctccctggcagctgcactcccggtggcagcgctttctgaggtaggtggtggcagccatggcagccgggccccagccgcagggctgggcggaggctccggcgtccctgagggggtgcccgcatccccctgcacggtggccagcagcttcaggctgcgctcctactccagcagctggcccaggaagttgaagttgggcgagatggactggcgcctatccttcatgaacctgtaggtgtcgtcggaggatatgcccatggtcttcatgatgtaggcgatggcgatggtggcagagtgggagataccgaccagacagtggacgatgacttggcagctggacagcttgcctttacagatgaactccatagacttgtccagccagggcagcagcttttcacagtagttgtcgttgatggggacccgcatgaagcggctctcgcagatgaagtcaggcttggggcaggagttgctggcattgaggacgtagcttattccattctgtgtcgtcagatccttgttcagaacgtctttctgcgagcccaggtagaggtgaggcaggatgagggtcaggctcacgctaggcacgggcaggcagggctgggagaggctcatgggtagcagggcagcaggcttgccctggcagaggctggggaagcaggaggagaaggtggcgaagccccccgtgaggatggccacgctgtcgaagcagctgtccagcttgctcagcaggatggagaggaagcggtctgcggccagcacactggcgtcccgtgtgctctggtcatagaccaccatatcctgtggctcagtggcctccatttggctgcgtgtggccagccagatgaactctgcaatggtcaccttgcccttctgcagccggcacttcaccagcttggagcagcagatgttgacggagctgagcacatgccagctgttgtactccaggaaggagcggctgtagatgaccaggcaccctaggcccgccccgcagcaggctggccagcttcttggcgtccatcatcttcctcgggagccggtctccggccatggtggggcaatgggtggtggggagggtgacccctgacgtgaggaggggttgctcggatggcccaagtgtggccttgcactgggagtgacctagcacatggtgccggacctcgttagcgctcgcctcggggggcgttccgggggacccgcgctgccctcgccagctcggctgcgccgaccatgggccctttggcgggggcccgcgcagccaaggcaggggcggggtctctaatatagagttaatcagtgctctttacaacttctaaaagataatagcttatttactatccttctactataatttggtcttatttatagaatatgttgaggaattgaaaacaaagatctagacttaaaattcaataagctcctataaaaaaaatccctcacataaaaaaaggctatatattaatttagactaattgaaaaatgatgcaggtcttaaagaggacaacttaaaaaaaatcagttctgataaggtatatttctatagcatcttaacagtaaccatgtgagtaaacatatttccccagagttctcattaggtagcaagaaaggcgatcacttaccaaccactgcacacttgtatgtcatcagggaagccaaagtttttacttcatctacactcacatcaatgctgtaatggatatttggtggtgttttttttaaaaatgtgttggggtaggtgagaaagaaggggatatatttagaacaaacttcagtaagtttcaaaaaagaaagctacaaattgaaaatatccactttttacattttacacccaagctatgtccaaaaacacttgaagcagctcatatgtcagaacaccataaaaaatgaatataaaacgtttaaaaaactgctaataacagtaactatgatttcacaagacaaaaatcactgtgcaatgaatttttttacactttccagaaggcttttttatgttccttttaccttttggtttgggtgactccggggtggccaggaccaaatgtgtctccttctggctttttgcaccacaccaagtaacccgcgccaggccgcacagctgccctggccttggggaggactaaggcaagggcggtgtacgctgctccggagtcccaccgcaggagttgaggcagcgagttccgagggcggggtggggcggaatcgggagggatacggacccggtggaacgcactgcgtagacggcgccggcgcccgcactcagctgttgacagtctttcttccagctctcccctgaaagtcgtccaggcgccggtctcttttttctgcctttttgtttccctccggagagtcggcgcgacggtgaatttccgtttccggtggtgtccaatccgacctgaggagtcacagttgtgagcaagttcggtgccgcgggctggggtaggcggcagtggggtccctggctttggggcactgggaagatcgcgagtgggaaggtcctcccgcggtcctccgggtcatctttcctcctgaggagcagcatatttcgcatctgccggaggtgtgcccggggtcgttgggagagtgacgggatgaattgctgcagagagcccggacggggagggaaggtgtcggggagacgtcgtttcctggcgacgtggtcccggccggcgacttagacctgagccgaatctgttgaccccaaattgtgcttttcccaccaagaagaaaagggagagaaacattagtacaagttcggaactaaaatatagtagagaagcaacataacctcggaaatcacacagctgttcggtttcaaagcgttcctagtgcccagctctcctaactcccggccagtgttccttgacatatggtgatatataaagactttctgtttccgctcgtgtgtgtgtctgtgggaagcctctgactcacttctgtgccccagtagcaccctgtgcagccttgcaatgtagcccttattgcatggcacggaagatactagtttggatttcctctgcaagtcagatcatagctatatccatttactggcacagtggctagcacatcatagacagacacaaacatttactaaacggaatgaatacaggaccttaattgaatgaaatggcaccctgccccgcttttttccaatcaagctgtcagattttatgcagctggatatccttaaaaaactcactaattcagtgattaccaatttattggccacagattcccaggtacctcagaaatcactggaagggtctctgtaagtccatggggtctccaggcatcatctagaactagtcatgtctcacacatacagatattgctattt

SEQ ID NO: 1883961 - DNA, 4001 bp, Homo sapiens
ctcatggaggcagctggagttcaggttagaggtctgagtcactgataaaactttgggagttgttggcaaatgatagcgtattggtcagagtccgattaggaaagagaagccacacagtcatttgaacaggaaaagtgtacatagggaattgttaattgcaacagggaagtggagtaaccaggcacagactagtaggaagtataggaggagcagctactagtctagggctcaggtagagaactcaggagagtcctcccctcttagtgccctgcccctgcacctcatcagaggaacccagccatggccctctgcttgtcaggagagtcaccgatgctataccactggaacttactagaaatacttccttaggtgctggggaaaggagcagtgtctcagaagagttactctacaataaaactgcctggagctggtgagaggagtgggacctgctgggcactggccactgtgtccctggtgaagtcaaccgcctgcaggagccaggcgagggagcataggagaaccagtagcaaagacagctttcacctacaaagtctctccattgctctagataggaggtggtggtcagagtgggatactgtgagggttgcagtccttggacctgacaaggtctaaggtctgatcatggagggagggggaagctgaggtagggcagaggacaagaatgggcttcatgagaccaaaaggatgttagaaggattatttacccagatactgacatctccaagaagtaagaggcctagtgtgaagaagttacaacatcctaagctcttcagggataagggaagcatgcgccacgtaggtagcctccctagtgcagcacccagtatatagcctacgcagagtgaatacctgggggctgctgggggtgataacaaggtcactgtgacaggacctgaagcctgggggtctcggcgacaggagtgggcctagttttttgatgtagaattgagccttgcatgcaccggtgggatcatattgaaaagaaaccctccaagactagaggaagatgcatcctctgacaatgtagtctctgtaggcgtcccaagtagctgggctggggattagatgggctccaaggcatttcctcaggtggcaatgggtggatccctgggaaggcaaagctgtgcaggaagaaaatggcaagatgctaccttccctcagggaaaacccctttcccgggagcagggaaggcgaggcagtttaggctgggtcagtttgtccctgccctcagagtctgttggtcccggaaaaagagggccttattttatttatttatttttctttgagacagtgtcttgctctgtcgcccaggctggagtgcagtggctcgatctcagctcactacaacttctgcctcccaggctcaagcgatcgtcccgcctcagcctccagagtagctgggaccacagggaccacaggcgccccgccacgacgctggctttatttttatttatttatgtatttatttattttttgagagacgtagcctccctatgttgcccagattggtcttgaactcctgggctcaagcaatcctcctgcctcggcctcccaaagggctgggattacaggcgtgatccaccgcttctggccaaaagagggctatagggcacccccagaacgtgagatctccctcgtctgtcatctttacagaggaggaagtggactcccaatccagccatagtccattcgccccgggcacggtgactccggggcggccagaaccaaatgtgtctcctggcttttgcacggcatcaagtaacccgcgccaggccgcacagctgccctggccttcagcaaggactccgcgagcgaggtgcaagctgctggggagtgccacagcaggagctgaggcagcggattccgagggcggggtggggctgaatcgggagggacgcggacccggtggaacgcactgcgcagacggcgccggcgccagcactcggccgttgacgagtctttcttccagctgtcccctgcaagtcgtccaggcggcggtccctttttttctgcctttttgtttacctccggcgagtcggcgcgagggtgaatttccgtttccggcggtgtccaagcggacctaaggagtcgcagttgtgaacaggttaggtgccgcgggctggggtaggctgggaagatcgcgagtcgtgcgcgtgggaaggtactcccccggtcctccgggtcatctttgctccccaggagcggcatatttcgcatctgcctgaggtgtgcccgagggtcgttgggagagtgacgggatgaatccctgcagagagcccggactgggagggaaggtgtcggggagacgtcgtttcctggcgacgtggtcccggcaggcgacttagacctgagccgaatctgttgaccccaaattgtgcttttcccaccaagaagaaaagggagagaaacagtacaagttcggcagtaaaatatagtagacaagcaatataacctctgaaatcacacagctattcagtttcaaagcgttcctagtgcccagctctcctaactcccggccagtgttccttgacatatggtgatatataaagactttgtttccgctcgtgtgtgtgtctgtgggaagcctttgactcacttctgtgctccagtagcaccctctgcagccttgcaatgtagctcttattgcatggcacggaagatactagtttggatttcctctgtcaatcagaccatagctatatccattttctggcacagtggctagcacatcatagacagacacaaacgtttattaaacggaatgaatacaggaccttaactgaatgaaatggcaccctgccccgctttttctcaatcaagctgtcagattttatgcagcccgatattccaaaaaaactcacagattcagtgactaccaatttattggccacagattcccaggtacctcagaaatcactggaagggtctctgtaagtccatggggcctccaggcatcatctagaaccagtcatatctcacacatacagatattgctatttttcaattgtatgtagatgagctgtaatttagaagttttagagtcaacaggtactaaaagtaatactgcgatcctattggaagttcataaaaacgttttaaattttttattgaaatttaagttctggtttaagttaggaaaccacttcgttagtccagtcgatgtctaggtctgagctgtccagtatggtagccacatgtgactatttacagttagaatgaaattaattaagaattcattttttcagtttctctgaagtacattttaagtaaccacatgtggctaatggctaaatggctgaaaagtacagatatagaatatttccatccttgcagaaataggtactggtgatgttgacacttgagacgagtaaaaagtaacttaaccatagaatgtaaccttagcagaggtaactcatctaatttatagcataacagagagaaatgaaattggggatggttaagcagtttctacccttgttcagtgaacaaatacatcatgtcttcataaagaaataaatgaaatttaatgtttttccctgggtattgcctggattgtaaaatgcttctcccacctccttaccccaaccttcttccttgtaggttagagttacttgttattggtaaatagccactatggagactaaggaccagaagaaacacagaaagaaaaacagtggacccaaagctgcaaagaaaaagaagtggcatctgcaggatctccagctaggagacgaagaaaatgcccagaagagaaatgccaatgcttttgcagttcagtctgctgtgtggatgtctcgatcctttcacaggtgtgtttagctacagtctgatggttcttccattgaatctttttaaatagttaggagcctctcacaggtgacatttggattcacaagtctagtccagctccaaaggacatggagatgcatgctgtgtggcttttactaaaacgtgagaggacttgccatagaagctgcctt

SEQ ID NO: 1883962 - DNA, 4001 bp, Homo sapiens
ttaccatgctaacgatcccactgaatcctcataaccaccatatgagacagttactatgattacctctattattagtattagagttactattagagtattagagtttctattattagtattagaggttaagtgcttgcctaaggtcacttagacagagctgggatttgaatacccaggtctatcctattctctaagcccatttttcttgctgggggttggggcacagataggaagggggaaattaatcttttattcattttttgaaaggatgatacattcacatagtccacaactcagaaggtacagacgggaagtatctcccagccaccctgttgctctctgctgaattttttacaaatccttgcagacatgttttatgtatattatcatagtacgtacgtacacacacacacacacacgttccccctctctacacaaatggtaacatactaaaggtactcttctgtaccttcacagtacaagtatgcaatcccccacctaggactttgtcaaggccacagccaggtaacagcagggtgggcacttggcctccaagctctgcatccagtgctcgctccccacagtgccccgcaactaacccacagcagctgactcagccccaggctgcctctaacaaccacacacaaaagcagcaagaaatggccatgctgccttctgggcaggacattccaccctgcagcaaagagggcagtaacagaagagccatgctgcatgctccatgctctggggtccctcagggtgaggcctgggcaccccagctccccatttacccttagcaccagaggcccccagaccctttcttcagggccccaaagggaaactgaagcccaggattggcagtgtggaatcaggggaccccactggactcttagcaatgactcggtgttttcattgagttgattgattgttgtggagctcaagtccagggctactgctagttcttggtactggctctgaggcacatgcagagaggaggaattggaggaggattgcggggagaggtagagagaacaatcattagggctggggtgtgtgtgggctgtctcagctggcagaggggcactcagcccctgctgtgggaggaggttggggggctggcctacagggccactgcactttggcccagggcctcttacctccagatccttcagggtagcagatgatgcaggggtaataaaaataagaaattcaaaaaaacaaaaacttccatcaaaaacagttatggctatggagaaagtataaaaacagcaagaggctgggcacagtggctcatgcatgtaatcccagcactttaggaggctgaagcaggtgaatcacttgaagccaggagtttgagaccagcctgggcaacatggtgaaaccctgtctccactaaaaatacaaaaaaattagcctggcatgatgatgcatgtctgtaatctgagctactggggaggctgaggcatgagcatcacttgaacctggaaggcagaggctgcagggagccaaaatcacaccattgcactccaggagagagaacgagactcttcaaaaaccaaaacaaaacagcaagaaggaaatatggggatctgggcctttgtttccagaacagagagacctgggctgggcacagaatctcagagcatgaggaaacaggccacagaccccctaatctactggaccattggcagagcaaaagccagatactcagctgcaggattcccctaggcctgtgctccccaccgtatcattcagtgtctcttctgagccggcaaggtgagtcacagcacctggacagacctgaccaacttgggttaacaggtgtgatgactgaacaactgtctaacagcagccaagggtgctctgtcagtccccctccccatgcccatctccagcaggatctgcctccatttgtgccctgctcctctggcttggcaggagtctcccaggcaagttagatacggaggaaatgccaaatcacagccagaggaggtcatctccaagcccatgtgtccctatgccctgtctcccagcaagctctttgtgctcctgaaaggtgctctatgagttcataacgatggccatgacctcaccgctcccccttcctcccccactccccatatggatgaatgttacccacctttaatcttccagccaacctcaaatgtcacctcctccaccctcaagtccattcagaaccaacctcccactgagctgagcatttggaatgttccaaacttctttcttgcctccttcagaggagtctgcctccctcagtctgcaccctaccttgttcagctattctctccactgtttatttagcaaagtgcctttgttgtcaaaagcccaataaatatgctaagtgtccatttgattttcaagaggttatggtcttagtcactcatctgtttggttaacctcacatcatttacagttagttcctctgaaaaaatagcttcaacccttccagctataatgtgaactcattttatcttaaccctatgttccctactcttaaaccaaagtgaattaatccaaaataagcacaaacttttatgtggtctatagatctttgcctttaggacaaaacctaaaggtcagttttgtttttgtttttcatctctcttagtctgagagtaccacactgggcattcaaaagcccaagtcccaggccgggcatgatggctcaagcctgtaatcccagcactttgggaggtgggggcaggtggctcacttgaagtcaagagttcaagaccagcctggccaacatggagaaaccctgtctctactaaaaatagaaacattagttgggcgtagtggcaggtgcctgtaatcccagctactcaggaggctaaggcaagagaatcacttgaatccaggaggcagaggttgaagtaagcagagatcacaccgtggcactccagtctgggtgacagagtgagaccccgtctcaacaacgacaacaacaaaaagccccagatcccacatgcctgctctatacattattcccaaattacttttaaactttaaggtatgtctcaccttctccaagatgataaaagatgcagggaaggaaaaaactcaattaatcaagcaggtgaagaagcagacaggctgaaggttaatggcagcaacataaaataagccaaagtatcccccaaaccagagaagcctcaggggcatgcacagctggagagagcaagccagagaggggtctcagcactgcctcaccttccatttgtccaatgggagagcgctaccccattggaatggttaaggttggacaccagcaccttcagaatgtcctgaatctacagaaggcaaaaagagaaaaacaagggcagggggagaaagacagaagtggcttagagcgaagcaagaaagtcagggaaggaggaaaatgtggattcagggaaacgaaacgctgaggaacagcagagatcaaaaccatggcctgtgccattcttccaaatggccacctgctgccttgccaggggcaggaacaaatagatagaagagtctcctgagcaatgcagtcacagagtggagtcccctgaccaatgcagctcttaatctgctcaccggacccctctcctcaggcccaggacatgggcgatgaatctagtagagctccagaccaccatctccatttaaaaaaaaacagacttctgagtaagggttcattggaacaaagggggctccagctaaaaaacaagttttaaagacactgatcttatccagtatcatcttacagaggagaaaactgaggcccaggggaagaagtgatttttctgtggtcaccgagcaatctggtggcaagttagttcttctcttaattctagtgcctggggccctcctcaccacatcctggggccctttcagtgacttctaaagggagagcctgatgacaagtggctgttctcatcggcctggcttcccgttgagactggggatgaggaaaatcaaacaacaacaaacatttcctggctgtcctgggtgtt

SEQ ID NO: 1883963 - DNA, 4001 bp, Homo sapiens
tggcaaggctgctgtctgcagtttcccatcgagcactcgtggagttgctgctgagaaaggggtggtgtagatgcaatggccgtgaccagcacttggccgtctgcgctgtaggccaaggaggcctgcctgggcccacctggctgcagcggggagctgagcctccctgaggaggaaggaatcgcacctggggcagcaacagcagctcctgcctgggtccctcatggccgcgtgagccgcttcctcactgtaaagctcttcacctatgtaactatgtatcaatgtaaacaggaacgtatcctccgcctctgcatctctggtgaatccgggcgatacgtggtgagacaccttaataaacacctagatagaccctgccgtggtgagcacctgcctccaaggggcaagcacggggcattttcctggctaggaattctgtctttctcaccacgagactcttcatggacttacgttttgaaacagcatgtttgggtttgttcggattttaaaatttcattcttctttgtcttatttccatttcctggtcttatctttttttcttttgttttcctctcttggggaggtaagagtcagggaggcaggcagcaccctcacccgtgtgcctgcaacatggttgagacgcttctctcctgccgggactggaaaggtgggccctgtggtcagccggtgccgcagccaaccctgcagtccagaaagcagacgctttgctgatgaacagtgagcagagggccgggggcccagggcccggggcagtgacctctggtggcagggcaagtgctgacatccccgggctgccgggcacacggccgccggctcacctgctgaatgccacccagaggcctgcgtgatcctccaggggggcagctcctcatcctgccacacagcgcccggagacttctggaacacacaaccgcaagtggggtctaacctgcaactggaagagcacgtgactgtctgtgcctcggtttccccatcccacaggcgtgccgcccaggccaccatgtgggactgttcaggagacagtgcccggtccccagcaccaccctggagatgagacctgaagcaggtgccctccaagggcagctccagggaggggctcgcagagcagcgggggaggggccctggggggcagctgtgagtgagcaggagacacccggtgcccccacccctcacaaggccgagccccacagactctgcccaagggcagctctggaacacgtggcagtgccagctccccctggctctctctccttcacctaggttatcactaggtgtggaatggggggggaggggcagccctcccgggtcctgaccaccacgtgcgggggcagcaggacattcgcaagccagtggacctgtctgcctcaagtgccggaccccagggcccccacagcacctggtagccttctgtgtgtcctacccggataccagcggcctccagggctttcccttggacaacctttccctttggagcctgtgggggcccagcccagggcccaaaaccagctaggactgaggtgggcagtgggagcttctctggggcctcccagagcctggctggctccaccacctccctctgcccccacagcaccttcgagaagttcccccgcaaagtccccgtgggactcagggcagggctccagtccgtgtgcagggaaagagacaagccagggccactccccccaccggccggggcctcctctgggccccaactgtgatgtgccaggagcctcccgggagacacaggctgacctgtgctcagtgtggtaccctcacctggagcagtctctgtggtgggagccgctgggtgcaggagtaagacgtcagggcagagcccatggggacccccggcctggggacgtctggggcagaatcctccccttgctgcccgcttcttcccagccctcttgtccaggaccatcacccaggggacaccagggggggctccgaggctccaagggaacggtgtccagggagtcagggcggccaggtcctggggtgcctagagcgtctccagctgggaactagaccgtcgcctgcctggaccctgtgtccctcagctggagttcagggaccagcacagtgtccccacagaggggctctgggaacaccagctagatggggcagtggggccctgagcacatcccgctcaaaagccccataatgagaggccggggaagcggaacgctgtcacccctgcatctaattctgcctctgtgagtcttcatgacaacctcccaatagtacatccttcaggcccctcaaaatccatggcagcagggcctggggaccccctgaacaggcgccagtgtcacagaacctggggcagaagtagccatgcaagggtggaggccaaggagggaacaggtggaggggtgtggggtcacccagggccaaagggggaacaggtggaggggtgtggggtcacccagggccaaagggggaacaggtggaggggtgtggagtcccccagggcagttcctgagactcttgctgaggctgccaccaggccagcacgtgccccagaaaacggagtttgtgacgaaaactggagtggacttggacccaccttgtcgggtaggaggccccttggggcaggatagggacctgtgggatgtgtgcagagcccaaacctcgctgcgggtgggaggctgggctgcgccgcccctggcaccctggcctccacactcgccttggctctggatgcccagctctgtggcccaggatgcaggagggttggggtagggggacagggacgctttctgcacagccacaggccctgtctgtctacaccggctgcggctgccctgctgactcacactcagacgggttcacgacaggtgcacctcggttctggcatatctggacttgagaatgttaaataaaggatggaaaattccttccaaatccattttcttgtgtatatttctgttcctgcagcttctccacggatggagattgtctttgggaataacacagggtcgtgcagtccgcccggcggcgttttcgggcgagggtctggtgctggggagcgagcgcggagcgaggtgtctctttaaatacgctctgcagtgtgacggcggccgcccggctggaagagccatccccaccctgcggcaggagcccgcccgccgccatcgcccgccccggtccccatggttacgcgcctgcctccggccccgggtccccgctgtcgccgcgggaggtgcgcgcagaggcggcggcgctgctggccgggctgggccgctcgtgcgcggggctgtgactcaccggccggcgccgcagccccgcaatctgttgataactcggtcccagctcggccgctgccctcgcgaatggagagcgggtccccggcggggggagcgcagcgcgtctgtctccgggagcgcggcccggccgccccggcagccgcttcggccacagcaggtgggaaggacgcgcgggtctgggcggcgggagggacgcgcggggccgcggctcggcagaaaagctcgcgccccgaggtgacactggccgcgaggaaagcagctccgagtaactttcggctccgctggggcgggaggcgccacggataatccagggcccccgccccgcgcgcccggcccggagctcgagccacatccaggcagagcaggcgccgcggccgggctggggcgggcgggtcactcggtgccggttcccggtgcaaaccccccggcgcgcctctggctttgtgcagcccgagatggttgagtttggctccggagccgggagtggggcgcagattgatttttaaatatggagaaggagacgcatctgccgctggcgcgttcggtccgagccccccaccggtccccaccggcaccgcctccgccagccccaggcgcagcccccaggccgcccgcggaggggagggagcgacaggggccgcggctgctccctggcggggtcggggctgcgagctgccctccgcggggaccctccgcccgccccgctgaccgccgctg

SEQ ID NO: 1883964 - DNA, 4001 bp, Homo sapiens
ttgataatttgcctaaaatgagcagatgctcaggaggacacgtctccatcctatgtcccttctgtctaatttcacctagaaatgaaaactactcccttctccctcttttccaggcaaaaggctgatttaactaagcatgcaagacgccaacaccctccccctcagtacgtccaagtttccttcgctctgagccaccgaatctctgcttctcccccctctgccgcccaccctacgccacccacgcaggtttccgagtcatccggaacgcgagtgggtgcgaggactcggcaggctgcctcccgcgcccccgccgcccgcgggccgcctcgggttcagcactggacagctccctccccggccccacaaatggcagtcggctgattgacagaggagccgaccaaacagggaacaagacgacttgcagccgccctacaagggtttggttgcggccaagctgcctctttaaactggctttcctcccccgaggagggagcagggagagagggtggagtgtggtttgcggccaaacctaaaggctgcaattaaccagccgcccggccttcgctactccggacagacgaacgtcttaaaggacgtcttcgctcctcgggagtcgcggctgcgctcgcggtgcgggtctgggcgcgcgccccgcgcctccgggcgaagcggtcgaggaggagccagtgccgggaggcgggaacgacctgcggcgggtgagactatggagcagcgtcttcggcggccgcggcggcagcagcagcagcagcttctgaacgcgcctcaatgagagcggcggtggcggcagccgggccgagagacggactcgggctgactccagccgctgggagcgcgaggccatgtaacccgctcggctccaggctgcgaggtgcgtaatccccagccggcccctcgcgcagcgggcacggccagcgctgccacaggtgacttgatttctgcgacggtagcttagccacccggggccaatctcgaaacattcttattttcaagtcctttggactgggtgccatctggagaagggggaagactcctcgaaaaagtctgactgttgagaaactgacgatccaaatttaaaaagtgattcccccccctcccgttccctcctcttctctctgggaggcagatgggagccatggcttaccccttactcctctgcctcctgcttgctcagctgggattgggagctgttggcgccagccgcgacccccaaggacggccggattcccctcgagagaggaccccgaaggggaagccgcacgcccagcagccgggtcgagcctctgcctcggactcctcggctccctggagccgctccaccgatggcaccatcttggcgcagaaactcgccgaggaggtgcccatggacgtggcctcttacctctacaccggggactcccaccagctgaagcgagccaactgctccggccgctacgagttggcgggcctgccggggaagtggccagccctggccagcgcgcacccctccttgcaccgggcgctggacacactgacacacgccaccaacttcctcaacgtgatgctgcagagcaataagtcgcgggagcagaacttgcaggacgacctggattggtaccaggcgctggtgtggagccttctggagggcgagcccagcatctcccgggcggccatcaccttcagcaccgattcgctgtccgcaccggccccacaggtcttcctccaggccacgcgcgaggagagccgcatcctgctccaagacctgtcctcctccgcaccccacctggccaacgccactctggagaccgagtggttccacggcctccggcgcaagtggaggccccacttacaccgccgcggccccaatcaggggccccggggcctgggccacagctggcggcgcaaggacgggctcggcggggacaagagccacttcaagtggtctccgccttatctggagtgcgagaacgggagttacaagcccgggtggctggttactctttcctctgccatctacgggttgcagcctaacctggtcccggaattcaggtagggagggccggggggcaggggggaaggcaaaagcgaagctttccttccggtcttgtgggtgggtgcacgtgtgaggaaggaacccttggctgtgacgcgaacgcttctcaccctcagagtagagacccgggctgagggacaccccacgcgggcgcgggtgcttgggggcaagaagcgccccacgcccgtcagcttccggcgctcggcgaaagccattcattctctcggaccagtttccccgcactgggcgagggacaggcagcccttggcaggacggagacacccccgctgctctgtgcttccctccaattgtccggagagcagggaggggcgttccccaccggggggcgatgcgacaacttggcgagcgccgggtgtgtccgcggagtggcaagcctcagatgagaggcgaaaagggagcaggaggaacagagagttccttgtttctgccactttggggtagcctctgcctgcttcctacgtgtgcagttgggggcaccggtctgttgttagtcagagcttataattaaaactgtgccatctcctcgcagttccggcccctcagcagtgagtcagtcccagcagctagctgtctctgggatccagactttgcagcttggtcagggtgctccttctaccggtctcccctctccccgcaattgatctttccttcctcggtggccttttcctcctcttccctgtcttaggcatacttaagggttctccagcccttcacacactcacatgatttataaaaggacctagttatattcgggagggaggcatcagttgtgactgaattcactcaaggaggctggaggaaacttaagggagtctgtacttcctgtctcaaactatagcatttgagggaagcagagaatttgcaaattaacaggttttaacttctgcctgggaagtgcctgacctttgaggcggggaatttctagaagcaacctttaagagtagatgtgaggaaggaactgaaagagtagttacaccaaagagggcttaggagagggcccaagatgaactgagatcttcccttagtcccatgagggaaggctctggaaagagggtcttgggggctgaggttgcttttgtactttttgggaacctgggcaggactgagaaacctttgtgtgtggattatttattattttttaaataccctgtcacagcaaggtcaggatgctgacctgctgaaagatgccagatcaagtactgggtgggcaagtgggaaaggtcagaaggcttgtttgtcttggtactgccatttactgctgaatgacctcaaccaagttgcttaacctctctgggcctcagctacttatctgtccagtgagggagttgaactagacagtctctagggagccatccagttatcaagttttgtagcttttaatgttggcaacacttgcaaaggcataaaggataataaacccctttgtctgattctgtatgaccatattaagtgcatgtgtgtgtgtctttgcctgtgtttctatctcttttaaaggtcttgtcttaaaccagactaactcttttctactttcaagataatctcatttcctcctaattcctgcaggatcctattagtaagagctgagcccagctttgaatctttgccatactgtttgctcagaagaggaaagaccagcagatgctattcactgccagcaaactgtagcctttaaatgagtctttttagggagccccaagtcccaggatttatctgtctttttcatctaacattcgctttatgtcaggctctgtgctaactgctttgcatgcgttgtcttgattagcccttacaacaaccttatgagttaggttttattattttctctattttacagaaaaggaatctgaagcccagaggggttcagcttcttgcctaagattgcacagcagtaaaatagcagatccaggatttaagcccacttcatacttca

SEQ ID NO: 1883965 - DNA, 4001 bp, Homo sapiens
aattagcatttaaatcaatagatttttgagaacatcagattaacctctgtactaagggttagcttcattcaatcaattgaaggtgttaagaaaaaaaactgagttttcccgaaaggagggtattttaccttcagagtccctttggattggagctgtaacatggtctccagcatcttccctggatccccacctgacctgcagagggggacttgctggggtccataccatgtgcaccaattccctaaaatacataaacgaatacatctctctccttctctctctctcttctctctctgtccctcccccacaaccctccgtcccctctctctttctctgtttctctgtctatctgtctatctatctatacacacaatcttttggctctgtttctctagagaacactgataaataaaatatactaatgtataagaagctatgaaggcatagttgcagttgttgtcacttctgggcccaagaatttgaaggataagctgtttaaattacaatgctggtgtgggagtagcccaggaaagagcttgaacatgttgaggagggagatacaaaagcacgattctaaaccaaagcaccagcagggaggatggaaaggacagacatggatctgagaaaaattgtccttcatttcttgctgttgttattgcactggcttggtgcacccgtatcctgaacaacccaaccacctgttttctctattcttatccccagatggtggagtgcaggtgatgaaagctacacagcagaacagattgattgctgtccttgtaaattcatggttgccaatctctaagagacctggaaatctcactaggactttttggccaattctttctttactttccccagaaactgttcacactttttaaatgcataaacacgcctcctctcctttactcaacattttttaattaaacttttttattttgagatacttacatattcacatggagttgtaataagagaatttccctgtactctttactcggtttttgccaatgataacatcttgtgaagttgtagcataatatcaaatccaggatactgacatgaatacagccgagataaagtatatttttatcacgacatgatgcttcatgttgctgttgtatagtcacacccacttccctctgcttctccttagcctctggcaaccactaatctgttgttcattctcatcattttatcatttctagcatgttatatagatgaaatcatataccttatgtgcttttttaggattggtttttgtcagttcatatccactttacagaaaaataaaaaataaagtaaaagttttcaaatgagaatttacttatctccccaattataaatatatgaatgacctgcatctgtcctcaatatcgccccctttttttgctgtaataataaagtagactttcttctgggattaaagccacatctcatcctggaaaccagatcctatccactcttactttcccaggagcaatgaaacaggtattaattattttttccttatacatagattccttctgttaactagatttgtctattagcctttaatttgttcaaaccatttccattaaatacacataaaatcctaatctcattcccccagctattgctccgcttcctctcttcttttattgagcttcttaaagaaaatcttatttcttcattttacattatttcttaaccactctactgtggcttacattctcataattccacatccaagtagctctactgaatagaggtattcccatatgacctctttcttgaattctcagcacctttggtcctgataatcactctctgcttcttgcaatgctctcttaccttgtcttccatgagacagcattctcctcatttttcttctgctcctcctaccatgttttctccatttattttctgagcttgttctcttccactcaaccagtgaatggttggagttctcagaatttggtcacgggctgtctgtcttctcagttcactcaagtttttctccctagacattctcatctacattatgacatcacttatcatctatatacagacagtacacgcgttcatatgcagcatcatcttcctctgagtttcaaacttgtaatccatatctcttcttggaaggctgaaagtccctgcaaaccaatatgttcaaaattgaaattaagatacagtccccagtgctgtcctccatcgcataatcttctttttctattctccaagtcagtgaaggagaccatcatccgtccacttagaaaagccaggaacctgacatgatgtcctcttctccttaatcttccatagtcaacacttcattgtgttgattttatctcctaaataactcaccaacccatccacctgtcttctgcccagttgccttcctactcattcaagagaccaccaccccttctgccagagatattgccattgctgcctcaacattctcctgcctcgacccttgctcctcaccaagctggttgccacactgtgaccagagtaaaatttttcaaaattcaaattcgcttttctttttctctctctcatgctgaatatctgcaaatgctttcactgtcttgccaatgctgttagaacagacaaagacatagctcctttatgtggtctaggctctgcatggtctgctttcctcctaatttccagtctcattttgcacagttttcctccaatttctgcttcagccacactggtcttttggtggcaattatgccccatgatgctcctgcctgaggcatttgcctacagtactatgtgcaggagccatttgacttctattcaattctttctctttccctcattcttcagttcctggctcaatcatcattttctgatgttttcttgcaatttttcacttgtttgatgctgatcttgtttatggtcatgtccctacagtacattttaagagccataagggcaggccctattacctattattatccttattattatatctatatccctattatctttattattatagtcatggcgtagcaccatgactcacagggtcattatgttgtacctaatgcatggtgtccctggcactgtgcattattacagctgaaattacttacttcacatggaggaaatttcaaataaatatttttgagtgaattaataagtgaaattaaatcagtgggatttaatatcaattgggcatatgtatgagagcaattgaaaagaagacataaaatgtgatatttattttttattttttgtagacatggggtcttgctacattgcccaggctgatcttgaactcctggcctaagcaatcctcctgtctcagcctcccaaagcactgggattataggcatgagccaccattcctggcttaaaatataattcttaggtttctaccttgggtaattcgatcaaatttaatgtctttaaaacaaggattacccccaaaaaactaggtttagaaggaggagcctgggtttatttcttggcacatcatttttgccatataagtacacatctctagttttcagttaagatctgagattcggaaattgattttggaatcatcagagtatggatggtatttgcattcatgtctttggatgaaatctattcagtgaagagagagtggagtaagaaaagggtcaaagggaataccccaagtagccacccaaacattaagagtgtgttatcacagaaatcaagggaggaggatgtttcagaaggaggtatgataagcactatcagcaacttccaatttccattaaaaggagtggactcttcccagaggggccatagggaggttgtaggggactcaggagaggaacgatggaacattggatggtaaacataaagacacagtggacactcagtggcaacacaggtttgggtgaggctttttgacaaagcaaggtcttgttgaaaactgtgatatctgaaatcttggcaacaggtggggaaaaaatgagggaagataaagggatattttcagagaaaagttgaaggagttcacccttaaggat

SEQ ID NO: 1883966 - DNA, 4001 bp, Homo sapiens
tttaattaggggcctatcacatataaaaatctttggagaccttgctcttgaaggagctcatggtttattacaagaaccaaggtatataaaaaatagctttaagattaaatatattctttaagatgcatagataatagatttataggcatttagagaagtaaacaattactttcgattggggaattagggataaggagggcagaggtgaagggataaagaaaggctccatgacatttgatattaactcttagacaagtaacccttgaacagatagaaatgtgtcagatggggaattccaggagagaatgggtccaatttaaatgtaaacttaattctgcagctccagctaatgatagttctgcaacattgttgagagtaagacctgtgctgctccttcctgttcaccttttgcatcaacacttttcaggcgacatgatactgaaggacaccaacaaagttcatcccaacaaccaaacaaatacaagtcattcatttccctcattttcttgctgtaggtaaggtaggctgccatacttgattctttctcattgacttgcattatcactgattaatttattatatacgccaaagaaaagcctactcaaacaattgatagttttctatttaaaaccaagcatttgtttcttcttcttcttcttttatttatttatttatttatttatttatttattttttgagacggagtcttgctgtgtcacccaggctggagtgcagtggcacaatctcggctcactgcaagctctgcctccgggttcacgccattctcctgccttagcctcccgaggagctgggactacaggcatgcgccaccatgcccggctaatttttttgtatttttttttagtagagacggggtttcactgtgttagccagaatggtctccatttcctgacctcgtgatccaccctccttggcctcccaaagtgctgggattacaggcgtgagccactgcgcctggctgcatttttttcttcttaattttcctaagctttgtagcttaggaacatgagagtgaactataagagtctatacacaatagcatcaacttcagacagtcaacaagaggaggaagagggtaggtgaataaacaattattgatttgaaaggctttctggccatatgtggtggctcacgcctgtaatcccagcactttaggaggccgagaccagtggatcacctgaggtcaggagtttgagagcagcccggacaacatgatgaaaccctgtctctattaaaaatacaaaaattagctgagcatggtggggcactcctgtaatcccagctactcgggaggctgagatggaagaatcgcttaaacttgggaggcagaggctgcagtgagccaagatcatgccactgcactccagcctggacaacagagcattaaaaaaaaaaagaaagaaagaaaggctttctttaaagagaatgttaactcttctaattacatagactaattgcatctcaaaaatgatattcaagatctacacggttattgttataataatgtgatccttgtcaggagattactcaaatctgtaccatcatcttgaaggccaccccttccaatggaaacttaaagtttccagaggctatatatactctacctcagctgcttctgggcatgctggtccaaacagggcagaaatctgttcgttctggacctggttgttgaaaatagcaagagactccttggtgctgcaggctgagttggtgtaagtggtgaaatttccaaggtccactagctctgagttgaccttgtccatggcaatctggaggcctgcacccagcctttgcatgctgaatggatgggagatgttccagggggtctggaagcctacggtgagtttagcagcctcaaggcaagtcaccagcacactggcaaagagcatcagaactagtgttgggtgctcagcatgacattcaatccctgaacagagcccagactcaattggggcctcaagacatggtttgagagccatggatggcatgtaacacctgtgtcactgcagaactgtgagaggctcagcctcctgattactcacgccaggaacttacatgacagtgtagagttccccgaggatcacagcttgctttctattcagtgccattaattaaccgaaactctcccttttctgagtctgtcttaataccatctagaagcagcagccttgcagaaggaggccaaggcagctagtcagcagggtcctggtgattgatccagtgacatccctgacaaacttcacattcctgggcaagtcacatgacccctctgtccctctccaccggtaaaataagaaccacagaaatgactcaaatggagtcagatggcccgggctggaattctgactccatcacacattagttgagtgacctagaacatattacttcccctttctatgccttaatctcctgctctgtaaaacagggataaaactgtaataaggtcttccgtgaagtgatatggtaaagattaaaagagatcatacaagactagcccttggcaaaatacctgggcaaagagagccagtccatcagtattagatttgacaatggtgttgatgatgatgatgatcccagtaatagtgataataattatcacttcctgattccatcttctaggaaatttttatgaaataagtaagcttatggctataaggtttactgaaaggttgacacagtctgtatccctcacccaggcctttagggcgcttgagattggttattgatgcatgaaatactaaccctccctctacacaggtcagggcaaggagctgggggcagctctcaattgtctgaaatatcacagggatgacaggacccttgagaagccattgctactgccaagtaagatggcccagctatcagccaggaaaatccacatgaatataaagggttgaattcccacctactgtgggcttgctttctgattactctggcagggaaggggctggcatctcacgttcatctcagtattatgtgagcacagtcgactcgctatgagtctcaagtcttgatctaaggaccacctacctcagtctctcctgatggttagaaatgaagattccagggcttcactccagaccctctgaaccagaatgttttgaggttgctctgggaatccatgtttaacaggtcctcatatatccctaagtacactaaagtatgagaacccctggcagactgaagtgagaagagggaaagaatagccaatagctattctctacttatcttccttgaggagcaagcccccaggatggaattaaggagacttagctttggctatctcagagggccatttctaaacccatggattaggggagttgcttttctccaaaccaaattcatcataactgcttcttcactgacctgcagtttctctgtctcctctgctaggacggcttggagtcaatttgcaaaatcatctgagtccaaaaactcactggaaccataagcaaaatcccatgaatcatttttggctcagatgcttacatgatgttggacaagtcagttaaatctgtgcctcagtttcctgaaagtcaaaatgagcagagtaacacccctcctggaaggatgctataaagatactgtgagattgcatgattacttagaatggtgcctcacaattattaggaatcagtaaaggaattctgttaatagatgtgtcattgcacatgtcatggtctcaaaactagaacactggaaacaatatgttatctatgcactttttgttccctcccccaccttccatatgtatactttctttgatttgtattcccacactgggtcatttctgattctttgtgtttacagattgtctttgtcctgagaatctttgagccaggtgactgtgtgtgtcttttttggatcctaatattcagcacagtattaggcctctagacaagcaaattaatattaatcataacaagtataagtattttgtattcttaaatgcttacaagtgagcatggtcaaaaccagaa

SEQ ID NO: 1883967 - DNA, 4001 bp, Homo sapiens; identical to SEQ ID NO: 913715

SEQ ID NO: 1883968 - DNA, 4001 bp, Homo sapiens
cctttagcttctcctcatcattcccatatatagaattgggcaccccacacccacactctcaaagttcttagccttaaagctgtaagtttcaagttggctactccaaaaatttcttatggtttgagccacattatctattttcaaaattatcaaatattgtacatatttatggggtacaatgtgatatttcgatatatgtatacattgtagaatgatcaaatcaagctaatttaacaggctcatcaactcacatacttacgatttctttgtgatgagaacatttaaaatctatcttttagcaattttgaaatatgcaatatattattattaactatagccaccatgctgtgcaacagatccccagaactgactcctcctgtctaaaaatgaaacttcgtacaccttgaccaacatttccccattccctatctgcccccacctatcagcctcttataactaccattctactctctacttccatgagtttgaagtttttagatttcacattctaagtgagatcacataggatctatctttctgtgcctggcttatttcacttagcatgatgtcctccaggttaattcatgttgtcatcacaaataacagaattttcttctatcttaaggatgaatagtattttgttgtgtatatatactaaaatttttatccattcatctattgatggtcacttaggttatttccatatcttgggtattgtgaataatgctgcaattcacatgggagtgcagatatctcttcaacgtattgatttcaattcatttggatgtacacccagaagtgggattgctggatcatatggtagttctattttccattttttcgggaaccatcataccgctttccaaaatggctgtactaatttacattctcaccaacagtgtacaagagttccctttaatccagaggcctttacatgcataatgtcacttaaattccacaagaatcctgaagggtaaacatgatcaaggcatgtcagaggaggaaagtgaagctctaatgttacgttatgtgacaggagtgtagagtatggggtgcagtgtcttgaacccaggtctgtatagctatagtgcacgtgttcttcactcctgccctgaggtcctcttcctaaaagttctttatcatctaagattccagagcatctaccggggggtttagtcagacatctggaatgccaggattcataaccaattaagcttccccatgcctatagtggtgtcttttacttttcacttcaacatttattttgccagactccatactaggtaaagtgggtaaagcagtcaataagacacacatgtcctgctctcatagaacttaaagtctgattaaaagagacgattcataaatgcacacacaattaaataaatggaccaatttgccaagaagcttcaaatccacagagaataaacacaatgtagttttcatttttttccactatccttgacttgctatgtcaaatcatctcctcctctttccccccctttaaaatatctcacagtttccattacttcctgtcactttcagctattcagtttagtcaagaccagtttaaacctccatctcagatctgatcccaagccctctgccctcccagagtagccaagacttgctgccactggggcttggcatagatccaggtgggtctgctctgtctctgttctcacctctctacccacctcatcaggatgtagttccctccatggcaggggtgggaaggggaaggggtgtttgagctcttcctccccaggccccagcccttgccacttgtagcccacctcacaaactcttgttgcttggagaccctcatccagagggtggctatcttcggggggcagaggggggcacagcaagtcagcccaggcccagtaccttcctcagcattcttttgacgcgtgggaaatctaaccatcctgctgagccaagctgtgggaaggagcctgtgccatggccacaccgtatttcagccctgccttctctctccaatgtttctcttctcctgggacagggctgacagcaggactgctgcccaggcagatgtctagccagtaaacatgacattagtgatccccttagcacccccaactctcctttggcttggaggagggaaaacccctgttcctggtcctgctcctgggaatatgctcacaaggaactctgtacctcctccaggctgaaaactctgagccccttattccagcccagacttctccttacagacccaggacaggggcagggttggtggtattaaggccagttctgccactgcattgctgaaggctggttaagagctctctttagaaaaccagagtgcttagcactttctgggtcacctttgggcaatggcagccattccaagacaacagaacaaaatctcactcacaccctattacatagaattctaattgtgagatgtgtgagaaaggaaaagaacagggtgctatgagaggaaatgcccatgctcaggatcacacttctggatctcaaatcccagctctgccccttattaactgtgtgatcttgggcaggttacttcgcctctctgtgcctcagcttccttatttgtaaaatggtgatgataacagtacatacctcataggacgaaatgagaaaatgtaaacaaaactcttaacatagcgcctgtcacattaataaatgctcagtaaacgtaagttccctgagggatccaggcacctcacaggcacccaacaacacttgatgaaataatgaatgaggtagtgagaccccatctctacaaaaaattaaaaattagccaaatatggtggcacatgcctatagttccaactacctgggaagctgaggtaggaggatcacttgagcccaagaggttgaggctgcagtgagctgtgatcatgctactgtactccagcctgggcaacagagcaagactctgccaaaaaaaaaaaaaaaaaaaaaaacacagaattacacttacacatagattttctttctttcttttttttttttttttttttgagttggagtctcgctctgtcgcccaggctggaatgcagtggcgcgatctcggctcactgcaagctccgcttcccgtgttcacgccattctcctgcctcagcctcctgagtagctgcgactacaggcgcctgccacagcgcccggctaattttttttgtattttttttagtagagacggggtttcaccgtgttagccaggatggtctcaatctcctgacctcgtgatccccctgcctcggcctcccaaagtgctgggattacaggcgtgagccaccgtgcccggcctacacatagattttcaatccatattagaaaggctaacaagggccatattatgtgtagtttgagaaaagagagggcaggaatatatcttacttctgtagattcagtgcctaccacgtagtagaagctcagtcaatctttttttttttttttgcgttgaactgaaaataattatgttatgctgaaatccctcccatggaacccaggggatattggtgaaattaaaccacataaaacttgagtagtgttaatgttttgttcataactttcatgaattttgcatatatttcatggcatttacattaaattcataaataaaatcttaaaaaataataatgaatgagggagaatggctgggaatacctattttagatggggtagtcagagaagaccactctgagaaggtgacacttaagctttgacatagatgataagacagaagtcagctgaagagcaaagggatcatattgccctggaatcagattacagaatagacctagaaaattcgcctttgacattttaataccatgtataaatacagggttataagatattattccctctggaccaaagattgtcataacacccaggagccaaagtcctccagatacctctgtctccatcacagcagctctaactgtgcagttatttgccaccaaggcagttcctttgggggtttctttccatttttttaaagttgttag

SEQ ID NO: 1883969 - DNA, 4001 bp, Homo sapiens
gagagagggtgatgacaagagttcattcattcattcataattgctttttgatttaagcaggcgagtttgttgtttaacaggctgggaacatctctcttttattgaaacatgtgacatagcaggttaaactcctaaagattcagcacagcagatgagaatcaaggagtttccttcttaaaaagcataacttgcatatgaatgaagatgattccaaattatgttttttccccatgaccctaaaattttatcccaaatggagttataatattagatattgatcagatcagcatttcatatcaaagctcaggacatccatctaaatatttaaaaatctttcactctcacagcacatcttgtgatcaatgtaaaacaaacagataggaacaaatcaaatatgagagaagggtttatggtgagagaaaacagtttctatcctctcccctccccagtcctggcctcactctccagaggcaacttcttgtaaacatttccatttttagtacttctggtgggtgcctccacaatgcttagtagcatgtataggcacccttatttttttattcatctggagaaaatttatctacctcctgtgatggaacataagaaatggcctcattatgcacctctgcttcctcccttcatccttccaaagttttatcattttggcataattatttttagttttctgttatttacttttaaaactttaaaccatataattgtactttgattctgcattccatccacctcagggagagtaacggtctggggcggtcaggttgggtctgttcccataccctccccttcttctgaaaggactctcccctccctcccgggggcctgtgcccatgaccagccagtcacagggccaggcatatgtcctgggccctggccactgtgggatacaggcatgctccccaatcttgaccactaggaatcctgcaggactttcactactaaaactgctctcttcaggtcacaacagtaactatcagttcaactacaacaaaggtttctgaagacaatggcttctccacccaagcaggttgtatataaattccaaatagaacttggcatcaccctgaaggaattctaacttcacactgttggggaaatttaccaagatagcttcagagtaaactaactttacacagcacattaaaacaaaagacatttattcagcgtcatgatcagactattacatttagcaatcaacagcatgggtgcaaaaaaaaaaaaaacctatattaaaacccttagctggaatgctttacactttccacagaacagaaactaaaataacctgttatacagttagtcacaaatacagtcctcgaattttttgcccatacacatgagtatttgtctaaaacatgtcttctttgtagcagctaggccctgccaccactgtgcttggctgagttcacaaatctgtcgtaacctgtagattccctgtcatttctctggctctcctctcctgctaagctttgtttcctaattaaaatctgccactgccatagctactgctgctgctggaaccgccaatagccaccttggtttcatggttttgcaaagtataggcctccattgccacaggggccagagcttctgcctccaaaatttcctcccttcatgggtccaaaatttgaagactcattgttgtaattgccaaaatcattgtagcttccaccacctccaaaattgcttccatcattaccaaatccattacagccatccccactgccaccatatccaccaccaccacgactgccaccaaagccaccaagaccactgaagtttcctccaataccaaagttgtcattcccactgaaaccacctccacgaccaccaccaaagtttccagaaccacttcgacctctttggctggatgaagcactagccatctcttgctttgacagggctttcctaacttcacagttgtggtcattcacagtatggtatttctgaatgacaatcttaacgacggagtcatggtcgtcaaaagttacaaaggcaaagccccttttctagccactgactcggtcagtcatgatttcagtcaccattaaaagggattacccaagcaaaatcatggaattattggttataaaagtaattgttggcacatcctatgtaacatatctaattgaataatggtaccagattaaattatagatgggaatgaagcttgtgtatcatccattatcatgtgtaatcaataaacaatttaattctcttgaaaaaaataaataaaactgctctcttttgttctgggattacctctaggaaggaaatgtaaaatcagctcttgtagggtgcctccaggcccctgacacgtggaaagatcgtgcaggagaaaaccaacccagaggtcagtggaggtggagaggaagttgtgagagagatcaagctgtggtggtgagaaaggcagctagtcctgctcactgaagcctccattgcttccggactgtcacagttacaccgacctgacaatttcagtattagcattagagaattgtttcagctttccaactaacgcagggtgtattgtacaccccacctcaggtaagatgagaattagcacgtaggctgcctgtgctacttttctgttgctgctgtaacaaatttccacaaatttatgatttgcttagagcaccacaaatcttacagttctggaggccagaagtccagcatgggcctcacggggctaaaatcagtgtcacagggcagctgtgttcccatgaggcggctgtgttcccataaggctccgggtggagactgtttccttgccttttccagcttctagaagctgatggagttccttggccagccactttctccctccattgtcacagcaggtgtggcttcactctgacctcttctgcttctcccttccaccgaagggcccctgtggttacactgggtacacctgggggcttagcctgtctaatattgccacaccctcttgtgaatcttcttttttcttttctaagagatggggtctcgctttgttgcctaggctggagtagggtggtgtgacggtaactcactgcaggcttgaattcctgtcctcaagcgatcctcctgcctcagcctccgaaagtgctgggattacaggtgggagccacagtgctaggcctctcatgaaccctgtcttccagaaatgtgttggactctcatccattagtaagccatctttctctctttttttaatgcttttcccttatagatttactccattttaaatttataagcttaaatttcagtgatgatgtcttaggaagaacaggagaggaggaacaaaggaacaaaccactttaatgggaagctgaaaggacccttttaaaagtgtgcagtggggagagcctgggcttggtctctggtaaacctggtgaatggtgggttaacactccctccctcactcggtgttgctgggaggataagacagaacttgtggcgagcaggtgtccaatagctgcctcttgctatgtgcagccagtgccacatccaggctgagtgctgtggggagtgtggctcatcccgctggggccaccccaggcctcgctcactggagactccagaatcagggctgactgagcagcttgtggcactgaagaatgttctaggaaaggaggtgtgtcctccttggaaggggaagcttcatggtgggtgagctgagggtaaggggtgggtgagggccatttgaagagtcacctcccctacattcttttatcttttggagcctccatccacgccacttcaaacaatgaacacacacatccaagtcagtaagtgcactttgtgtatatctatataagtgatgcgcaattactatataacagttcactagctgacctgacattattcacatatcgtaggcatgtgactaattgtaggtgtgtaatgaagtgttcacatcttattacatatttaattcctaaggcatttctacagttttatttgagaattttggaactgccagtatgtttttcatgtttcaa

SEQ ID NO: 1883970 - DNA, 4001 bp, Homo sapiens
tggagatgttctaaacacagctaggactcagcaagtctaacacactaaaatcatgtgattacattttaaaagaaagtgcacaaaaaccaaaaagaaattttgagacttttttatttgaaggtaatcttaatgctattaaattcacaaatgctaatttaaatacccaatcctatttacctaaaacacacattgcaaacacacaaattatctgttctctccacatgtcggcgtccattcatatcatggtttggaaatggggagaatagattccccttaaactgcaagtcagcaggtgtttctttacagttaactttagcaaaatttatacaaaatagtaattaacaattgatcttctttacttgttaactcacaaggaaacaccttcaaaactgcattttgttaaagtttctgtactaaaatgtagaaaaactgaactacacagatattgaaaagttaaaaattccttaattttttattcctggtaccactaccacaatttacagggcaatatacctgatgtaatgaaaagaaaaagaataagacaaagctacaacagataaaagacctgaggaatgtacatctaattgacgctacattgcattaatcgatagctgcacttcctgcaaactgtggctatgacagtcctgaacaagaagggtttcctgtttaagctgcagtaacttttctgattatggatcatcgttccttctgtgacagatttttacagttcctctaatgcacttgggacgactgtctcaaagtaacctgtagctttcctgacaactcctcactctctctcctgctaagaactgtagccctttcctgctgtttttagaaccttctgctaccatatccaccacttccaccaccagatccataaccaccaccatagggactgcccgagcttcttccaccaaaactgccccctttcatgtgtccataatttgattgctgttgtccactgtaatttccaaaatcattatagttcccaccaccaccatagttactaccgtcaaaatttcctccttcattgtaaccatcatatcctccaacaccgccaccatatccaccaccttggtttccatatcctggtccaccaccaccatacccgcctctactactataaccaggaccactgccatagttgccaccatcacctcctaatccattatatccacatcacctcctccataactacctctgctgccaccacctccaccaccatagcctcctcttccaccaaagtttccatcacggccaaaattacctccaccacctccaaagtttcctctgtgacccatacaattgccagatccacctccacgacccctctgtgatccagccggctgcatcacttgtttagcaagggcctttttcacttcacagttatgcccattaatagtgtggtatttctgaacaacaattttatcaactgtatcatgatcatcaaaagttacagaagcaaatcctctcttttttccactctgcctgtcttccataacttctatggtttcaatcttgccgtacttttcaaagtagtctctcaaattatattcttctgtatcttctttaatactgccaacaaaaattttcttcactgttagatgggcaccaggcttcacagaatcctctctagaaacagctctctttggttccactacacgcccatcaaccttgaatggtcgagcacgcattgctgcatccacctctgtaacacaagaataagtcacaaaaccaaagcccctggaacgttttgtttgggggtctctcattaccagacaatctgtgagtgtgccccatttctcaaaatgttctcttaaactatcatctgtagtttcaaagctcagaccaccaataaacagttttctcagctgctctggttcctttggatcatggccctcctccccccagtggcgacggcgactgccggagtcgggctgggggcaaccaggcggcggttttacctccattttgagacaggactcacctcttccaactcgagatcaatatgggaccgagaggaaggtggccagcgttttcatttaggcaactctgcctggatcagcacactttccctctgcagttcaggacttactctgaacttcattgataacttgtgacttcaggaaaaaccacactgtcttgcagtatctcaattgagccactgacatggacctgaaaatggctttttaaatggttagatgaggccggaatgtacttttagatcaaaagtgaagtaaggaggggtcaggaaagatgagagttgctggtaattttggtgctctagatgccctagacctggggaagggggaatggtcagggatgctggttggaaaacatgttttcctgagctgtggacatttcagtatttctcactccacatttctaccacttttggttgttctttgaacatcttttgcatattttacttgcatgcaaatattctccccaaatccactgtttcagtgctaagcagcccagctccagtcccatcttctctgggagctttccaaatctcatcatcttcctctgagataccatagctttctgtctgtgtttgactctgccatgtcttgagcctgctctctcactggtctgccagctcttagaaggctggcatcattattcttctctgactgtcccaggtgtttggcacacagtggatgaacctagaaggagcttcatgtgtgcttgaacagaatgaaaggacagctgtgattttctcctgtgcggctgatgccttctttgtcccatccagaagcaggattgcattgagatccctggagttgtctctggcccttgtaaaattaaatgccaagagaaccttggttaacagaagaaatggagaaggaccaacttctagttttctgtgccagaggtcagtgcattgcttcttctctgtgaattgctctgacttgctgaattgaaactttctttacttttgggcagataagagtaatttgggggcagataagagcttctgggaagttgttattgcaaatggcttggcagtgatgctgctacacaatggttatccaggactcgtttttttcctagtttgagttacttaaaaaaaaccctaagaattacttgatttaaaaataataggtcaagaccttctggcactactgaaacttctgagtgggcctcagatggtcgcttgagaatctattcagacaacccagcagttggcagatgtaacactcatcatgcctctgcactcttttgtcattagttgattacataacaaatatcagtgggctgggcgtggtggctcaggcctgtaatcccagcactttggaaggccgaggtgagtggatcatgaggtcaggagatcgagaccatcctggctaacacggtgaaaccccgtctctactaaaaatacaaaaattagccgggcgtggtggtgggtgcctgtagtcccagctactcgggaggctgaggcatgaacccaggaggtggagcttgcagtgagccaagatcgcgccactgcactccagcctgggcgacagagcgagactccttctcaaaaaacaaacaaacaaaaacaaatagcaagcatgaagttgtgtgcctgagtgaagccctagcaaaggaatcaaagagcaaacttttacatgcaggtcagcaactgttggtgtgctccacggggaatttaccttcagggcacactcgggcccccactgtgccaccatcactgccgacctccctgcccaggggaatccgctcccaggcggattctccctccttatgccacttgtccttcccaccttccatttacttatgtgtgtcaacacaaagctgtccactgactctctcctttgttctggagatatcattctgggaataaaaaggagagtggatgggccataaacagtgtgtgggatggaaagtatcagacaatttagatgtctgtgaggccaggggaagcctcctctttgggggcaaggacactggctcagtccaggctgtgtccagcctcagggccagctgggagcacg

SEQ ID NO: 1883971 - DNA, 4001 bp, Homo sapiens
cacgccaaacacagatgaagctcatcatcttccgccagcagccgcttgcagagggccaggccaatgccactgggaggacaattcagacacaagatgtgggttatctgggatggcatcaggtagaggcatttctctctggttcagaaaactgtgtcaacttgacctccaatgagaagcccagatagaaagaaaagactcaacaattatttaagaagggaggaatcctacactccaatagtcacttgcttgagacacagcctagtttgtgtttttctcgttttgaaaaacttcagtgacaaaataactggactgaaaacaagaattgttctttagtttttctactactgggctttatcctgccagtggttttcattttgtacttattatgccactcatgaaaatgatttaatatatcaccagtaagggctcaaaagagcatcttattagctgtttcctatgtgcattttgactttgctctctaggctcctcaggggcaagggctctaccacctattggtatcataaacaccataaggagcaccagaaatctctgataaaggaagagatgaatctttcaggatgaggcatcagtaacatggcaggatgtacaaatccctctcaacaactatgattaaataatagaaaaagaaagaactcaacatgattaagtagaaggtaggaatacactaaatattagatgagtacaccacttggaaacaaagaacttcaaaaccagcattgtaaaaccgcataggagtggtgacagcagtcagaccagcctggctgatagcgatgaaaagctgggtaataagttctctttcaagacttaagttgattccaggcaaatatgttaatagttaaaacccaaaaagagcctggaaccatcagtaatctattagcaccaacaacaaagcatcaaaaatatttatttgtcctcacatgagaacagtaggcatttaatatacaattgcacatatcacaatgtatgtaaaaggaacagacaaaatcaattctgacttactcagtaccttccacataagaagcaccaatcaacggttaaagtcacttgagagggtatgctaaaaagttgccaaatgcagacacctaccaagctggcttagttaatatgcatgtggttaaataattcaaagtggatcaatcttaaatgtttaacatgtcctctgtcttaatcatttaaaaatgtcaaatgcaactagtagaaaaatggtttgattggcttcatcctccacacatttttcacagaagtgcaaatgacaggtaaaacaagcaacagaagaggctgagagactaaacgagcaaccctggaattattatgagctggttattctgcaccccaaccatgccttcataggaaaagattaattttctctgggtttctgaagagtatgttagctctctagcactgagctaaatgaaacgggattgttttctctccaccgtcctaatgttcatgggtgtccaaatttgtaggcaaaaggcttgtacagacaaaacacctggagtataagacatgatcacgtggtcaggagcaaactattgggcactgacgataaatacgaacagtaggcaaagatggaaaaggggcggagcccgcctgagtaccccattgccttgataacctcaggatcatcactgcgacactcatcacttactgatgctctagttttccttttcactgtcatgtttaatacaaagcaccagttactgagcacctcaagaggccgacatgccccacacctgctgcagactccggggaacctaggcaaagccaggggcgggcgcttccggggtccgttcgtggagggtcgcagacccctgctctctcggacccctgatccgctgccgcctctgccaacacaaaggagcctcacctgctagccccggtaatcaaaaccacctttcgcatcttcgcgcactcacacttccaagcagtgaagcaaacgccgccgctgctttcggaagtcctacgatttcgggccgcctcacccgtcaccaatcagagtacggccacgccccgcctcccgttgcgtcatcgagtctgagctgatccctccaatctcagtccgccaaccgttccctgccctcggagacggcgtcgggtgagataggccgaggggcggagctgcgtgacgcaaagcccggagccattccaggctcttctcgctccgccttggcgcaggtgtctgtcactgcttcctagggctcagcggacccctgatctttaatcctggtgggggcgtcacccggcctagcactcaggacaggatctgtgacacgcactgggtctgtgccctggcgcctgagattggcacttcattgcaggaaggcctcacggtatttgcaccagtgcccattctagagaaaaggtttgggtctaggagccaaagttgggcgattattatctaattttccactcctttttggatgtacagatccaggcattgtgccacttcacagcccaacttttgatcccagacctcctcctctaaagaaacttatttgagaaaatgagcactgattttattaagaactttatgtagaatcagacctaaattaccagtattcaaaacttggaatgtggcgtggaaccagaatctcagaacttcattcgccgaagtactgagaatgtgctgtaaccttctgtatcagtgcatctcaaactgtgctaaaggacctgtttttgtctccaagccattccagatgggtgcttttagaaaatacaaaaaaaaaaagtgctagaaaaagaaaagcaaaaggcatacaaaacacaagccccgatattttattattagatccaagacatataaaagtactctgccaaaatgaggcagaatagggtttggaggcagggtacttaaggccacttcgtgctgacttcctaaagctcaatcaaggaaaaacagcaagggctggaagtagggaatctgagaccagttggtgctggcttcccaaagctggatcaaaaggaaaacacctgggtctgggggccgagagcctagggccaattaacaccaacttcctaaagctaaaccagaaggaaaaaccccatctccccactccccagtagcaaaggatcaaaggctactctccctacaaccttctgttcccagaccaaactgagggttgggctgctatttttcaaggcccaataacgagatgcagatgagctggggaggaagagagtttttatttctgtaaccggttgcagggagaaggcctggaaattatcgccagaccaactcaaaattacagtttttcagagcttatataccttctaagcgaactgtctacgtgtaagtgtgcatttatctaaagacataagtgattaacttcttttaatctgtaactaaggtctgagtcctgaaaaccttcctctggagcctcagtaaatttacttaacctaaatgggtccaggtgctggggtgattatccttgtattctctcctgctaagtggtggaggtttgaggagttctcttagaccccccaataaacttgtttgtggaggcctggggagtttcttcagaccacaataaaacttgtttaatcctaaaggggtcctgttaagaattctttctttattttgtatgctttaagaggcccaggaaaggcctaggcaaaattcttaatgggcttttgttacaccccagcctttgtataagggcactggctttcaatatttaaccacttagtcagtactgaaacagttgttagtgagacgtggcctgccacacttccaccgtgtctcagatggaaagggaaagtgccttggattggctgtgggccaaccactaagcatgggccatgccatcatctgcatagggcacaaattcacctcagcctttacttagccataaaccaaatccttcatccagataaggggtagcgcatagggacctcaaaagaactatttaaaacccagaaaactttgtaactgggcccttgagccacttgctcaggcccactcccaccctgtggagtgc

SEQ ID NO: 1883972 - DNA, 4001 bp, Homo sapiens; identical to SEQ ID NO: 913738

SEQ ID NO: 1883973 - DNA, 4001 bp, Homo sapiens
ggttattggtgccgacaccaagaggaattgccatctgaacgaaaacattgagaaaggtagcccccgcccattttctctgtccagttcccagggttttcccatttttcccacccgacggcaacctaagaagagagtctaggcctttccggctaggaggcgaccactgggtcacctgtgtgcttgctgtgccgtctttagaaggctcggggagcagcacctggatgacgtctttgcttggtcaagcccttgtcaggctcctgcaccttctcctaggcatccgtgctcttcctcgtaagatcctgtttcagcaagaattctaccaggttgttttagcgagaaccctgaccttggcatctgattaaattcctcaaccccgtccctcccaggtgacgtctgatcacgcaggcctgtcttcagcaggtcttgttaggtcggtgtagccagaacccccttcccactgatgttttctcttagtaacttttaatccataggccccagcctgctccttgggtgttgtgtgcagttaggctggttctccatggaggtctctttcccctattgaaatggttctcagtaaagtcagactttcctgctttaactcctgtccagctctggttttctttgaccatcttaagccattttattattttttaattttcatttttgtgtcttttttataaacacataataattatgcatattaatggggtacatgtgatagtttgataccaccatgtcatgcataatgatcaaatagggcattttgggatatccatcacctcaaacattcatcatatctttgtgttgggaacattccaaatcctctgttctagccacattgaaacatataatacactgttgttaactacagtcaccctactgtgctattgaacagctgatattattccttctctatcgcggtatgtttatacttattaaccaccctctcgtcatccctccccactgcccttcgcagcctctggtgtctagcattgtgttttctgcctccatgagatcaacttctttagagcccacatagcagtgagaacatgtgatacttgtttttctgtgccaggtttgttccacttaacacaatggcctccagttccatccatgttgctacaaatgacaggatttcattcttctttttttttttttttttgagacagagtcttgctccattgcccaggctggagtgcagtggtgcaatctcaggtcactgccagctctgcctcctgggttcatgccattctcctgcctcagcctcccgagtagcttggactacaggcacctgccaccacgcccagctaatttttttgtatttttagtagagacggggtttcaccatgttagccagggtggtctcgatcttctgacctcgtgatccgcccacttcagcctcccaaagtgctgagattacaggcgtgagccaccgcacccggcccgatttcattcttcttttgtggtggaatggtatgccactgtgtatctaaccctcatgttttcaacccttcaaacctccacggacacaggttgatctcatatcttggctgtcgtaaatggtgctcagcacccaggaatgctgcgatatctctctgatagactgatctcttttattttggatatttgccctggtagtgggatttctgggtcatctggtagatctatttttagtttcccgagtgttctaatccgctgagattctgaaacgttgtgtttgggcatccagcagtcccctttgccctgcccaggtgccacaatcacaggcttttctacgagaaacagactgaggacaaaaagcacgaaggacaatcgtacagactccaggcatgcactcacacaaatggcacttacctttgcagggctgctgcaccgagccttcagcgttgtcttgtttaacaccaagaatcgaatcctgatacagcagaggtcggacacgaaagtcacgtttcctggtgagtccgttcaaccaagccccggactgaagagagcatctcatgtgacttgaccggaggaatctgggacaggaactctctggtgctcagtgccgcactgtggtgagctggcagctcatcctgcagaaaatcggcagcttaggcagatgctaattatgctgatagctcttcagtaggctgggttttcttttttaaaaaagtaagaaactatatgagtttctgggtttttttgttttgttgtttctttgcaacggcaagttacttaaatgcagaggaatttatcaacctaaggatttaggggattaaaatagcatttagcataaaattaactaggtaataataataaaaattatcttacaggtcttagagttttaattatcttgtacttcttaaaattacaacttaaaatttttttttttttttggagatggagtctggctcagtcacccaggctggagtgcagtggcgccatctcggctcactgcaagccccgcctcctgggttcacgccattgtcctgcctcagcctcccaagtagctgggactacaggcgcccgccaccacacccgggtaacgttttgtatttttagtagagacggggtttcaccgtgttagccaggatggtctcgatctcctgacctcgtgatatgcctgtcttggccttccaaagtgctgggattataggcgtgagccaccgggcccggccaaaaaattttttagaggggaacagcatttacgtcaattgtggtcatttaaagtgttttggcctaggctgtcctcaaattttcaaaaccagaccttgcctgagccattaaagcgaatggctaagcacggccagctgtggccgaggttttctcctcccttagttcttcctcggagccgcagtgggtacatcctgcccattcccaaacccaccaccatacttgctggtcaagttgtactcacgggctccttgatggagctgaatgcaaagtttgtttcagaaaaattcaggagctgcaaagttaagagggtcaactgtagtacatagtcaacagtttgcaaataaagcccctggagctaagatttcctatcatgtgttagccgcctccaggatacataggggcaggtgggagtaccagctcttgtacttgcaagagtggattcaacttcagccaaactccttgcagagtgaccgaaggaagcactgagggtctgaggaacgagagggaacagagatttactgaggagagtgtgacctcccgtcatagcgctattgctgttacttgggtaaattaagtagaacctctcagtaaggaaacttggtcaaaggtattccagcagtcttcctgtgaaaccatgctcactgatcaccaccctcaaagtgcagcccagcttcctcagcccagctggtgcagccacccagcccacagccccaccacctcctcccgccaccccatggcatctcaggtcctctgtgggtacaaaactgagtaggaaccagtccctctcctaagacatactgggatagtgccacgggacatgtgtgtgcacatctgcaggaagggccgcaggagcggtcagggccagccccgccaggtggtcatgtggaagaccctcaccaagcccacagccgtggaggctggaggcgagtgctgctctgagagcccatgacaaacccactccccccgccaggctgtcttctgctgatgacggatgatggttttacatgaagcatctgcatttgtatttaatatattcacttttcaggaataaagagggatgttcccacatgcattttttccagggtattttaccgactcctgtagtagccacccattatacaacccagcagaactggaagaaaaggatgccatcggagtgaggagggcagcccagaggcgtctgcaagcagagctgggaattcctggggagcaggtacacacagcatccagtctcagctgtgtccacgggagtccaggttggcagcgggcagacggtgaacaaagtccaggctggatctacaccattgacctcatgaagcaccatgaggatgaaggatggggct

SEQ ID NO: 1883974 - DNA, 4001 bp, Homo sapiens
acatgggccttccaaaataattggaacacaattcctgatttcagaactgtcaaaaactcttgaaggcaaaaaaagaaattatgaggctctgagaaatcagaaatcaaaacataaaaataaaacataagtaaaaccatgttgaaagaaatccagaagagaaattatacaatctaaccttttcaccccaaatctgttcctcctttttcttgccactccaacattgatgaaatgtagagtaattgaaatttacttcggagatacagcaagggactccaaaaggccatggagagagaatttcaactaaaattgaaaagccatacagaggtctgcataaaaaacaaacagcacaccacaaatcaaaacctttaagataaaaacttaattagcatctacaggttgaatgagctagtaacttatgccaatcttatcattacattagctgaaaagaaaacgaactgacagattaatcaaagaacaaagcagtagcttcacttcagcaaaagctccataggatcaccaaagaataactggtgtgactaccgttttctcactggtggattagtttttggcaagatttttaatgtctaaatttaagttaaacttcagtttaaagaaattaagattaacttcatttagtcacagcacacttccaaaacggtcaagcttagtactgctgaacagctgtagttgcataaaaacaacgcatagtcctaagtagggaaatgggaaagggctttaaatacaaaaacaaaaaaaacatgcacacccgataagggcacatctgaatcccatccttcttatcctatcataacacaaaacagctacggttttctgggaaacatcctggaccgctaggggaaaataacaccagacatttcaattcactgtaacgaactctcatcaataataataacctttagctgttgtgacaacacgacataaatcaaaattaaattgaatttttaaaattgttagttcctacgtttaaaaaaaagttgttttaaatacattctgttctttcaaaactgaatttcctcagatcacacaatttaagacgcctttatgtcttcttccgcttgtcacacgtctttcgggttctgaccagcacatcaaggggactctaagcaggccacgtggttagtgtttgctagaacttgtttagcttcagatccagtcatcgagcatgctaggcttggctactcgcgctccacacagtttatccaaagatctaaaccccgaatgaacctgaatagttatttgctacaatgtctttctcaaatctcacatgttcctaaaataagggtgcccatgcagtagagacggatccgggcaggatcattagataaaatacgaaggctttaaacgtccttctcccaacaatcagcctgggaccggcgtcggggcagcagcctcaccaagattcggagcgacatcctcgccaggattcgaaacacctaggagacccgcgcccggctgactcccagcccctgggaccccgtgaagacgcaaacctcgggacgcctcccgcagaaccacctgtcagagccaagcaacagtccccgccccggagcctccgagctcctgctcgaaggcaatgacagcaggagaccccgctccctcggggttctcgcggccataggcgccgcagtccactgccctccggctaaagaggtcccgggccatcacctgcccgcctaccgaccacgcccgaccctccactgaactgagtctccgtccggatcagccggcccgccacgaacccagctccagtctccggccgctccttcttatccgccctgtcctgccgcgtcgccgccgtccgagccggcagcctgctacttacctcctgacaactgcatggagtaaaccacaccgccttgttaaatgccgtcgccgccgccgccgtcttcgtcaccgtcacagtcgccgccgccatctttgttgtgtctccgactcccttcccgcccccctgccttgctcaagtctcgcgtgagcaggatggagggcgaaagcgaggaggggcctgtttgtctctcttggggttccgtaggcagcagggggcagggattaagggggggtgtgtgcggggcgggtactgagtgggcggggccttgctcgggtaactcccaggggctggctagagacccagaggcgcagagcggagaggcctgcggcgaggatggagggcctggcagtgcggttgctgcgcggcagcaggctggtgagtgcgttcgaggctggcgtcctgggggcccagggcgaccttggcccctggaatcgcagctggcagagccttctaacgggcctcggggcgccggcctgagccccgctccacgtcctgggtccccagactctttacccgcgggcagtctatgaccccgacccccttcaggcctctggtggaggcagctggtggcaagggggtcggggctgtctagaagctgctttggcggagcaagtaccttgagtggagtcggagggtcgcgtccgcaagatgtcctttgcaggccgttgcgtcctgagagccaccgagtctggatctctggatctctggatgcattttgcacagatgtcacctccctgatgccctaacgcacctttcccgagtgattacatttcacaccccctcccccaaaaaagatagttaaaatataggcccagtctcattctgagcaggtgtctccctgtccttccttccgcggccccgctcaaaggtagtaagggacttcggagttgttcgggcttcccggccagggacagagttccctctgccccttatctcatgtctggagcctgggtatcttccgtggatagactcaccgccgcccaggggagccggagccggtgccggtccctcttccatgaacttaagctgaaaccagcctcttgttgtgcttaattcttatctgtgcacccacacaaactgttaacagcccctgtgttaacatcctatgctcttcaccccttggacctattatatagcatgcttttcagaacatacacatttggatacacttgtatttgtcagtacacttcactgggaattttcccactgcttacgtgtgcttttaatgtttcctttgcatttgctttaatgagttaggctttccaactgctgcttcagtcttatgcccagaggcagaactctgaccctttttcttattagagataattaatgttatttgactgttttacaggcctgaagtgcaataaaaaacagtaagtgattattgtttaatactgtttataattgttggttaataacttagcaaagaaaatttctttggttttacaatttgactctgttttagagccaaaatttattgaccgcatactctgtggtaggcacgttctcgttctacctgagtcatctcaattctcacaaccatcttaacaagtagtttaatcttgcagatgctgaaaaagaataatagcttgcccacagatagaaagggatagagctggtggtattcgaactctggtctgattctaaacttaaccttcatatactactgtctccccgtccttagagatatcaaaaacctattttgtttgaacttttggtttattgtggcttatagtcctttatagtttttgaagctcttttacataaattagctaaattgattgaacatcgactgtagcatagtggttaagaacgtaggttctgtagctaggctgcttggatctgaacccaggccctctcacttcctagtggtataaccttggacaggttatgctttgggtctcagtttcctggtctgtaaatggagagaataattgtgcgtattccaaaattgttgtgaaaattaaatgagctcatatgttcatgtaaggcacttagaatagtgctcggaatgtagtcagctctcggtaaatatcagctcttactgccatgcacgaagcattgtgtgctatgccagatgtaataatgaataaaatactctacctccaagaagtttatcttttagaggaaaggttagaactatgtgcaactaacc

SEQ ID NO: 1883975 - DNA, 4001 bp, Homo sapiens; identical to SEQ ID NO: 913752

SEQ ID NO: 1883976 - DNA, 4001 bp, Homo sapiens
gcctatttattacagttctatgtttggtctttggcaaaatttgaccatgattattaaaatccatcttccttataattttggtttctaacctattagcagtggttgtgtttctccacttcaaattgcccagcttgagtgttctagagaaaacagataaaagccttatagttattttaaacattcagattactactgtaaactctgttaactttttttttttaaatagaggttcaggaaaatctcaagaaactgaaatttagaatattggactacctataaaaaagcagtataaagggtgcctgaaatcgaactgctcactgacatttgtagggaggtttgatttataacaaataagttgatcaaagaagagtgattgttccaagttagagatctttgtgtgggttagggagtccgattgtaattggatgggaaataaatattttttttcttgaattgtgattggctaaaatccttttctttccatggtattttctaataactgaatctggggattttctctgcttttattatctgaccagtgtgtttgagctgtgtaccagtactaaaagtactaagactgtcgcagacacggtttgtgaaatttcaggacgttgacaagggcccgccacggagcatttgctgttcttataataaagcagtgacgaatttaaatctgtgaatagcttaaacatgtaattagtatcaccacaaatgagaagaatgaaaggatcacattttccccctcgttttcccttgaagtcatgaacggttggttctgctgtgactttggggcttagttttcagtagaagtgttgtcctgctctgctgctgttactgcgggactgctaattcaggctaactcaggcggcgggcgctgtgtgctctgaacatcaaaccgcgggtgaggcgtcaacccaggagtttattttgtgatcagagtggaaccactacacttcactttcccctcacctccacctctgagggagcaacgaatacaaaggtagacccccaaaagctttgaatagctgtcgcctactttcccgcggccctcttcattttttcgtctcccgctgccgccgccgccgccgcctctggatctggacggacccagtggccgctgccgcctccgcagggccgggcactactttccgtctgcggtggttccgccgaccctcccgcggctgctgccccgcccgcgccggcggaaggagacgcgctgcgcgccgccgctgcccggggagggagacggagcagtactggccgcggcgcggtggcggcggctgggctgcctcggggtcttcgacggccgcgttgggttttgtttcagttttcttgtgtggcgctgcagcacaaggctgcgaatctgggagtccaaaggagtgtttgcggggagggcccgaggtcgctgtgtccggggcagagcggccggttcgtcccgagtctgcgctctttcgggtccgctgctgtgtcccggtccgctctcctcagcatgagcggccggtaggagtgaggtttcatcggttccctcgcactggaggaggcagcggccgcttcggcagcgacagctatggcggtagagacgcgggcagagctggtgggtaagcggttcctgtgtgtggcggtcggcgacgaggcacgttcggagcgctgggagagcggacgcggctggcgaagctggcgagcgggggtcatccgagccgtgtcacacagggacagccgcaatccggacctggcggtaagagagtcagcgccccccttttcccctgccgcgcccgcacccggctctcgcagacgtaccttgcaggcttccctctggcgcctcgctcagcccggccaactggcggtcacgcccctctgctgaacccttggcgcgtttgcccgcatcccttgcctgggtccctgcgtctctccgagcggcttcccctgtggaggtggtgtcggagcaggactcccgggatagccgcggaggctgccctggcccccatcccggaggggtcgaccgcggctccccgctgtggcgcctgggcggccacggagacctccccgaaaggcggagccgcgagtccggcgccgcgcgggcaggtgggggtagggggcggaccactcatggcgacaggcggccagcttccctggtatctcttttcttggaaaagtcttcatagtgctgtagctcgagacttaaaacttatcctgtaaggttgctgaaggggagggagaaaagaaaagagaccttcccacacagtccggggattcctatgtgttttagaggcagaggccgtggtggtggctgtgcccggattcatcctctccttaatagatgcttggctttctaaccgtaaaggataaaagtgaaaaattttggtatggagggtaatctctctttctgtccccaatgtgcttttcttgttagaaaggtatagttctttggagtcaagctgtttctgggttttatacgattttaaataagacgaaaaatgttgtcaattaaaatgttaaatgccatgcagaattgattatctttttttttttttggtttcttacatgtgacgctgccagtgctttctttgagtagcgtaggtatgtgcatgatattgagctgtaatatgctctgttgtgttccaagtacattctcactgagggacagcttgaaggtaaggggcggagtagagacaagacatggactagacttccaaaggttgatttatgaatacgtaatctgtgaaatttatttgtaatgccctgagccatttactttttcaatgaaaacttcaaatttaggaaatttttttccctttgtgtgcatgaaagcttacaattccaaattcattgtaatatttgtacaggtatctacctaatattttttacctacctattttaatagtttctgagtgtgtttttgtaaactcgggttttcctcactgtagtcaatgatatggttaatgcggcatgtattaatattgactcgatatcgcaaaataggtgtgttttgctgataggtatttctaacagaaaatagaggtagttttgaaggttttggctggttattttcgtatagaaatgtataatcttccttaaaaagtattggtgatgttagtggttctaaaaattatggcagttcaattcagtaactatttttgtttgtgtaaaaggctgaggtaagaggattgctagagcccaggacttattaagagtccagcctgggcaacataggtgagaccccctcatctgtaaaaaaggaaaaaaaaaatttgtatatataaataacttaattgctctcttagttgggaatttaagtgattaaagagttaagtttgcatatgttagtaaggtattaagctggatattaaaaaataaattatctatggatggtagagattgactggaaagaataggagtttcttcaggtgatagaaatgtttcctatcctgattgttggttacacagatatatatatttgtcaaaactcgttgaattgatactatctttgcgtttcaccatatctaaattttaccaaaaaaagaaaaatgtatgttgaaccatacctatgtgaacccttgatgagtttttttaatctgtctttatttgaaaatttgaatattaatttagtttttttagcctagaatctaccattttagatttattcccagattttcttacattcacatttcttaaacgaaacttggaacagtttagcattaacataatgtaatattcctgttcgactttgattactgcagagtagattttaagttacatgaaattaggctaggcacagtggctcacgcctgtaaacccaacactttgggagactgagatgggaagatacttgagcgcaggagttttgagactagcctgggcaacatggcgaaaccctgtccctacaaaaaatacagaaattagccgggcatagtagtacaatgcctgtggttccatctactggggcggctgaggtgggaggatcacctgagctcagtgaggttgagactgcagtgagccaagat

SEQ ID NO: 1883977 - DNA, 4001 bp, Homo sapiens
tttgtagttttagtagagacggagtttcaacatgatggccaggctattcttgaactcctgactttctgcccgccttggcctctcaaagtgctgggattacaggcgtgagccactgagcccggctgattctgtcattttaatgcctcgctgggcctatttatttatttttaatttttaaagatttatttattttttaatttttttttttttagaggcagggtcttgttctgtggctcaggctggagtgcagtggtgagatcctagcactacaggtgcacaccactacgcctggctttttttttttttttttttttttgttttttttttgagatggagtttagcttttgttgcccaggttggagtgcaatggcacgatctcggctcacgcaacccgggttcaagtgattctcctgcctcagcctcccgagtagctgggattacaggcatctgccaccatgcccagctaattttgtatttttagtagaaacggggtttctccatgttggtcaggctggtctcgaactcccgacctcaggtgatccatctgcctcggcctcccaaagtgctgggattacaggtgtgagccaccacgcccggcctatttttatttttttataaagactgggtctggcaatattgcccaggctggttgcaaacaccaacactgcgcccagccatctgggcctgataatttaaaaggactctcattcctcagataaaagttcttttcggccaggtgaggtggcacgtgtctgtaatcccagcactttgggaggctgagactggaggatcacctgagcccaagagtttgagaccagcttgggcaagatgttgagacccccgtctctaccaaaaatgaacaaattaaaagagtgtggtggcgggcactcgcctatagtcccagctactcgggatggctaaggcgggaagatcccttgagagcccaggaattcgatacttaagctatgattgcactagcctgcgtggcaaaatgagacctcttctcttacaaaaaaaaaaaaaaaaaaaaaattgtgttctcaaccccaacggaccacaatatccagtaaagctgctatggcccctaactctcagcacaggaggtcccttaagaaaatgcttgtccggccgggcgcggtggctcacacctgtaatcccagcactttgggaggccgaggcaggtggatcacctgaggtcaggagttcaagactagcctagtcaacgtggcgaaaccccgtctctattaaaaacacaaaattagccgggtgtggtggcgggtgcctgtagtctcagctactcgagaggttgaggcaggagaatagcctgagcccaggaggtgaaggctgcagtgagccgagattgcgccactgcgctcctgcgctccagcctgggcgacagagtgaaactctgtctcaaaaaaaaaaaaaaagtttgctcctaacccccatctcaacaatccaggactgaaaagaagagggaccatgaaagtccctgaaactacaagttgggctacggctaaagaaggtaaatatcagactgaagtgtaagatggacattactaagtcttaatcatcatttcatgtttatacctcacaggttgagatagatttctcaagcatcataaatgtaaagtgcattagggtaggtctacaagagagctctgagaacatacagcaaggagacccaaacccatctagggctcagggaaggcttcccaaggaagcgatgcccatgccgaggccgaagggatctcatgccccactgcacacaccgcgcgctccccattcccaaacaaggcaggcttttcatgcctccctacctttggactctgttgttcgttccactttcctggagtgctgtcttccctccccttctgctcagtcaggctaacttcacatcctttataatccagctgaaaagtgaagccatgcccacggcctctccccaaaggaggagtgagtatcacctgttctgagctccgaagttcttggggacaccttgtgggaactgcgtgtgtggtggcttgtctccaccaccgtactgtgagctcatagtgttctagagcccagcacgaggcaagctctatagatgtctactgaatgaaggaatgaacgaatgattacattttaaatgggattaggggaaaatgattcaaggcagaggggtgagctgagctccttggaatggtgtctttaccgaaccaagcctgggttaggcagatgtaatgagcccacctattacaagaatctccatagaaagtaggtcagttctttcctatctctttaagaacgagaggccgcggctccgcgcctgcgcactgagagaataaacacctctccttttcaccttccccccttctccctattgccccaaccggcggcagcctcctcccatactcccctccttcggggcgggtaatggtccgtccgtcccagggtgccaggcttgtttcggagggtggcaagcagaaatggtacattccactgccttcattaccttctgcttttcgcgtctcctgttctatttccccctacctaaagaagcttaataggctagccccaaagaaggcgggggagccgggcggaggggaccggtctgagccggtctgcagcgcaagcgcagtgcggataaacaggaagcgggcggtggaggcagcagcagagggagagctcggggcttggaggggaaacagcggaagacctaagattatcgggagggcagcagaggcagagaacgaggacaggacccttggccgtcttcttccagggaacgagaggtcacagcctcgctctccgcttaggcttctggcgccccagcttaaagccgaggctgcggctgacaaagggctcgcgccggtgccgccgcccttctcatccgggcattcgggtccctgcggagagggagggggaagggcagagggggaggggaaggagccggaggggcgcacacttggagctgaagccctctccagggctccgggccggtgccccaacggacagaggtcgaggaggacccgcagaggtggcagcggccgggggcaggaggatggtgcagaaggagagtcaagcgacgttggaggagcgggagagcgagctcagctccaaccctgccgcctctgcgggggcatcgctggagccgccggcagctccggcacccggagaagacaaccccgccggggctgggggagcggcggtggccggggctgcaggaggggctcggcggttcctctgcggtgtggtggaaggtgagcgccctccttccctccccgttttggcactaacacgttctgtcctcgggaggagggtggtggcggggattttggagactctaaaaggccggaaagcctctgggtctgaaatgtggccctcctaaagcgaggggagagacgagatgttgggcgaatctccttgcacgtcttaagacggcgtcgaattcccccctggccactcacaagtctgaccccacccgtcttgggcttggagccaggccacctcctaaggaggcggtggttaagagcctggtgttctgttagcctctgagttctacttctttgtaccttgggatcttattccctagggttgtctggttccagtgaaaaaatatgtgtagtgcttctgtcaccaccctttgtggaaaatcggcccacactgacgtgcttgtacttctggagtgaagagaagcacgtttggcctatagtatttcaagttccacttggcttagaatatttttgttgcttccccccacccccgcaaagattcatttgcaacttagaaaattgccctctttcccagctactgtactttgctctcgagggatgaaactttggctttaatcacagattctcgaagtatctgagatgcgtaattggaatttagtgaccgcagaagcggctttaaaaatgcccttctcgccttttttcccatttacagtcgaaaagaacgatggactttttggtagtgagggaaaattaccagatgcttgtttcagtttctggatgaga

SEQ ID NO: 1883978 - DNA, 4001 bp, Homo sapiens
acctggtggggtcctcctccttgcggtggttttcattatcactcagacagttttgacaacacgagcctatcacagcggttacagctgagctgggactgaacataatcaccattttgcagagaagggttcatctcctcagctgagcatacatctgagaccatcaagctttacactttgacttaaagtgagggagaagcataatctccttagagctttcaaaccccactgcgacaggtggaaaactggagagacaccagaggaaaaccccattgttacctgatccctaaaaatcacacatattgggtgtagtctgttaaacatgttgacttcttccactgccgtcccttggcacatggaccctccaacttgggagacaccaaaacaagctttgatgaaaagacccgtttccctgctgtcccttgattttcaggcaaataaaaaggatgtttctctctgttcttttgctgtctcccaggatggtggttgttatggtgatctgttctgcaaagctctgaaaacatataatatgctttgttttggaatttaccggctgagagatgctcacctcagcacccccagtcagtgcacaaagaggtgagtattggtttcaactctgccctcccacctaatcacagaaatattaatatcctttcctgtcccctactgtaaaggcaaaggtctgtatacatctcctcaacatgcaaattactctgcccatattaaatccaacactgagtttggaggtgatgggaagcatttttctataattactaatagtagatgtaaagacattttggtaagaattcaagttttgtattaatagaataattccatcacctaattacaaaagtctgaatacacaaacatctctcccaaactctagctactaggataacatctgttggtacctaatatagagatattttacattgctagtgtttaagataagtttttttgtttttttgttttttgtttgtttgttttttgagatggagtgttgctctgttgcccaggctggagtgcagtggcacaatcttggctcactgcaacctctgcctcctgggttccagtgattctcttgccttagcctcctgagtagctgggattataggcacacaccaccacacccagccaatttttgtgtttttagtagagagaaggcttgttggccaggctggtctcgaactcctgacctcaagtgatccacccacctcggcctcccaaagtgctgggcttacaggtgtgagccaccacaccccgccctaagataagtggttcttctgccatatctcagaatcccatatttttacttcacatattttaaattgactcgctttttaacttttatatatttatttttgagacaattatatattatcaccttaagcagagaaataacagtttagatgtgccaattatatttttctcatatgcattaaaataaattcatagcaggcaaaaattaaaagtacatcctagaattaccaagatcagtgagtttgcataatataccctaggcaacagtgctgcagagacaagcgtttctcatccctgcttgcatagtagaatcacctggggagcttttaaaaaatattctgattactctaacttaactggtctggaaggaagaaaacatcatatatatattttaaattatgtaaacattttatatataataaccagggattatagtgtatagccagaattgagaacaattgctatagaccagtgggttctcaaaatttagccatcatgagactcacctgcagagcttgttcaaccacagattgctggaccccatcctcagcacttccaattcagtaggtctgggtgggattgcttaagaacttgcatttcctagttcctaggtgatgctgacctgtgtggcctaaggaccacacttggtgaccactgctctaagtgaaacagcgtgattttcttagtcacatctgctgttgaccaaagaaagctccaactaattgtgaagaacaacaaagtagtgctgataagtaggcaggtttcttagattcttccatgtggtgaattccaaattccaaattctctcaccaaagtagattttaaaaggtaaagagcgagaatagtctaaggagacactctgtcatggtaaacaaagatcttgtgatgtatatctgggattgtccgaaaattatgaaatgaaagttgcatcacacttcatgaaacctcttgcggttgggctacttgaaagtgactttgaccttgtatagaaaggtacatgtagaccacgagaagcgaagtttggttcttccattactggctctaattccacatctctgcctgggctcctggctggcctcctttattgagttaaacagaggaagtttccatttaacaagaaaaagaatgtttaaggcctcagaccagctaggagtgcatcttccagatcctctgaaagtcctgagtaaccaggccattgcttttggttcagagagagttgaattctttactcagttactctcaggaggtgacatctctgctttccctgtccaggtatgtcatcaccaacccgccctatgagtttgagctcgtgccgacggacctgatcttctgcttaatgcagtttgaccacaatgccggccagtcccgggccagcctgtcccattcctcccactcgtcgcagtcctccagcaagaagagctcctctgttcactccatcccatccacagcaaaccgacagaaccggcccaagtccagggagtcccgggacaaacagaagtacgtgcaggaagagcggctttgatatgtgtatccaccgccactgtgtgaaactgtatctgccactcatttccccagttggtgtttccaacaaagtaactttccctgttttcccctgtagtccccccctttttttttacacatatttgcatatgtatgatagtgtgcatgtggttgtcatttttatttcaccaccataaaacccttgagcacaacagcaaataagcagacggaccaaaagttatttatgattctgggggaaaaataacccaaaggcatgctccagacataaatagctcactgcaggaacgagttcacagattagaagggagcacttgtgatcaacgtcagttaggcagagcaagtttatttaatgtaaaagaaaagttgattctgatttatcaggattatcagggtgctttgggttttgattttgttgttgttgttgttttcctttctttctttttttatacacacaataagttagcacatgtttatttgaaacaagcaaccaaacagcaatgaaaacatattgattgtttccagtctctgggccgaagtattgcgaagcatttgaaaagctttcacgatttgtgtagatgattatgaaggacctgcttgttgcaagagaacatcagtgatttttttagttactcaccaaggccttttgtcccagagccagttccctctgggagttcttatgaacatttctcaccttaatatggaggagagaatagtattccaatcatggatgtatcaaattctagtcatttagtttaagtgaaaagaggtttgattgcatattaaattgttattctgtctccttatgttgccatatgaatagctattttttttctttcacttttgacatttgggatgaaaagccatatgtatcataaatatcagatgtaagtcattaaaaactgccttcctgggacttttacatcttttaaaaggtgaattacttaccttatgtacagaataaataatgctcaggaaagagcaagtatttttccatgcattctcaggggatctttttactcccctttgtttgattagttagggccccaatgccaggtaggaggaagggctggggcaatggtagagtgagaggaagacaaacccagctgcagatcatgcttttctaggagccgacatgctaaataaattagaatgtaggaggatcagccacagttgactcaacaaagacaaaagccagccaccaccttcaactgttggcacagctg

SEQ ID NO: 1883979 - DNA, 4001 bp, Homo sapiens
tcatttcatcagggtgtcaagttttggagacataatattattcctaatactttaaaattatcctcttagtgtttgtaggacctgtagttctgtctatcatttccagacaactttaggtgttggagagttagtttctcaccaatttctttttaaacacattgagtttctttcaagtcaggaccaggccatctacttccctcttcaagatattcgtcatgctgttccctcggcctaaaaaaattgccatcaccataatttttttacctggctgtctgctactatatcattaggatatagaattattgtgaagcccttttgcgtatgtatgtcacattttccatacacattcactcagatacacatttatgtaacatacacatacacatactcagataactacttggggtttttcctttttcttttttgttttctttttttcttttcttttctttttttttttttaaatggagtctccctctgtcacccaggctggagtgcagtggcactatcttggcttactgcaagctccacctcccaggttcatgccattctcctgcctcagcctcctgagtagctgggactacaggcacctgccaccacgcccggctaatttttttttgtattttttagtagagacagggtttcaccgtgttagccagaatggtctcgatctcctgaccttgtgatccgcctgcctcggcctcccaaagtgctgggattacaggcatgagccactgcgcccggcctacttagggtttttctttacagcactttaaccaaattgttaattacagttatgatatattgtttcactctctgattatactataaatgccaccaaggctggacttgtgcattgttcctgttaatcagcaaatacccagtacccagcaaaacgcttggcacataatagatgctcaatacgtcatggtcaggtgaatgaactaatccacattgagaagaaatgttatgctttgaaaattctaccaataattttagccttgctagaggtctgaaaaaataggtggggattaaattatgaggagcctcagctaacaacttgtggaatgtggatattttcctgtttatatttttaatgtttcccctctctctgtctgtgtcatatttttgtttacactcagtaccctgggaagggagactttcatagtcactctgggctgccttaacaagatatcaaaaactgggtggctgaaataacagagatttattttctcacagttctgaaagctggacatctgagatcagcattccagcatggtcaggttctggtgagggctctctttctggcttgcaggcggctgccctctcactgtgtcctgacatggcagagagggagaaagagcaaactctctggtctctcttcttataatggcactaatctcatcatgagggccctatcctcatgatcttgtctaaacctaatcactccctaaagtacctcatctccaaataccatcacattggggtttgggcttcaacctacgactttggcagggatgggggtccataatgtagcctgtaacagagaactaagagggggctggggttggtaatgagagaagatgctgaaaacaatgggacaaagaagcagggggtgggccaaggagctctaatgagtgtctcctcccatcttcctctggatagcccagaatccctcttcttcctcagtcctgtatgtaggattagcagaggatttgcgtatttgggttatgttagtggtgggaggtggccacgacaggaggagtaggacaattcagtttttctttcttgttgggcatcacatcctctaagggaatcctccttatgagtcctcagttgttaagcaggattactaaaataaaagaaacgacttagtgggccccaaactgcagcctctctcacactctattctataccacttgatttgaggaattatagccttttctctttctatccccctaaaccatgtccaaaggagcttacatggttatttccagcgtgaagctgattgatcagctcgcaggacatcgtggatcagagtgcttcccccgcccctcttaaccgcctttctgatgtggctgcgtgcatccagtgcccagagcatgccggggttcttgcaagagggactggagggtgagggaggagagagtgtctattggctccaccaggacatagatgctggtgacccacactgcgctggacaggaggacctgtttgcagcacgggtcagaggaacacaggctcctccaggtctttccagagcattgactcctgcaagaagtgaatggaagggagccgaaagcctagcccatctccctccttctaccatgatccccagtaagattctggtgtaccgccacccatccagcagaaccggcacagagctttacagacccggcaggcgccgcaagaagtccctgggggacctgttccataatggctaccgggtgaagtctgggcctgctgctccggagaaggaggaaccgccgaacttccggcagtcattggtgtcttgctgtggtgtttgtgcatcctggggtaaggactcacccgtccatggctcttctcctcccaaaagtattccgtattcctggaggctgcctgggaaaaaaagtgctttccgtctaggctggatttggggaactgtctagtggagaggtgatagccaccttgattcctgttttcttggcatacccacccaacgcagatgtgctgggtgaggcagaaatctcgtccttcctttttagatgaatttaactggcctctagtgctcctgaatgttattgagctattaaagaatatatttcagaaatgtgggagaaagtttggcaaacgatgtaatagcttgcttcctatttattaaatggcaataattttcagtgagtcagcatttttggaagaggcatttggacctatcgataatttttttttcaggggctacagtgcgagttgtggctcattttctgtccttacatttgaccatgggagcgtggtcttgcctgtcttgggtggtacttttttattcttacccagcagagatcataagaatagttttctaggcagattttcttttctcaactgctttctgataggcatttggctttatttaggcatccataatatattacagtttaaaacaaatagattaaatgtacatttctggccataaaaatgtcagtcttagggagggatagcttttatttccaggaaagttagcagtactaggaatttctttaaaatggaatgtagtccctttgaaacctagtttaggattctgatgtgggtaggcacagctcaaatacttctgcattatgtaattgtgcctaacaaaattccagttggcaagcaataagtgaaacctagtcaatccttttcattagaactgatataaaatgtttctgtcagctgaaatgcctggaatctaaatattcatgcttctgtgtctataaccctagaattagctggccagattgttatatttcctctcccttcatcacagagaagagctgctctgtactgtaacatctggccttggagagaatcaggattaaagccactagagagaagagaccaaatgatggaattattaagctaagggcacatacactacttcctgagaaaacgttgaataattgagtaaaaccatgggtttaacttagtatccaatacccttcttacttttcctttgaaaggattaatgcatttattaattttcagtagtgagtactcactatgtaccagtcatcactgttctagaagagggtgcacttggtagtgagccagtgagtgagacacctgccccaatagagcagatagtctgctgaggaacgggcaggaggcaggcacctgaacaagcaaatgagatcattttagattgtggtaaaccctataaagaagaatggataatggcggcgaaggactgggctccagatcgggtggtcagagaagacctccattagccaaccttgcaatgatctgggggaagaacattcccaagaaaa

SEQ ID NO: 1883980 - DNA, 4001 bp, Homo sapiens
taatgtgtctgtacttttgttgcttctctatcttcatatcatcctctccctagtagatgttctacagtactgcccagagggagtggtaagaaatgtcttttgataaaaccttaaaagcttaaaacttccagtcactttcttttgcatattccttagaccctggccataggccagtgctcactacagaaggagcagtgtttgttttgttaacacacacacacaaacacacacacacacacacacacacacaccctgtactgcaagatcctaaattttagacttagttcactgttttatatggtagccactagacacgagtggttgtttaagtttaaatgaaattacaggttcagtttctctttgcattagccaccttttgagtactcaatagccatgtgtggttagtggctaccatattgggcagcacagatagagaacatttccatcaatcacaaagtcatatgggacaacatttaccataaaggggaaagggaacgggaatgggcacatgagtgtagtgttcagttaagtagcatcacgggacaacagatgtgaagtagtcctcttaactctctgcatgtatttcctctgtgatttccaaaggaccactaaccaggagaaataagaaactgttgttttctgacccaacaccagcatgcaatgaaagtaggatatttttcattctatagagaaccgtcaatgtgtattttgttatctgatttgaaccctgcacgcggacagcacatttcacgtgttttagcccatttgtggctggcacaggtgtggccagaaagccagcataggatcttgtttgtgtttaagagagaagttcagggagactattcaggcacattgtctggcaagtctagcactggtcaaaccctcataaatattcctgtccaatctgaacttgaaatgttcttgttgtggacacctttggtgagccagtctacttgaggacaatccagtctactagtttagcttcaaaaagcatgcactagaaacaattagaagaacagggttgcttttaaagctatcaggatggtgtttgctgttgttttgttgttaaatatcaatgggttactcaatggtaatagatctaaagagatgaacattgttacatgaatattgcaagaaatttgtggatctcttggggaccctccagacctagttttgagaatgactcatataaacaatttgcagagtctaattcatatactcagactagggttctgaattcttttccccctgggaggaaggaaaaacagaggataacattggttatctggggtaataagaaagcaaggggcagactacagctgccctaagatctgagatctgagtgacagagcctagttcagggaggggctgacatgctgctgaaatgggcttatccagccacactcagagctctagtgagtatcagggtcattgtgttctaaatcatctgtggccagcttaccaaataggctggagtctggcagagaatatctatagaattttccacaaatcagaaattctggtttccagaaggataaacttccccaaatatcctggtggtcttgagttaattgtggcttcctgggagtttctgtcgttggtaagggtcacattttcattgtcccttgacctttagtcttctcagagttgactggtaacattaaaatgagcatgtcttcacttctgtcacttacaaagctcttaaaaaatttataatactttaaacatatcacagtaataaaagcaatcgtatctctttacattgttgcagtcttttggataaagtcccctgaaagcattgtcctggtggttttcaaacttttttctttgatctttcagaatctttgttcaaatgacatcttggctagactccaacatatagcacagataaaaatggagttgggactgcagggagagaaagggtggagcccagctcactggacctctgcctccacccccaaaccaccctctagcctttgagtcaaccactgagtcaccggtgagcaatccctgtggttgcccagagcatcatcccactaagtcctcataatcaccaggcatgattgtgaggtcatcacagtgaattggtgcacccctggaggtaggaaggcagctgaagaggggagagagacaccctccccacccccatatgaggatggtctgtgatgatatgcatgcaggggaagggacttatccaaggtccctgatagatagggactggaattttggcagtgtcttttctagagtagaacaaatttatcagttgaatttgctgtagttctctgaaggtttctttggccacattagaatttttgagccctggcatccaagtaggccaacttcaaaatggctgtgtgctccactcagagattctgctgtgaagactggcaggagattttttagcctattctgaactccaactgttccagttcctcttgctttccagaggtgtgagcacctggaagcccctgctctggtctacaccccaggctcaagattcatcctgctcactcagccactcatgctgtcaccagtgataaaactgtaagtgtcagcagttgcatttgattcttgcacaagaaatagttaccctctaaagacttgttcattcttgtgcctgtaaagtgtggtgtgccctatgcatcagtattcttgcctatgaaatgggcatgtaggctgggcacagtggatcatgcttataatcccagcactttgggaggccgtggctggtggatcacctgaggtgaggagtttgtgactggcctggccaacatggtgaaaccccatctctattaaaaatacaaaaattagccgggtgtggtggcaggcgcctgtagtcccagctactcgggaggctgaagcaggagaatcgcttgagcctgggaggcagaggttgcggtgagccaagccgagatcgtaccactatactccaggctgggtgacagagcgagactctgtctcaaaaaataaaagaagaaatgggcatataaatagatctacataagactcactggaagtttagagctctttaaaaaaatggacaacaaaaagtttttccaaataaatgttgattctgggcctggaaagtttgagtggctggcttctcagagacagttactaccatccatgctctttaaagttccattgctcttattctaaccttgaaatcaaagaaaccaaagctgtggtttcttgtctgaccttggctaatgattttctgattgactctacatgcaaaagaactgctgataagtttcttataggggagaaaagatgatggggagaaaaggaactgagttcatttcctaacctcagtttccctgcttactcacccagtgggttgggagccacttgctgggtctgagtttccataatcaccatagaaatggaagtaatattatccttttgcccagtcgatgggaggatggaggaatgtcttagtctgtttggcctgctgtaacaagataccataaacttggggggctgataagcacatttatttctcacagttctggaggctggaaagttcaaggtcaagacaccagcagatttggtgtctggtgagggcccgctgtctggttcatagatggcactttcttgctgtgtcctcacatggtggaaggggcaaggcagctctctggaggctcttttataagggcatgaatctcattcatgagagctctgtctccatgacgttatcacctcccaaaggcttcatctcttaatataattacattggtgatgaggtttcaacgtatgaattgggggtgggcaggcataaacattcagagcatagcaaggagaattcagggattgcattaagaaagtaagttgctgagcaaagggactcatcttcaaagtccaatacaatctttataatcttacaaaaagctttcctggttttagaattagctccaaggaatttggcactagattttagatttgctcagagaaagagtgtgagagagagagggatgtggcttttgtgaggaattccagca

SEQ ID NO: 1883981 - DNA, 4001 bp, Homo sapiens; identical to SEQ ID NO: 913790

SEQ ID NO: 1883982 - DNA, 4001 bp, Homo sapiens; identical to SEQ ID NO: 913791

SEQ ID NO: 1883983 - DNA, 4001 bp, Homo sapiens
aaaaggctgaaatgggatcctgagggcaggaagtgagaggactgacccctcttggccccagagcttccaagccacccagattcagctccccaacgccctctcccaccggtccgcctctgctggtctctaggctctgactcctctgttgctaggcccagcagcacctcgtggctcccagggcagcgcagaagagtagagacaggtctgccctggagtgggtctgcagctctgagggaactgtgattcccattctcaccaatcctgcctctgagcatttgtcttccccccactcgcttactgccaccccgaaaatgcaggacaaagatgagttagagggtaggggttcttcccaacattcacagaactggggcaccaaacaagaaccctttctccctacactgtcctttttaccccagagagctgccagccacaattccaaacaaacaactgaaggtgagatcatgaaacctatctctgctgtgcagaggccccctacgctgaggcatccagagaaagaacctgcttcccgccccggagcccagcttagctcactccctctctggggttagatatgaggggagagggggcaagaaatcctaatcttcccattccaacccttggcctgggccacaaatcctcactttggcctctctgggcccttttctggtccaagcggtgctgcccaatgcccaacctcaccgcccacccaggagtttacaaacaaagccagggccagggctgtgtgtgtgtgggaggggaacagcccttctccctggactccaaccccctctaggtcctcccctcctttctccaagggcagaaatggaaaattagtaaggaggccagtggccccacataaacagaatggggtagcaagacaggaaggcctgagggcacagccctgctggaatgcctcagggaaatgaaagaaatagctgagttcaaacacacctatatacccacaggttcacacacatttacacaaatatacgcatggagaaacacacacaaacacacattcaaaaacacaaacaccttcaagtaacaatgcacacaacatgttctcccgatattcacagatcccgggccctaaggtctttagccccagcctaactggaagcctggcctccctgcgagttcctgagagcaaagccccagccgcggcctggctcccgccgggcccccgccccgcatccggaacagctggagtcggcctggccatgcactcaagccgggcgctgggctaggcggggccggcagcggggccccggccggggcccgggcggagcgcagcagggaggcacggagccggccccgttagccccggcacctggcctggctactcttcagacgcccatcatcaggccgttggtggccccagccagcctggggagcggctgccggaggaaagtgagcaagattgccggaggaggtagggcggccgcttcggaatcaggccggggagaggcgtccagagccgccaacaattccctcctccgcctctccgcgtggagaaggctgagctctccgactagccccctcccccaacccctggggtcctccacccccttcccgcgtcgcccacccaaggctgcgcagccggctctgacctcctgcgggccagcgcaggagggcttcagattccctctccccaggcgcgtcgcccaggcagtggggtgaggggcaagagggtcagaggtagaggcgctgggctcttgatctcagctccgcaaagtccactctgggtggcagcggggcccacccgggctcctggtcctacctggcccgagcggcggccgcgtccctcccgggctggggttcccaccactctttcgggctccacatcccgggtcggagagaccgagaccttcgggccggtgcggtcattgcagctaggccggcgggaggcgggtgcgccaggagcgcggctcgcagtttggggtgggggcggtggcttttcagtcgcccgaggttcgggtgcaataaaggagcagctaatgtaatttacaaacagctcgggccgaacgcagcgcagcgcccggactgacaggcgcattaggcaggctaattccagccggctcctcctacccccggcccgctaattaatgagcttcccaacttacagccgcctgcattggacagacagagagtgaaagagagggcgagggagagggagagaaggagagagaaggggggagcagagaagagagaagagagagggagggagggagagcgagaacaggaggagagaacagaggcaaagaagagaggaaaaagggagaaaggagagagaaagagaaagaagtgccgctgcagataattgattacaccgcgatcaaggctaacttgttagcaatagtcaattgccccgtctctccgcctccctcgcagtccgggatcggcgccctcgcctcggctcttccaactgcggccgccaggacccggggccaggagccactgccgagccacctgacacctttaaatagcaccggggttggcgaaactggagccccgcgcagcgcgccccggctccggccccggattgctggaagccccagcagcagcggcgcccgcgtcagcgccctcttcccggggccccgcgctgttctcccctcctcagccgccgcgctaatcggccccgcgcccggcccgcgccctgcccagtgcggcctcctttccacccgccgctgcctgcccgcgccgtccggcgcccgagctgcccgcgggctgggtccccgcggcccgagccgccccggccgggaccccgaacaaggccgagatgacttccaaggaggacggcaaggcggcgccgggggaggagcggcggcgcagcccgctggaccacctgcctccgcctgccaactccaacaagccactgacgccgttcagcatcgaggacatcctcaacaagccgtctgtgcggagaagttactcgctgtgcggggcggcgcacctgctggccgccgcggacaagcacgcgcagggcggcttgcccctggcgggccgcgcgctgctctcgcagacctcgccgctgtgcgcgctggaggagctcgccagcaagacgtttaaggggctggaggtcagcgttctgcaggcagccgaaggtaggcgcagctgctgggttcccctgcacccagcgcctcgcgccctgtgccctgcgcgcttcgtcccctatgcctctgctcgcctctgccctctccggccgccagggccttccagcctgagcagctgcttatgggagtgaagatatgtgggacgggacccaatccttatttcccagggacctctgggtaggccagagctggggggtggcaggagaagggtggccaagctctttccgcagtctgcttgctttgccgggctcccttgcgttcccagtgtcctgggcgctcttagcccggctactcggcgtggggaatcgagagtcttttgccggggaccttatgggtagggtagagttgaagtgattgggaagggatggagaaccaacattcacaccgcaattagggtgtctctgtctggctttctcatacccttagagactttgggtctttcaaaccaactcttaggtagggggcagagaccaaaacaatttttcctagggacttctgggagaccaaagacaggagatggtttgccatagccaagacttgccctggtcctggaggctgaattaaatctgagaagggaacattggtagactgcaggccggacaggcctgggtgggttacggagttacgggggcgagagccagggtgggcttcctctctcccaacgcgagcctacactgtcctttcctcccaggccgcgacggtatgaccatctttgggcagcggcagacccctaagaagcggcgaaagtcgcgcacggccttcaccaaccaccagatctatgaattggaaaagcgctttctataccagaagtacctgtcccccgccgatcgcgaccaaatcgcgcagcagctgggcctcaccaacgcgcaagtcatcacctggttccag

SEQ ID NO: 1883984 - DNA, 4001 bp, Homo sapiens
aggtcaagagatcgagaccatcctggccaacatggtgaaaccccatctctactaaaaatgcaaaaatcagccaggcatggtggcgggcgcctgtagtcccagctactcgggaggctgaggcaggagaatcacttgaatccaggaggtggaggttgcagtgagccaagatcacaccactgcactccagcctggtgacagagtgagactccgtcaaaaaaaaaaaaaaaagaaccaaggctctagcattttctaattttaggaaccatgaaccatcaggtgccgccaaagttgaggaggcgtttttctaaatgcaaatcttcacagtttcttctgccagaggcacagagagggctcactggattttctgttctacctcaaagccattgcacgttttttcttatttcttgttatttaatttttttttaaacaagccaaccaactaaaataacaaattgattttcattcaggcagctcccagaacataactggctggaccccagtaacgtcgcacactgtggaacatcagggccctcatctttaaagatgtggcttgaggtttgcaggccttatcgctcattagctatccagccagatgcaactgctctggaagcaagtagcccagatagacaggaccttctggaaatgagccttcagaggctgaaaagcgtcttggaagagcagcccactctccacccagctggcagctaagtggctggtagtgttgatttcattgtctgcctcagcttgggttctctcggaaagtctctgagccaaagatttgagtgcaggtaatttattaggcacttgctcccaggcaaaaacggtcaggggtgggaggatgaaagggaagaaaccaaaagttgcagaagcattgtcctcgcagctaacatggccgcgtgcaaacgtgccagccagcaagatgttggcatcgccctctcagctaacatggctacctgtggaagtgccagccagcaggatgtcggcatggccctcgcagctaacatggacacgtgcgaacgtgccagccagcaggatgtcagcatcctccttggagctgacatggccacgtgcgaacgtgccagccagcagtagtcggcatggtgctgagcaccctccgggaaccgtccctacctgaaatatgggtgtgatgtacggagcacacgcagccaccctgcagcatgagatgactgttgagtacaggacacgcagaacgaagctggaaaatgaaaaaaaaaaatcctggcttgctgacttcctggggcaaatactgagtgttgggagatcatttccagacttaaatatgagagagaagtaaaccccccttttatttcaaagcttagcatgcctataagtcacctgcagatcttgtcaaaatgcaagctctgaccagagagcccgggcttgtgacttacatcatctcctgctgaaatgctgacgacactccaaatggcaagggttttggcctctattatttggggttttctatcattcaccattgaaactaatcctcactaattaaaacagtttcacattggggaggaaaatagtttttgtctactttaaactactatgacttagggtctgtcaaaacctcaaaaactatatatatatatatttcatttcactcgctttcatttgggacacaaatggagacctgaatcacaggtatctttggaaactgttctcagccttcctagctcagctgaaatgtccttttccagggacactgggcccagggggtgtgctggggtctgcgctggctccccgggcattcataccttggaaagctgcagagctgacttcaggttgtgccaattcctgtgctgcctcatccctcatgtacataaagcgtgaggcgcgcaggcctgcacctgcgccatccctcatccacctaaagcgcgtggcgcgcaggcctgcgccggcgccatccctcatctacgcaaagcgtgcgacgctcaggcctgtgcctgcgtcatccctcatctacgcaaagcgtgcgacgctcaggcctgcgccggcgccatccctcatctacgcaaagcgtgcgacgctcaggcctgtgcctgcgtcatccctcatctgcctaaagccctgcgcgcaggcctgtgcttgcgccatccctcatctgcataaagcgtagggcgcgcaggccagtgtgttggaaaacaacgctttgatgttgtctcctggattttcacagcctccctctcacaggagaacaggggtggaccccggcctcgagcacatctgagctctctctctcctgcctgtgctcctgttgaagacattcagcctccgactgccctcgggaggatggagatgcccaggtgccgaggccagagcccatgcgcaaagcgagggctgagaccacggaggccccttgtctcctccagcgggttcctgaagccacgtccctgcttgtggaggaagaaagccgaactgcagctcagggagaggtgggcttgctggcctcgctggcggcatccgaatgcctggagcctcatggtgggttctgctattgctgccagcagctggatgtttcgaaattcgcccgctttggaatgatacagtgagaccttggcggccgcgctgcctgagacgatgctcttacgtctgcaggggaggtttcaaggcctgctggagtcagcggctgccttgccgccctgggaggtgagcagcccgtccctatgctggcttcctacaggatgcaacctgcattttcaccccagacagacgcagtcttggccatctgcttgccagcatagaaaatgcgttgtttcccccaagtttattttggttaatggattgaattggtttttttaaactgcattgctttgaaacatcactggagtttttcagttttcatattactacatttttgatgtattatcattgaaatgctattttaatgacggtcaaagcggctcccaagccctccttcactggtgaagcaccaaggtgctcaagtgagctcccagtgtacatgagggtgctctcgcttttgaaaaaaagtgaaggaggctgggcgcggtggctcacacctgtaatcacagcactttaggaggctgaggcaggcggatcacgaggtccggagctccagaccagcctggccagcatggtgaaaccccatctctattaaaaatacaaaaattagccgggcatggtggcatgcacctgtgatcccagctactcaggaggctgaggtaggagaatcgcttgaccccaggaggtggaggttgcaatgagcggagattgtgtcattgcactccagcctgggcaatagagtgagactccaagaaagaaaagaagagaggggaggagaggaaggaaggaaaaggaaaggaaggggaggaaaagagagaaagggagggagggagggagggagggagataaggaaggaaggaaagaaaggaaaaaaaacgtgaaggaaatggaaccctgtggctgtgcaggtcacgtggcattgagcgggccactctctgttgccctggtgcggccctcacgccgcgccagccaaaggcgaccctgctttcgatgactgttggaggaaacgttagccacgtccctcatagattggaaatctgacatttggaaaactgaactcaatcatcttttttttcccttttttacttttcaattccttcttcctcggttctccactctcaaaattttgcagtcatcattgattctttctctccagagttcagttcgaggccaggttctgcagaatcctgaggtggcatcacgagcatctcctcagtcccttggccgtgacagctcctcctccaccctccatcctggatgagccggtgaagatggttcttcctcagaaataactgcaacgcactggtccccctctcaaaagcctaggaagctcccctatgcttcaaaacccaagagctctgcctggttttctccaagtctccccccacccccaaatggccatttcctctccccatgattgcctgcacatgtttcagtgaaaaaattatgattggtcc

SEQ ID NO: 1883985 - DNA, 4001 bp, Homo sapiens
cgaaggcaaccaatgagaacacccactgaaggccaccaagtgaaggccagttgtcctgccaaccagaacgcatcctggttctggggaaacaatcagggccagaatctcctgcatacatccccacaaacttcggacttgagagcacaggcacatggctcacaaggcctcgccctgccagcggccccaccccacctttcattcattgctggctgctgggacctttcaggtttctcattgtgaagaagttccgagggatcatcactttacaatgaatgatgctaaaattactgaaaccaaatgtgcctcacgcagtgtctgacattcatagaaccccctttcccccataatctctgaaacactaacaaactggaaataagagtgatttcttcaggtgctttcagaaaaaaacattgccatgaactaagcctactctataatgtccagtcatatttcatatatacacatacaagtccaatcaatatatattccatttacgtttttgaaaataacacatatttgcaatcaaattaacaagactaacggaagaaattttctaaaatttacacactaactacatcacatttttctaatgatcgctttggtagagcaacttagaatatatggtttcaaaacaccaaaaggattatgtaagtgaaaactaccacataatacaaaattttcaatgtgatcatcattgctacttttaactagaaattacacaaggaacgcattgtgaactgctgtgtgactttgatgatctatttattctttctgatcattgatttcatcgtctaagaaatatgagtatcaccatttttataaactggctctgaaaattagatgagagaatataatctccttctccatatactgaacactgaaaaaatcataggtattgtgtccagatttttatacacttactttatagaagcctcatagaaatcctctcttttaagttacaagcattttgccatggtttttacacacttaccttaccgaagcctcataacaagcacatcgtttacagatgagaaaactgagactctggatgcctctgcaggattcttgggccagcaatggctagaggagttcctaaacttcagcagtatctgtcacctccctacctttgggcgtctcctggtgctgctgtcaggtccctcactggctcccaaattcaactgggcaggttccatagcagtggagtctggcgctagggccaccaccacctcgtggatctcaaagctgcaggacagcttcaccctccgcattctgagcagaccccacttgcaactggcagcaggggcagcgtgttctgggtgcctctgctcctgtatatcgcagcctgcgccttcgttgtatgcacacttgtagacgtcagagccacaggctggctctgcagaaaccttgtgccggccctgactggggctggctttggtgcacatgcgacagttcagtgtggtccccatggggcacccctgcacttctcaggcagcttgggtgttcgcttgtccccaagtctgcagagctcaacacctatcgcctcttcctggcaaaggcatggctggcacgggcacccctgggccatggggtggcactgcactagcagcctgcaccctgtgtcacccctgtaccctgagctgacttgtctgttaagaaaaacctgccaacctgtctggtttattttagaagggcccggaggcagcaagcctgagagctgtgactgggggaggagaaagcacagtttcatcctccttccaccattgccctacaactgaagaccaccaactgaggaccaccacctgaagagcgccaactgatggtaccaactgagggcactatctgaaggcaaccaatgaggacacccactgaaggccaccaagtgaagaccagttgccctgccaaccagaccacatcctggttcagaggaaacaatcaggtccagaatcccctgcatgcatccccacaaacttggcacttgagagcacaggcatatggctgacaaggccccaccctgccagcagccccgccccacctttcattcattgctcactgctgggacctttcaggtttctcattgtgaagcagttcctagggatcatcaccttacaatgaatgatgctaaaatgactgaaaccaaatctgcctcacgcaatctctgaaacattaacaaactagaaatgagagagatttctgcaggtgctttcacaaaacaacattgccatgagctaagcctactctgtaatatgaagttatatttcatatgtacacatatatatcccatccacatatattcgatttacatttttgaaaatgacacacatgttcaatcaaattaacaagattaacagaagaaagtttagaaaatttacacagaaagtacatcacatttttctaataatcattttgatagagcagcttagaatctatgctttcaacaaagcaagaagcttacgtaagagaaaaccaccacaaaacacgagattttcaatgtgatcatcactgctactgttaactagaaattacccagtaaatgtattgtgaactgctttgtgactatggtgatttatttagtctttctgatcatttatttgattgtctaagaaatatgagtatccccaattttacaaacttggtctaaaaattaatggtctaaaaaatgagagaaagataatcttcctcgtccacctattgaacacttacaaaattgtagacattgtgtccagacttttacccacttacctcatagaagcctcataataacactctcttttaaattacaagcattttgccatggtttttacacacttaccttatggaagcctcgtaacaatcatatcttctatagatgagcaaactgcgctcagacgagttaaaaacacattcaccatcacatcataaagagtgatggaagtggtattcaaatctagttttctctgacaccaaaaattgtgcgtgttaaggaggaccaagttatactcagaacatagagggatcaaaacatgtggattctcttttctaccccctcgtgtgtgaatttcaatgccttgcactgcctcagagcaatcctaaactccctcccaggttgccttgctgtggttcccttttccttgaggatgatgaggaatctgcatatttagaccacaagcatcaccttttaacaggtgtggtgatcacgaaatgaaatttgctaggccatatgttactaagtgtgaattgtccagcttctctgcaataaataaaggggctattccatgtaaaaaatcacatcatccactaaatttgtgcagaaagatttggaactatgctgcaggagcatcttaccgacagctgtgcaggaagaccagccaaaacacacaaagcaggagcagctcccaaggccaggtgtggtggttcttgcctgtcatcccaacaaagcgggaggccaacgtgagtgaatcacttgaggccaggggtttgagaccagcctgggcaacacagtgaaaccctgtctctacaagaaatcattttttattattagaatgaagaagcgtacctctaaccctcagccattactttaggagagagagctctgctctagaactcaacatatgaaattgggagtcccaatgtggctagctaagtttaaatacaagagctgtcagacatttcctctaccgtaatgaaatctgtggcatcctttttgtattttgaaaacttagttttgacaggcctaagaaaagaagaagagggcccagaagtgggcatttgggcagggcaatgaaaagtaaccagctggatgcaacatggaaagaagaaggggtgggaagtggagtcagagcaagtcctcctgcttggggcctgggcctaggaaagcaaactagggcaggagggaggagccctaggctgtggatacttgggtcaccagagctcctaatgccaagcggtatctgtagtctccctaccttctggcgtcttctggtgccgatgtgctgctagtcatgtctcctgaatcagacagggca

SEQ ID NO: 1883986 - DNA, 4001 bp, Homo sapiens
aacagaaaaccaccacaaaatacaagattttcaatgtgatcatcattgctactgttaactagaaattacccagtaaatgcattgtgaactgctttgtgactatggtgatttatctagtctttctgatcattggtttgattgtctaagaaataggagtatccctaattttataaacttggtctaaaaatttgtggtctaaaaaggagagaaagataatccactttatccacatattgaacacttacaaaatagtagacattttgtccagacttttacacacttaccttatagaagcctcataataaccctctcttttaaattacaagcattttgccatggtttttacacacttaccttatggaagccttacaacaatcacatcttctatagatgagcaaactgaggctcagatgagttaaaaacacattcaccatcacatcataaagagtgatggaagtggtattcaaatccagttttctctaacgccaaaaatggtgcaatttaaggaggaccaaattatacccagaacatggagagatgagaacatgtggattctcttttctaaccccttgtgtgtgaatttcagtggcttgcactgcctcaggacaatcctaaactccctcccaggttttcttgcagtggttcccttttccttgaggatgatgaggaatctgcatatttagaccacaagcatcaccttttaacaggtgtggtgatcacgaaatgaaatttgctaggccatatgttactaagtgtgaattgtccagcttctctgcaataaataaaggggctattccatgtaaaaaatcacatcatccactaaatttgtgcagaaagatttggaactatgctgcaggagcatcttactgacagctgtgcaggaagaccaggcaaaacacacaaagcaggagcagctcccaaggccaggtgtggtggttcttgcctgtcatcccaacaaagcgggaggccaacgtgagtgaatcacttgaggccaggggtttgagaccagcctgggcaacacagtgagaccctgtctctatgagaaatcattttttattattagaatcaagaagagtacctctaaccctcagccattactttaggagagagagctctgctctacaacgaaaaatatgaaattgggagtcccaatgtggctacttaagtttaaatacaagagctgtcgcatatttcctctaccgtaatgaaatctgtagcatacattttgtaatctgaagtcttagttttgaccagcctaagaaaagaagaagagggcccagaagtgggcatttggacagggcaagggaaagtaaccagctggatgcaacagggaaagaacaatggatggggagtggaatcagagcaagtcctcctgcttggggcctgggcctaggaaagcaaactagaggcaggagggaggagccctaggctgtgggtgcctctggggggaaccatgggtgagcaactgccaaaggagctcctaaggccaagcggtatctgtagtctccctaccttttggcgtcttctggtcgtcatgactcctgaatcagacggggcaggctccaaagcagtggactctggcgctactcccaccaccacctcgtggatcgcagagctgcaggactgctccaaacaccgcatcctgagctggccccgcttggggtggcattaagggacagcttgttccgggtgcctctgctcctctgtgctggggtctgcgcctctgctggccgccgactcatagatgtcagagcctcaggacggctctgcagaagccctgtgagggccctgagtggggctggccttggtgcacatgcgacaagtcagcgtggtccccatggggcacctctgctcttctcaggtcgcttggtccttccttgccccgacacctgcagagctgagcacctgccacctctcctcaggaaaggcaaccgaatgccaccaactgaaagcacccactgaaggcactaactgaaggccggttgccctgccaaccagatcgcatcctgcttaggaggaaccaatcaggccttgagttccctccacgcaccgcccttccgtttatgacgtggaagtccaagcactggctcacaaggccccgcccccacagcgaccccgcccccacggcagccccgcccccacagcggccccatccccacagcagcccgccccaccttccatttattagtagctggtagcaactttcagatttcctcactgtgaattatgaatatgaattatgcgcaaattactgtacactaatgtgcctcatgcagtatctgacattcaaacatccccttggccccgttgtgactgattttttttggaaactagaaataatacagatttcagcaggtgttttcagaagaaaacattgccatgagctgagattactgtatgatgtcaagtcttatttcatatatcaatacatattcacattcataatccaaaacgcacatattcaatcaaattaacaagactaacagtggaaattttctaaaatttatacactaagtgcatcacatttttctaatgaacacttttatagagcaacttagactctatggtttccacaaatgaagaggctcgtggaagagaaaaccaccacgtaatacaagattttcaatgtgatcatcattgctacttttaagtagcaattacccagtaaatatattgtgaactgctttgtgagtatggtgatttatttcaacttgttggtcctttgattatcttaaaaataggaataatgccaattgtataaacttgttctaaaaataaaaggagagaaaaataatcctccaccttcatatattgtacaattacaaaattaaaggcattgtgtccagatttttacacacttaccttattgaagcctcataacaacctgtcttttaaattacaggcattattcccagatttttacacactaaactaatacaagcctcataagaatcacttcttttacagatgagcaaactgaggctcagaggatttaaaaactcattcaccatcactttgtagtgagtgttggaactgggattcaaatccaattctctctgaccccaaaggtggtgcaccttcatgaagacccaattataccctccacatggagggatcaagacatgtggattcccttgctctgccttcttatgggtgaatttcaatggctttcacggcctcagaacaatcctaaactccctccctggttgcctgcagtggacatcacttcttcttttttatgattaggaatctgcatctttggaccacaagcatctataaacagttgttttgatcaagaaacaaaattttctaggccttaggttactaactgtgaattgtctagcttctctgcagtaaacaaaaggctcttccatgtaaaaatatcacaggattgtgtagaaaggtttggaaccatactgcaggagcatcttactgacagctgtgcaggaagattagccaaaacacacaaagctagagcacctccaaaggccaggtgtggtagttcctgcttatcatgccagcaaagtgggaggccaagatgggtggatcagttgaggccaggagtttgagacaagcctgggcaacacagtgaaaccctgtctgtacaaaaaatcatttattattattagaatcaagaagattacctctgaccctctgacattgctttaggagagagggctctggtctagaactcaagatatgaaattatgagtcccagtgtggctacttaagtttaaatacaacagctgtcagacatttcctctacagcaatgaaatctatagcatacattttgtatcctaaaaatgtggttttcagacagcctaggggaagaagtggagtgcccagaactgggcattggggtaggtaggaggaaagaaactggctgcacacagcagggaaaaaagaaggggtggggaggtgaggcagagccagtcctcctgcttgaggcctgggcttaggatagcaaactaggggcaggaggcaggagccccaggccttg

SEQ ID NO: 1883987 - DNA, 4001 bp, Homo sapiens
tttaatggctgtattctatcaaatgaatgctttataatttatttaaccaatgtcttactgttttgtacatacataaacaatgtcctgcttcctcttcctggaattattttcttatttctattacagtatcgtagtttgcttttttttaatttttcatatctttctgatacttctttgtctgttttgctagctctgtgtcctctttttttttttttttttttttgagacagagtctcactctgttgcccaggctggagtgtagtggcacaatctcagctcactgcaacctctgcctcctatgttcaagccattctcctacctcagcctctcgagaagctggaattaacaggcgcccgccaccatgcctggataatttttaatagaaacagggtttcaccatgttggctaggctggtcttgaactcctgacctcagatgatccacccacctcagcgtccaaagtgctgggatcacaggcatgagccaccacacctggcctctgtgtcctctttctaccttcccaagattctgtacttgaatcttctttttttttttttacttttgagacagggtcttgctcttgctatgttgcccaggttggagtgcagtggcactatctcagctcactgcagcctagacctccccaggctcaggtgatccccccacctcagcctcccaagtagctggaattacaggtatgtgtcaccacacccggctaatttttgcagtttttgtagagtcggggtctcaccatgttgcccaggctggtctcaaactcctgggctcaagcaatcctcctaccttggtctcccaaaatgctgggattacaggcatgagccaccgtgccctgcccaaatcttcttattctataatttctctttaggtcatcaatttctctcccgatccactataaaccctttggatctcatctctacttttcttctcgacaccagatcctaattcccaactgtctactgggtattacatccacagggatgtacttcttgcaattcaaatgccacatgtcaaaaactgaactcctattccctttgcaaaatccctctgcttctctctttctctctcctttttgctacctatttcaggtaggggaagtggtgtccttccagccactcaggctagaaacctcaaagtcctcttctgattgctgtcctcactcatctcacacatccagtcaataaagtgctattgattctcctcccaaatgcctctcagcttgtgcccttcctttccattcccaccgtgactatcccagcttttgaggtcccatgactcttcaccagagtggtaacaatagcttcccaacatctcccagcccccatccccccgctactctgctctgttgccatgagagttaactttgcgaaacagagagattattttcctctcctgcttgaaaatatctgatgacttcttatcacttacagaagcaagtctaaactttccactgtctcctcccactctcccaccacacaccaccttcctgcgccggttgcgtcagcctcgaacgttcctgaacgctttgctgttcctgtgcttttactcacgttctccccagtgactgcccaatctttagtgtgttttgctgactcctggcgctctggcttttccataagaggcgtttttgcacgattgcagacaggaataaaaatgagctctgcctactgggccgtcctggttagcaaggtctacaccacctcaaaggcagctatggactaagagcccacaaagaatctcgggttatgagggaggggctggccgtggagacggctaaagcgcctcatttgtcttcccagcagggaagcgatgggacctcggcgggcagggaacgcgatctccacccgtctggaaaactctctgagttctggagcactgttcgcggccggactgagtggcatgtccgcattttccccattccagggtagggcagactgaggtaggagagcagagccccgaggccgactccccgggaaaaaaaaaaaaaggaaaaaaggctcccgccgacctgtgattcacaggagcaagaggctggaaggaccgcgcctcctgattggagcagacagaatcagacaagcttgggggccgctgattggctccggcgtggtcaggcgctggtgggctgttgtaggtgtaaatagctcttgaaggcccgggtctgtgaccggcagtaaccccggcgagagtgggtggagagggaggcgcttcctctccattcatgtcagctgccagccaggcccgggcaggccggccctttagcggaggggactgggcaggacgaggcgatgggtgtcttcggagatcttaagctgggctgaaagttaaacactcacccgcagggctgagccagagctggcaccttccacaccgagccccttcctatctgtgactgttgaaaagtttaatgtgatgttctgggtgaggaccgaggcgttggaggtcgctaggagggtagttttacggagtcgcgttaatggctgtagtgggtgtaccttagtgaccacagggaggtggcagcctgtcctctcctcctcctggtcaccgtattctatttgcggaaaaggtaagaatggaggcttggatagtctttctactagagatgcaacttctcccaccctctactccaggggaaagagaagtctgtggggaactggctttgtaaaaagtaggaaagaggaaagggacaaatgggtacacgttaagaagagggtgactctcatacattgctggagaaaatttaaagtggtgcagccactggggaaacagtttgatggtgccacaaaaggttaaatatcaaattagcatctggcccagcaactccactcctagatataaaccctaataaattataaacgggtactcatatttgcactcaaatgttcatggcagtgctattcacaataaccaaaaggtggaagcaactccagtgttcatcaattgataaatcagtaaaccaactgtggtgtattcatacaatggaatatgaataggtaataaacaggaatgaagtactgatatatgctccaatggggatgaacattgaaagattatgccaagagaaggaagccagacacagaaggtcatatattgtacgattccatgtataggaaatatcctgaagtggtaaatccacagagacagaaagcagactgatggtcaccaggggccgagtgtgggtgggaagatggggaatcactgttgaatgggttcaagttttcttttggggtgaaaatgttttagaacaaaaggtagtgtttgcacaatgttatgaatgcactaagtgccacagaactggtcaatttaaaatggttagttcggcctggcacggtggctcacacctgtaatcccagcactttgagagggtggggcgggcggatcacctgaggtcaggagtttgagactagcctggccaacgtggtgaaaccccatctctcctaaaaaaaaaaaaaaaaagaaagaaagaaagaaaaaaaaagatgggcatggtggcaggtgcctgtaatcccagctactcaggaggctgaagcaggagaatcgtttgaacccgggaggcgaaggttgcagtgatccgagatcatcccattgcactccagcctgggcgacaagagcaaaactctgtctcaaaataaataaataaaataaaatggttagtttagccgggcacggtggctcacacctgtcatcccagcactttgggaggccaagggaggaggatcacttgagcccaggagtttgagaccagcctgggcaatatagtgagacccctatctcaataaataaagtggttagttttatattgtgtgaattgtctctcaattaaaatgtatctctctctctctctctctctctctctctctcgcaaacaaactgacagactaaaaggtgagtccttcctgctgtccataattctctaagaaagaaataagaaacagcaattctgagtcctctgctgcctttcacttccactttcctctctgttttttgaag

SEQ ID NO: 1883988 - DNA, 4001 bp, Homo sapiens
atggggaaaatagaaaatgcacatttttagtgtaacccttttttatcttttttttctttttttaagacaaagtctttatctatcatgtaggctggagtgcagtggtgtgatcacagctcactgcagccttgaaatcctgggctcaagcaattcacacacctcagccagccaagtagctaggaccacaggtgcacgccaccacagctggctaattttttgacttctagtagagatgagcccttgttctgttgcccaggcaggtctggaactctggagctcaagcaattctcctgtttcggcctcccaaagtgctgggattacaggcgtgagccaccgtacctagcctgttttctctttttaaaagagcagttattggaacaatgcgaatggttgagaacatgggttttgggggacggctggatggaatgtagtcagctgcttgctggttttaccttccatgtttcagcatgtgtttgggccttttccagaacagcactgacagaatgtgcagcctggggcatctgtccactgggcttggtgatgccttttataggtcctgagagggaggaagtgagaaaagaagagtgagcaaagaattttcaacattcttgaaagttaatctgaaaatacaaagcagtttacatctataaagcaaagaaagatacttcctggctacttcttacaaaaaaataaataaataaataaaaacaaagcaaagagagcaattcacaggcatgacgtggtacacaaaaccgtatgaaaaatctgaggttctgtgacaaaactttatatgagattcagcaaaagattcaggaaggtgagtacggtatttgataaagcccactgaggagggtctggattaactgggattgtggagaggaatagtatgttttacttttgaaaagcttttgataattgaagaattaaccttgaaaaccaattttctttcaaaaaaattctattgttgatttccctaaaatgtatttatctagtttcataccgtgctgagtacaggaacaacttttgaacattgtccttaataaagagtatattgagctgggtgtggtggctcaggtctgtaatccctgcacttcaggaaggcaaggtgagcacatcacgaggtcaagggattgagaccatcctggccaacatggtgaaaccctgtctctactaaaaatacaaaaattagctgggcatgatggcgcatgcctatagtcccagctactctggaggctgaggcgggagtatcgcttgaacccaggaggtggaggttgcagtgagccaagatcacgccactgctctccagcctggcgacagggcaagacttagtcttaacaaaaacaacaacaacaaacaacaaaaaacagataaacaacaacaacaaagagtacattggacacagaaacaatagacagagatttgggcaaaatgtgcgggtccctgaaataatctggaattagatgtgttttttgttttgttttgttttggtttccccaaaagtcctggtattatgattttattttcttgccttttaatttgtccttttgacacaaagcttgactcatggaaggtctgcagttgttagagaatcagatagaggaagctctacgttgatttctcggctccttagaaaggatccctccaaggacagccgcctctccacacccgggctgtttctccttcaagtgaattgctgcccagcccacaccagaaggtcttccgctcctctccctgtgaatgcagagatgctttagccatgctcagcaccactgttctgtttaatattcacaaactgcctgtttatttcttcaactagttttctagtagtttgagaaacccattaatctacatgacaactcaaagaatgacttcaggagattagaaaaaaccaaaacaaaacaaaaaggcggggtggggggaagtttggctgggttctggtggctcattcttataatcccagccctaggggaggccaaggcaggcagatcacttgaggtcaggagttcgagaacagactggccaatttggtgaaacccagtcacgactaaaaatacaaaaaatttagttgggcgtcgtgacccacgcctctaatcccagctacttgggaggctgaagcaggaggatcacatgaattcgggaagcaagggttgcagcgagctgacgtcgcgacatagcattccagcctgggtgacagaataagactcagtctcaaaaaaaagaatgatactcgggggaaaacggtgggaagggggagaaagataagagactacaaactggattccatgtgtactgcttgggtgatgggtgcaacaaaatctcacaaatctccactaaaggagttactcaataactaaatactacctgtttgccaaaaatttatgaaaagaaaaattaaaaaatttttttaaattgtgaaaattgagggtcatactttcaagttacaaaggcacatctatcatgaggcttaattattctaatgtttaaagaaatgaagagaacaaccagagtttaaatagaaaagctgtcagcatttcatctacagcaatgaaatctgtagcatgcattttgtattttgaaacttagttttcagccagcctgggggaagaagaagaggaaacagaactgggcatagcataggtaggaggaaagtaagaaaccagctggacacagcagggaaagaagaaggggtgaggactcgaggcagagccagtcctcctgcttggggcctgggcataggaaagcaaactccaggcaggaggaaggagccccaggctgtggatgcctctggggggaaccttgggtgagcaatggccagaggagctcctgaacttaagcagtatctgccgcctccctacctttgggtgtcttctggtggccaatgtgctgctgtcaggactctcactggctcccaaattcgactgggcagcctccaaagcggtggagtcctgtgctactgccacctccgccttgtggatcacagagctgcaggacggcttcacccactacaccctgagctggccccgcttgtggctggcattgggggacagcgtgttctgggcgcctctgctcctgtatatcgtgtcgtgtgtctttgctgtctgtacgctggtagacatgagagccacaggctggtcctgcagaacccttgtgccggccatgattggggctggctttggtgcacatgcaagagttcagtgtggtccccatgggacacccctgctcttctcgggcagcttgggccttcacttgcccccaagtctgcagacctcaacaactctcgcctcttgctggcaagagcattgccagcacgggcagccctgggccatggggcggcactgtgctagcagcctgcaccctgtgtcacccccgtactctgagctgacttgtctgctaaaaaaaaactgccaacttgtccggtttattttagaagggactggatgcaacaagcctgagagctgtggcctggggaggagagagcacagattcatcctccttccaccactgcccaacaactgaaaaccatgaactgcagaccaccaactgaagagaaacaactgagggtaccaactgagggcactaaccaaaggcaaccaatgagggcacccactgaaagccaccaagtgaaggccagttgccctgccaaccagaacacatccgggttagaggaaacaatcaggcccagaatcctttgcatgtgtcccccccaacgtggaattcagagcttaagcaccaggcttacaaggccccaccctgccagtggacccgccccacctttcatttattgctggctgctaggagctttcatgttgctcagtgtgatgaagttcctagggatcatcaccttacaatgaatgatgctaaaattactgaacccaaatctgcctcctatattcatagagcccctttcccccataacctctgagatttttcaacctgaaaaaagacatatttctgcatgtgctttcagaaaaacacattgccacgagctacgagtaatagag

SEQ ID NO: 1883989 - DNA, 4001 bp, Homo sapiens
gtataatgtaacttaatttacttaacattataacatgcaatgttaattatttatagaaaacttctctgttttctcaatcttttcatgttaaaattcagttaattctggattttctctattgtcttccatctcctttagatggcacctgtgtggggtagcctacatggtattctggcaaagcctgcctctcctgagatgtatcccacctctggttactagcactccagcaatgttcattacctcacctggtcttgcggctttctcttataatgtactttttcacttctgccggatacctgggtttatcagtgctctgctactcttgaactcttctcgagtgtgtggaaactttgcactgctcttccacgttttctctggggttgctagagatgagtagaaaaccctggccttccctgacccttcccacccgccccccaccaacctgggaatctggcataggaaccaggtctgtctgacaatgtccttgcatttaatactgtcatcccacctcttcccatagccagcttcttgagtggaaaacgtccccaagcctgctactgctccccctgcagtggtgtctcttgagttggaaaaacaggatgtcttctctttcagggccatgatctgaggcaggctgggaggagggaggaggaggcatctggttgatagccctttacaaaaggaacatacttgtgcttcccagctctgtgcatgctccagtcagctcaagtccgacctattggctctgtttgattcagcaacttcagactctggttaggccagatggaaaatcagtcctggaaaaacgaaaatgtaaaaaactgtggcagagaaggtcattcactccctcataaatctaaacacactaagcccattgaaggacttgccaggaaaatgtgattttcagttttctctttgggtccaatttatctttactgctaagtagtcaagttgaattagatccagaaccagatacaatcctaccatttttctttgaagggagggacccccaccttcctgtcagtgacctagctaccccatcctaaagactggtatttcctaagttagaaattctagcagatcttcttttaggtttctgaactgggtgcaccctaggtttccttttctcagatgaatgagtaattgcatcttttcttcaatgcctcactaaagatgagaaacagtcactcaggattgcatttcacttcattgcattttgctttttgcagatggcaatttttctgcatcttatgatctcccttgacctgaagcacagccccatctatcatcctgaccattcaagtttgtagttttgaaagatacacaatagaatggaatacaagaaagagcaaacctgtccaggagacttgaccaaatgaaccctcgtgtcaatgagggcattagaataggccctggaatacccatacttccatgatattaccacagttgcacgtaaatataaaacatgcaaagcattccccaggctgttattggcaagaatcatagttcttatcctatgaagataggagcagaatagaagagagtagtccaggtgtgtttcctacctgaatgacaaagtggaaattgatgtataattttccatatggaaacaacttgtttccccacattcatttcctcaataaggacagatgccctaaggcagattccttcaagatggagtgagagaggccttttttcagctccctgtggtagtcttactatatcatcacagagtctttgctatgcctcccttcaagagatggagtttgatgtcttttgcctggaatgtgagtgggacttagtaactcactttctaatgtagagaatatggcaggggtgatagcatgtcacttacaaagactaggacataaaagatacctctggcttcctctttgctctctttgggatctcttactctggaagaagctggttgtcatgtcatgagaacactcaagcagtcctatggagaagtccacatggtaggacctggggcctcttgccaacagccatgagagtgagccatgctggaaacagctccttcagccccagtcaagccttcagatgacacagtcctagacaatatcttaactgaaactgcaggagagaccccgaggcagagtcaccgagttaaactattcacaaattcctgacccacagaggctgtgagataataaatgtttgttgttttaaatccacaaagccataaattatagagtaatttgctgtgcagcaatagataatggagtccgccttggacaatatttcattggtggtgaaaatttcattctatgagttatttatgatgtatacctttatgttgaatggtcattttttaaaaaactagtctgctttcacaaggaatagtactaataaaataaatactcttattagtttataatctgagctgctataacttgaccagacatgttcctagacaatttagtggatacacttaaatgttccccctacggattacttgagtaaacaaagagaaagtggggtccagacttatcaaaccacttcattgtaacaacagagttaaaaggatattgtggggggtttaaaatatgcatgcaaattctttgacacccttcccattgagaggtgggagtctctgacctctccctgggaatctgagccaaccatagtgacatgattgtaatgagtagatgactctgtagacagccccagctgaggtgtcagtcaagagccagtatcaacaaccagacacaggagtgaatacacctcccaatgagttttgctctcagtcatcaagtaagttactccccactgtcaagtcacccccaagttgtgaccccatatataatggagcagagacaaagtatccccactgtattctgtccaaattcttgccccacagaatccaggaacataataaaatggttgtcttatgccattaagttttggggtagtttgttacatggaataccaacctgaacagatgtatggaaacaacttttcttcacctttcagattagttgaaaacaatacagtttggagacaagagctaattagcaattgagttaagctatgaccgttaaaagacttaacttcagggcaaaatgtaaggttcagtagaagggtggcaacatgagagcccaagtagagagacatccgtatggtttttgctctgttgttgtttccttttgcaaattgcatatctctgagaacattgaagagctcgttaggcagcataaatagagctagacacagtaagcataaattttacctttgagtttttccctcacttaaaaaacatttacaattacaaaaaaattcaaacagagaaatacagaaagtaatgagacatctaagttttctcccctactacccagaattcacccaaagttaatatttttggacattttgtagattttatttatttgtttatttatttttgagatagggtctcactctgttgcccaggctgaagtgcagtgatgttattttggctcactgtaacctctgcctcctggattcaagcaatcctcctgcctcagcctcccaagtagctgggattacaagcacgtgccaccccacctggctaattttcatatttttagtagagatggggtttcaccatgttggccaggatggcctcgaacccctggcctcaagtaatccaccctcctcggcctcccaaagtgctggaattccaggtgtcagccactgcacctggccaacattttttacttcatatcttttcttaagtaagaaataagctgccagatacatttagagtttcctcgtcctacccaattccattttatcccatccccagaggtagccactatcctgaagttaatgtttctcccttgctttcaccttttcattactttaagcataaatagttctgaggctgggcacagtggctcacgcctgtaatcccaacaatttgggaggccgaggcaggtggattacttgagcccaggaattcaagaccagcctgggcaacacagcaaaagcctgtctctacaaaa

SEQ ID NO: 1883990 - DNA, 4001 bp, Homo sapiens
gacagctgggcctggagaggtctctgtctgggtgggcagggaaggtgtagcatttcaaggaacttgtcactaaaatagcttatgcctggagcacagtgcaggggccagaaatgaatacagcccataaggggcacaggaatgcagacatgcctatggggagctgagggaagcaggggctaggtgagcagggtgaataggcacctgctcccaccatgggtgggcagacagccacatgccaggccaataggggcacacccttcaattcttttccagttcatcattgatatggtttggctgtgtccacacccaaatctcatcttgaattgtagctcccataattcccacatgttgtaggtgggacctggtgggagataattgaatcatgagggcggttcccccatactgttctcgtggtagtggtgatagtgaataagtcttatgagatctgagggttttataaggggaaacctctttcacttggctctcttttctctcttgtctgccaccatgtaagacatgacttttgccttccaccatgattatgaagcctccccagccacgtggatctgcgagttcattaaacctctttttctttataagttacccagtcttgggtatgtctttatcagcagcataaaaatggactaatacaatcatatcacaaattcacttattcctggggggtaagggggttggaggggggttgctataccttccctgggcagacgccatgatcaaagccgccagatgaggcattatgctacctaaggttgccaagcaagtaaaagtaacaatcactttcctggcctacactgggctaaacaccttacaggtatcatctcatttaatctttacactagcccaatgagatgagaactatgattccccacttttggagctgaaaatgctgcagctttgagaaagctggttattggcaagggtggtattcaaaccctcataatctaagcttatgtgcttaacatacacagactcctaagtagtgataagccttgagccctacagaacaaaatccaaaccccttgacatggcttacggcatcttgaaatctggcccctgacattagattccagttgctgctataacaaagtaccacaaacttagtggctgaacacacacaaacctattatcttacagttctggagatcggaagtctgaatgagtttcattgaactaaaaacgaggtattggcggggctgcgctccttctggaggctctaggggagaatctgttctgttgcctttttcagcatcttgaggccgcctgcattccttggctcatggcccttcctccatcttcaagccagcaatcacatccctccaacctgtgcttccattgtcccatctctctctgactctcttctgccttcctcttgagagagctgagaagcccatcgggggctttggaagcaacttagaaacgagcaataagaagaagcaacctttctgaaccttccccactccactcacacagacacatgcagttaagggcaacagcccctcctctgagctgcaatgacctcatgccaaagaaatggctgaggtccgtgagcctctgtctgatccatggtgcatctcagcactgagcccagagccctgcacagaacagttactcaaagaaaggtcccctgggccagggctccctcctccataccagaggtgagggcaccaccccagcccagggctcccagaagaggtcatggtggcagttaggcagataaataaaatgcattggctcaacagctgacctcagctgctgaaagccagggctgctgtgctgatgtgcactttgctgccaatcacatgcttggccacccggtcttacctatttggagaaaacagtgaggggcagacagatcaccccctatcgatgaagagaccctgggctaggggtgtggggtgcttgctctgaagggtctggcaggaatctgtccacgatgctgcttgaaggaaacactgagcttgctcttagctcaagcagttgaggctggcttgttaccatgcaagagacacagggcaacaccataattagaatcctgggttaataaccttccctgattggacgtttccacagctcctcttccccagctgtttatcttgagatcgctgctgaaggggaagggaggagactgggaaactgtaccagggaggaagggaatggaagcagaaaggaaaaggggaagaggaaagagcccagaagtaggctttaccaagcaaacctgggtcaggcccagaacaggacacctaataccatacggtgatctcacctcccacccacccagggctgcaaatcgtccccaccccgccctgggactaggtctcctccaggggccccatcctggttaatgtccccactcgtcccctccctgccagcagactagataccctggagtgaccctggactcttatctcctgagaggccctctcctcacacaccagtcgatcagtcaccaggccatggccattccagccatcccctgtccatatccttagtgccgcagccttgatggggctcctgctaccccctcttctggcttcttccaacagcctgctagtgagtggccctgcctctggcctcacctcctaatctattctttttttttttttttttttttttgagactattgttgctcctgttgcccaggctagagtgcaatggcatgatctcagctcactgcaacctccacctcctaggttcaagcaattatcctgcctcagcttcccaagtagctgggattacaggtgcccaccaccatgcccggctaatttttgtatttttagtagagacggggtttcaccatgttggccaggctggtcttgaactcctgacctcaggtgacccgccagcctcggcctcccaaagtgctgggattacaggcgtgaaccaccgcgcccggccttcagctgctagtattgtttttctaaaatagaaatgatcacactagcacttacctaaacccttcaggggcctgctgccatgtccagggaaattcaaggccttcacagcctggacctcacctccctcaccagctccttctcctctcacctcctccctcctccttcccacctccctcacatcactgtccagaaacttcatcagttcactcatggacacgcacacacacacatgctcatgtgcacacaggcccacatgcacacatgctctcacacacacaatgcacaggcacacatgcacacacacactgccttttcacctttccacttgctgttttctctgcctggaattctcttcttccctcaccttgtgaagaagctcatagtctgaagaagctttaaaaatttgctctaaatctcgagtctctgcaattgcattcaggagtcagcctctgtgacctccccaccctgaccctgcaccctcctgctgccccatcctgctcctctacctgtctcgacctggtttgtgccttacctccctaactagctgtgaactcctggcagcaaagacctccaagaccacctcagggcatagcatggggctggataccaagcagggaatcccatagcctcaggcagtgagggggaaggctatctacagagcggtcccacacacttggtgggggaggaaatcggatgtctattcataagcattgatattctgctgcattttccatcaggatcctccctccttttaatatccctggtcccacatggacctgagtaacagaggacagcaatcagttctggtgtttactgaagttcaggaaatgttactgacacatgatatggtttggatgctcatcccctccaaatcccatgttgaaatgtgattcctcagtgttggagatgggcctagtgggaattgtttggaccatagggttggatccctcatgaacggtttggtgccgttcttgaggtaatgagtgttctcaatctgttagttcaagaaagagatggtgtgtttaaaggagcctggcacctcctcctctcccttgctccctcttgccttgtgatacactgggtccc

SEQ ID NO: 1883991 - DNA, 4001 bp, Homo sapiens
caagtgagtgtcacttggttagcgctcagaaaaaaacaaatgtaagctattattttgagaaatgttcagaatgcactctgggttcagcagttttctgctcaggttcttgtccctgtttagaggttgttcaccaaccgatcagaaaacacttcctgtgttgagggggtgggaggagggggaatattaaaaaactgctaattgagaattagggttgaaacaccctaatcaggaagaaatgcttcaatggaaacaatcatcatccacctgaatcaataccgccatctagaaatattggtgtccacacacctcagtttaatccatgaacaaacatctgttttccattgtaaagagctaagctcagccttgttaatacaatgtcacatgctaccaaaaaaaaaaaaaaaataacagacaaatattttgaattattctgtcattttgatgtaataaacatttcagctgagacagcaagaccgggtattttaattatgtcagcatataataattaaatctggccttactcgcctttgggtatatttttaaacaaaaacaaacacaaaacttctgtatatgcactcagtagcttttaatgttaagcacatatttggcaacgtgtacccgttaagtgggctgtcatcactaatttctttggtacctgtgtgataacatcagccaagaggaactatagtggatataacacaaaagtgtgggtttatttctttatcaatcagcagctgtgaaaagatttataatttccctctcactgacatcactgggcaggtaaagcaggcagccccgttggctttgatgaaaggatattacccagcgtatggagttaacacaggtgacagttgtaatatcttttccctgatgtcagttacagctgttgtaccatttcaggcatgtcgggaaagtagagatgtttaaacagaagaagaatgctcagaaagtcatcaaaaggacattttttcctatgccattcactcttggtgctatttaacaaaaatgatttaaagaaattcattttttttttctcagcagctattcagatcataagctgctttttctttccttttaagctttgataagaataacccggcattttttaagattctaaaggcaagtccagtctcttccttccctccccgctcttcaagttcctgatgcgcgaagatctgagaaaagggccacaggttgacgtcatgtttctggctgcattctggcaggccacggcagcatccagaatgtgtatgcggaaaccttctcagagaaggataaaaaagtggaaggatttcaaaccccctgcccaacacacactccaggcaattacctcagaccgtctcttggggtctcaggatcaaaactgtgcctgaggcaattgacccgacttgaaaaaaatccttgaattttggaagtgacatgccaaagtcgtggctccattccatgtggctgaaacatctgcgtgagtagaggagtcccccactcccaaacaagaagcgactgtggggagaaaggggggatctgatggaatctcaagggtctcccaggcagcctgctctcctgcctgagtggggaaatgtcccatcagcaggggacactcaggagaaggctggggggatttccaaagccattcagtcccgggtgcgggctgcttcagccagtggaagccacttccaaaaggtttctattagacctagacattcgtgagtaattatcaagtattgataaaagcacaaattcaatgaactctataacgtagaaccctctgctactgggctcattgtaatcactgaacagattatttcctttgcttttaatgctcatgcagacacactcacacagacccacagtggatcttttttgtgtgttatttcctgaacccagagctctcacacaccgtcagatacctcctgttgggcagccacatcaccgtactttctcttctctggttctgcccctgatgtgcctcatactcagaccgttggtcatttgatgcagtcagagaccaggccccttgcctgcaatttttataccaagtgttgaaatgggagaacctcagacatcaaagtctcaactgctctcccacaattggctgtttcagaaatagttcattcaaagagccctgttacatcggagcaagcatttgctgactcactcagggagcccacaaacttccaggaagtttggttggcaatagacactggctaacaaaaccaaggcaattgtttttccattatttcattaccggccggcagagagaacaaccaaaataggaattgctccttcgacatgaagtcatggagaccgcagtgagatggcccggtgctgtcgccacctggatacctcaagttatttcagatgttgcttggtctaagctcatgaatatcctctaacaatctttaccccttgctgccagctgtatcattgaagaattgttttagaccagaaccgaaacacactcagatgtaaataaatctattccagaacagaatttaatgattgaagttacaacggtaaattctatttagaattttccaaaacctcaaagtattccctgaagtctgattttaataacagaattcaaaaaatgggtaaccaattcctgagagaaatataagggacagcagttacaattcttcagggctttactttcatatgaattataacataattacattatatttctgctaacatatttcataacagaaaagaaatactggctctctgaattcttttctcagcattgaaggacggttacaacattaacaggccaagaaaaaaaagttagttaaacagaaacccaaaccttagtttccagccttgtcctgagcctgctgcccagaggaaagaccagctcacaccagctatcacatattcctaccttaattctccatcctagccaccttagttaagacctgttctcagaaatacatgactcagaggcatttcctctcaagctgatgtttatttattctttagatttttaaggctgggcattggatttgcaaagggtatgaggctctttgtgggcatttttgaaggttggctccatctaagcattctctctttaaatatcagccaacataaatctaaaaaatgtcatagaacagtctagaagtggttgggccctgagtttaaatgattgattacagaaaattaaaacattagcctgatgaatttttgcattttttgtagagacagggtttcatcatgttgccaggccagtcttgaactcctgggctcaagtgatccttccatctcagcctcccaaagtgctgagattacaggcataagccaccatacatagccatgtgcaggatctttatctgggaaagactgtccttaactaatatcatagatttgatttaaatgttttctaaaaaatcacttaaagtgtaaacagaaattcagtgtaacatcctggaagaggtctaatgagttcaagaaagcagaaattaacctgaaggtaagcttgtcaccctgctgaaatggtttctgagcgtgagaagcacataaaaggaaggagtttatgaagcaccttatttatgttggctgatttttgctgtaccagcacccatgagttcaatggtcttgtgtagcactcactacagagctgagggattacaggaggaccaactcacagcccctgtgctcttaggtttcccaagacagtcctaacttccacctctgcttagaataggaaacactcatggtgtgtttaatttaggctagtcattattctaagcattcaacactcactggcttattcaattccactaacaaccctatgaagggagcactataattatctgcattttgtggttaaggaaacaaaggcaaggttaaataactcgctgtgccagatattgattatattctctctcacctccaaattcaccctttttgcctgctctgttaaaatggatccaggccctttaagtattttccctttgccagctgatacaatgttaggctttgtcagtagagagagctagagagaa

SEQ ID NO: 1883992 - DNA, 4001 bp, Homo sapiens
gaaaatgagttgccagtaattaaaatgtgcctgttagaaataggacggtgacccagggtcaatgacaggaagggtttgggggttgcattgttttgctttgttttgtttttcttctgagtttaaatgaagggtttgatgatgttggcaagttgcttgcttcacaaggagagggtcagaactcaatgagggcttccagctcagatatcatctttccaggattttgagctcttccctttgtttctaaagcagaaatgtgatcacatggctcccctgctgaaaactttatcgtgctcctattgtctgcagcaaaaggaacaattcgaatttctccatctggcccctcctgcttcctcaccacccacccacccagcccccacgccccccacgccccccacgccccgacacattgagcaccagtccttactgaggtgtcttgtccttctccctcgggatgctcatctcccagatggagaaccaggtaaagatatgcttctgtcttacccctggcccacatcctgttgaagttccctgactgcagctacagcaactttgattttggaaatgatttgagagcagcttgctgtaaaagcgctctactttgggctggcagctggactttaccttcaccatttgccatgcaggtgagccttggacttagctggttcttggtgtgcttgccacagacttggtgacgccccatccctccgctgacaaccggaaattcttcacttcctgcctggtgcttcccagcgcgccctgctgccaggagaacggcggcaggcaggcgtcttttcaggatgcccttccagctgcccgagggccccgctcctcctctgcccttagcatcagggacacgtccactccctcccaagcctctgcaaatgctccctgctctaggaatgaggtggagcaaacagcacttagcacaaaggccaaccttccacaaggagtagctgtttttacatcatttcctcatccacttttacaattacatgaataattcttaaataagtaatatatacacatgacaaaatcaaaggcacaagaggtcaaatcaaaggtcaagaggcacatcattcagtttctgactccacatctgttttatctggcatgctagtgtgtggcatgcatagcactcattcctgggtttttttaaatactcaaataaattttattttctctttagtttgccgaataaattcagcacatctttcttggcattgcaaatcacgtattcctgatgtggacagtcccagttctaagaactatggaagcttattatgtttttttttaagctgaaaatattctgatttttaaatgtcaaaaaacacaaatgtataaaaggtttatgatgaaagtcccagtcctatctttagcactgggttgcccaattacccaagaccctccactgggaggcaaatataatttttaaaatattttttaatattttgctattaataaactaagatagccacctgtagctgaccatgtcctccttttgccactgcaatgtcaaaatgcccacttctgttttggcactaagataatacagttctgattttctgcatgagtctcctccgccatactgcaggcaccttgaccgcagggaacactaaggcatcaacagatgtctctgggacgatgttgacagagccgttcccccacagaacttaataatcaatgagaccgataaactgcacatacctgtggaactttggggagccaagggtcagaatccaccatacccacatctcttcttccacatctcttcttcctgtttccagagcagcaaccaaggctcataccagcctctcacccacttcagacacaccccttgccctcacctgtggggcaggtttcccaggctctggggccactgcccgtctggacaggaagtacctggaggagaggtccgggggtggaatgctttggccagaggagcaggctggctccacgcttgtctgctgggggcgggatgattcctttggactcatggcatctggcctctctggcagcagattctcccttttctaagcctgccctaccccctcatgattctctggatttctcacgttgcacctgcctcagaccacaggccacttaatgacctcagagactaagtaaccaccatgccaactaaaatgtgacctgcatgcccctcccttggttatgatttaggttttacaccacaatcccttctagttatttggtttctttttttgttttgtttttcccatgcctttcaaatgtaagccttgggaggaaggaattcttgtcccttctgttcactgtgatattcttccgaacagtgttcactggatagaaggccttcaataaatagtactcaaataaataaatgactacataaattgtcaagatacaatcttccaggaactgtactaatggctggaaaacagaagtggggggaaaagaaaaagaggcctcaccctcagggaactaacaatcttctggagaaaaaaaaatgggctaatatgtatacatgtggatatataatttaaaattaaggatgttaggaaggataattctgttgtttctaccccacagggcaaggttgttagtttttgttttgctttgttttgtcatgctgtattaactgtgaaagtgtatcctccacctcctgagaatcaatcacttcttggtattctcaatcactccactataattataatccggattttcagagtcagaaattcctgtttctagcctttgttctgatgtggagcaggatctccctgagttgcttcactggagactacaagcctgcagacacagggccccctcctcctgtggacacccttcagcctcacagactggcagcacttgcaaaccctcgagaatgtcatcatctacccgcctggtacagcagcctctgtgagaggtgggccccttggctccttcccttcatggaattctgtgagttttttatgactaaaaaaggaattcacaagtccacctcgcaatggtgagatgcagatggtttttgaacatagagccccaagtcaccaacttttcatcattattgccagcccaaacctaaatcaacattcagttgcttttataagaagtaggtgaaagatcttgagggaaaaaagtcatggaacacttgaagattacactggatgaagagaattatctttattgaacccagatctaaaaagcagggctcactcaggaagaattccatccacaggccagcacatttgctctggagtggagcacccagaactgcacgatgtatggaactgacaggttctgtctttccacctctttctttggcaggcccggatctgtttttcattgtcttcgccacatgttttctccttggtgtatgttgcaatttttgacttgtagagcatcaaaaagaaacaaagcaaacctccaagaacagcagaatttggccagagccaaaagcaactcagaatttgaactgaacttgctcaaagcagggcaagaagacagaggcttacgaaaatgccttttgtttgaaccaaagactggagccaaagaatctgtgtccagaagctcttgtgcatggatgagcctccgatcccaaccttcaagaagccagctggacaaggagaggctggcagctgtgtcccagagagctgaagccacaaacccatcccgctttggcactgaagttcgagccccatggagcttggagagttctaacagattccacccccacggcagtggatctatccccgggtttagggtgatgtgcattccaggcacactgtgtccattaactcagtgacacattctaatattctactgattgcatcagcccttgtctcaattacccaaagatgctgtgactgtaggactccagatttacattatagaagcttcccctaccacaggcccagcccccagcatccagcttgagacacatgtgactcatgccacagaaggcttctgtgtgtctggcccccacatcttccagggctagcccctgtcctgacttctgacagcacaga

SEQ ID NO: 1883993 - DNA, 4001 bp, Homo sapiens
gaggagctgcacctgctgttcctgcctgcagggaatggagggtgtttctgggcatgcatggccctggggtggccatggccctggggatggagtcctggagtcctgctgggggacggtctcatccttgtgcaggtttcttcccgacttcccccggaggccccatgtggcaagtggcactttaccctcagtcctcagcctggggtcatggtcctgagccctgctggaaatatgggcttattctaagcaatagcttccccctcacttcatatcacttgcaaataaacataatttctcccttttaaaatttgcattattggatctgttactttatttgtgcattgcattatctagcagcaacgtgattctagcagaggttggccagcgtccctgtcctgggctgcctttgctggtatttgcgaagggcctccttcacaactaaatggctttcttccttctctgttttacacagagcatcaaatcccccatgaattgtcttcaccagcttttctcacacgttggattcgttaggcacttccatttctccttacttacccagattatattttaaccactctggagctagaaaaccatttgtcctcttcaaatcacacttctggtgcactctagacacatttcagaaaatactgataggctcgaagtaaaatggaatttaaagttctgttttaaaaatgtgaattccatttttaagttgtatttctgctggaaaaataatatttactgttctttatgaataatacagtgctatataatttttcattaaaactataagaattacttcataaggcaatatttttcaaaatagatttatggtatttaatgatttcattaattttgtgtataatgtgacttttaaactttgctattaatataatctcacctttaaagtgaatgcacgtctgaaattctcgagactctaaatggactcaccctgcccttcggttgttgtgggtggtggtcaggtgacagcctgttcttttgtgtctgattaaagttcggttgttgtgggtggtggtcaggtgaggacagcctgttcttttgtgtccgattaaaatggttggtgtatccttcagttggatctgctgcaacaatctatgaacaatgaagatgattttgccaatgtttctgtagaaaaagacctttttagaacatacatattaggtatatttttagcacagtaaaatgatttttcaaaatcaatgcacagcaggaaatggtagcttgtaatatttcagtatagtcatatgaacagagaattccttaaagtgcaaatgcaattttagtccatggggctaattttgatcatgttaagctctgtaaaatcgcaggagcccagttcatatctcactaaataagggatttcttgaaagagtcataggcagatgtctctattggtatgaaatgcatgggagaggcataagaccttatttgtgtttgtttagtagttcagcctctggtttataggacttttgggtttttaattttaataacaaaccctatttaaactcaggtgaacactctcttatcgttggggcctactgtgatctgagtgtgtgcgctcccccaaattcccatgttgaagtcctcacccccaacacgagtgtattaggaggtggggcctttagaaggtgattaggctctgaaggcagatcccctgtgaatggaattcctgtctgcatgtaggaggccctgccgaactccttggcccttccaccatatgaggacacagcaggaaggcaccgtctgtgaaccagacagcagttcttaccagacacggaatctgcgggaccctccatcttggacttccggcctccagaacggaagtcaatgtctgtggtttagaagctgcctgttctgtgcttttgtgttgcaggctgagtggactaaggggcatatttcatgcacttgtttaactggattctcattttgtctggtctgcggccattcatgttgcccactcagggtttatttacaggcactttgcctgtgtcttcagggcatggcccttcctacagccatgtgccccgtgatcattatgacgagaggcagagacaaaatgcctcttacctcttacaccatgctgttcagaaagtccggcaagctattttgttgtaaaagaaaatagcattaactaccaaacgaaatcatactgcctgtggattttatcattcaagatgttctgagtaaagctgtccttcgtaaataaagagctgtccttcataaataaaggagtcctgtttatttgaagtgttttatttttgttgttgttgttgttacaaatagactcactctaaaccagtgagcaaatataagagcatatatgccaggcgggaaaatcgtgactcagcccatccacacaggcgcgtttcctgcgggctccgtcctgaccctgcttccagcggcatttccagtaaggtccagtcatcagtctctcagatccacctaactcacgcttcaatagccctgttcaaaactctccttcttcactgttttacatattcaggtgaggttctgctcggcgcactggtgagtgcatgctttctccccacagcgcttctctacctcaagaaagaattcacgaaacctctcttaaggtgcctccacccagcgaatgttccttctttctctgcatctccattgggaggcaggttctatgcagcgagtctttttctttctttctctgtctttctttcttctttcttttcttttcttttctttctttctttctttctttctttctttctttctttctttctttctttctctttctttctttctttctttctttctttctttctctccctctctctttctcattcttctttctttttccttctctcttttctctgtttctctctttctctttctttctttctttctttctttctttctttctttctttctttctttctttctttctttctttccttctttctctttcttcttttctttctttccctctttctttctttctcaggtctcgctccgtggcccaggctggagtacactcgtggcaggatctcgtctcactgcaatctgtgcctcccagtttcaagcgattctcctgcttcagcctcccaaggtgttgggattacaggcaccggccaccacgcacagataattgttgcattttttgtagagacggggtttctccacgttggccaggctggtcttgaactcctgacctcaagtgatccacccacctcggccttccaaagtgctgggattacaggcgtaagcccccgcacccggcccacacggcaagtgctcctatgatcctgctttttgttgggtcacattgtgaaggctggaggtgatcactgaagctgatcgtctatttgctgtgtagagaaaattatattgataccaaaatcaacaaccaaaatgcttgcttttatctgttaagaattaagtgatctctttaagttttatatacgtctatggcattctctgctggtaggcattagcctctctctaggtccctggaatattctgagatacagagatcattgatggtagaaatgagttctattgaagatagtagttgattttcctttccagtatagtctaacaaattatacgtgcaaatttaatgggatcaggatagaaaataactgctgaaaaaaaggaaggatgtacttacttcaaaggacgccactgccacacagcatggcagcaataacacctgggctaacatctgaaaacacagcaccgatactttcagtggttagtaatagaaggattgtttataaccctcctgaactgggaaaatgatgtatgttctgatggaatcagagttcactctatgacgtgcagaggagagatgcagagactgagaacaaaataaattctgaaatccaaagcaagggttttataacaacgttgagttgttttgtattcaaataatttcccccgcattataataaactaagcacattgttgagcagggcaagaatacagtggataaaaatggaattaaataa

SEQ ID NO: 1883994 - DNA, 4001 bp, Homo sapiens
acccaacaagtaccatctcagccaggtgctcacgtttgacgtcaaaaatggcaaagttgtgatgatggcatgtacacgcaatatggtttcatgaaaatggcactttacttctgtaattttgctcccaggcattcctgaccctgtcgagtcatgaggaaaaacctcagataaatcccaactgaagcatattccacaaaagtcctgaccagtactccctccccgaaactgacaatgtcatgaaaaataaagagtctggaaaactgtcatggccaagaagagcctagggagacacaaggattaaatgtaatgtggattaaatggatcctgcttatgagattgtgggaaagggacaggactccccataaaaaataggtaaacctgattaaagggtaggctttagttaattaataaaaatcaaccttggtctattcatcagaacaaatgtaccacatgaagttaagttattattaataggggaagctgagtgtgtaatataggggaagtctctgtattgtctgtactttttctgcaaatttaaaacttttataattttaaaatctttatttaaattttttaattaaaaaaacaactacagagcaaaacagattcaggattatctaatttccttggtaaaacctggagtatcaaaatacacattttgattcagttgtaaaatatctcttctgttttataaaataacttacaccatctgctaagttccaaagtgcttaagaatgcaaactaaatcttaccacatctaaacactgtaattgccccaaagtttggaaatataacacctctatgaataacttgcctcttaattggctgatgaacatttattttgtcactgaatgtttatttttatatgtgacatatgatgactttatccacacgtcagtgagtcctgtatgctggctgccagaatgccacaatcaggggagacttagaattggaagttgtggaccaggcttggtggctcacgcctgtaatcccagcactttgggaggccgaggtgggtggattacctgaggtcaggagttcgagaccagcctgaccaacattgtaaaaccccacctctactaaaagtacaaaaattagccagatttggtggtaggcacctgtaatcccagctactctggaggctgaggcaggagaatggcttgaacccgggaggcggagactgcggtgagccaagattgtgccactgcactccagcctgggcgacaagagcaagattctgtctcaaaaaaaaaaaaaaaaaaaaaaagaattgggagttgtgagtttatattctgggtctgccacttacaattatgttattcttgaatgaatgtcttaaaatatttatattttagtttcttcttctgtaaattttaaatagtgatatttgcacagatcgattggacatttatttgaggtagtgcataataattgaaaatttgaattttaaatattacgattaatattaaacattcaatttaatctggggaaaaatctgatcctcttctctgtttgtgtaccctccccttgagcttctgtgatattggtcgggatcacagataagtgaagaactgatgtcagaatggtaggtcagttatatttcaaagaagacactgctagctggagaaaagcgtagttccagaaagtaggaagtgggtgcagcatccaagggcatggagggggaactcaggggatagagagaagagggggcaaagaggagaaatctgcagctcattgggaagcacccctcattcatcagagagaacgatgaatcactgagcagacttttctctaggaagcacagttctaccttctggaagtagccatggttttgtttgtttgtttcctgtgtcgtggctcagggaatcagagattcttatttaataataataattttaaaaagctttcaggatttggcacaatttctggttaaattagctagaaaaaggaaataccgaagaacaggggcctgctcattcccggcatgctgtgcgtctcctctggaaggactgggcgtgcccggcgtgctgtgcgtcccctccggaaggactgggcgtgcccggcgtgctgtgcgtctcctccggaaggactgggcgtgcccggcgtgctgtgcgtcccctccggaaggactgggcgtgcccggcgtgctgtgcgtctcctctggaaggactgggcgtgcccggcgtgctgtgcgtcccctccggaaggactgggcatgcagtctgtagagtccgtccacacgaagaagactcccatccacaccttccaggtggaccacctgctacatggagttagaagccaggaatcacgtgactgcccgcccaatcgtgacccatcacaggctctgtgcacaaggcgagtggtattgaatgaagctcacctcatttcattcttgtgcatacatataaggccaggagtgagttgactagacaggtgtgttgattgtaagccatccacaattcctaggaagagatattttgcatgcatacatgtgcttattacttatcgacagtgggaccgtggtccccacagagactctttggtggtgagtggtctgctgctcactcagcagacaccaatgccacgtgcaaaacagcctctgatcaattcactggctttatttaacacgcatcagaaagcctggggcctaattgtgctgctcccaggcaagcgtgtctttggtggccatttttctaactgaggaaataaaaagacattttttttttctcctcccacagaattcgtctaaggtttccaaaagaagcatcagccccagtcagagaaaccccaatgtcccagtccctcgtaggaaggcagtgtgtgtgtgccccttaaggagaccaccattgcaaaattatgacagaaacagtgaaagagctctaacttagcttactccgtcttgcttcttacctccaagctgtcctcgttccttcctgggtataggctgaactaactttgggaggaacttagtttatagtttaaaacaaagacaataatagccctttcccaaagcaaacctccttcttgcctggggactagaccgcttttgtaggacctacaaattagccgcaagattagtaattatggtttaggcgtcatgtagctggaggctacaagattctgaccctccctaaagcgctcctaagatccgtgcttgaggtattttacagaccctgcacttgatggatcagctggcaccacccagacctgcaaactggctcatccgttgtggcccccacccaggaactgactctgcacgagaaaacagcttcggatccctatgatttcatctctgaccaaaccaatcagcactctcaactcactggccttccccgcccaccaaattatcctttacaactctgatccccgaatccagatcagggaatctgatctgagtcataataaaactccagtttcccacacagctggctgtgcatgaactactctttctctattgcaatttccctgtcttgataaattggctgagtccaggcaaccggcaaggtgaacccactgggcggctacattaccacggctcaaggcgttgtgcttggagcctacgtccatggaagaggaggactccgtcatggaattgtgaatcatgtcattttctggatcaacagagggtcacactgactacgcggccctatttttcctggctttctgtctgtattgctgtcttatcagttttattttgttttgttctgttttactttgtattattgttatttgtattacaagaacttttctaattaggaagtaaattcaattaaggatactcaatgattttctgtatgtctcaaatagctggcacagttctttataaaccacaaatggcaaataaatataaatattctttttttttttttttttttttgagatggagtctcgctctcgcccaggctgtagtgcagtggcgcgatctcggctcactgcaagctccgcctcccaggttcacgccattctcctgcctcagcctcccgagtagctgggactacagg

SEQ ID NO: 1883995 - DNA, 4001 bp, Homo sapiens
tacttttggtggaattcctgttgtgtgggagaccagcttagttccattcacacactcacactcccagatgtggccccatgggtttattcctgtctcgctgtttcaacagtcagacgtttgttcttcaggctgcttgctccagtatcctcgtcagacaaccgcagggagcctttgtgcatttatttatttatttgcttggtatgcttcagtgttttgggggcttttcttcccactgagtaagttaaaactctgcaaaagtttgcctccagaaaaagggagccaaactgccccttgattacttgaattgtgtaaatgagggatggcaggtgttggggcagggaaggtggcagagaaagaagtggaaatcatttggaatccaggattatcacttattgtgcccctgtattgaaaaattacaaaatgaaactgaaaggttgggcaacagaaagaggattatgtttattttcactaccactaaactttgccactacaggttggtttaattaacccgtgagatgaagtgctgaactctctgaaaagataaatgctttcagaggtgcctcagacacgagaaacacaataatatttatatttctttttgactgaggaaggtcactgtggtgacagtttcaggaggacacctgtattattctcttttgtcaacaggacttgtaatatgaacaaaacatgcagtcacttcccaccaggatgtgtccttctggacatcagcatacgtgcaagatgacaatttcaggcaagaattttttcctctaatctatgatttaatcagttgggtgtctgggagtgggttagagaacatttctgaagttaaagcttgaatgtttttcatgtggctggaggtgagggcaggcgtccaggagactcaggcagcagctgcatagctcagtgcctaagtgatctctgctcttaggaggatcaattgaaagcttaggggaaatagggctcccaggaagatgggtgcttaaaaatgaatactgtaaatgttactcagcatacaattgagggaaagccatcactcacaggaagtgagcacaattctttattatctgggccctgtcactaatgaaacattcagtgtagaagaaatcagtcccctttgagtttaggcttgtcatgatggctctgggtttccttcattcacagcaatcacacttaaaatgtttacagtctgaagacctgaaaaacatgtccacacccttgaattcgttgtagttacacatgaggtcaatgttatccatcttcatttatcaaataaagaaattgaaaatatagtctgtcagaaaataattccaattcagatcttcaagagttcacgttttattgtcctattgtactagagctatttttgtaaaacatacatctttaagctttcagacagaatcgtgaaaacgtaaacttatcacacacaacagcataatatgcaatgcagtgcagtctaggatatacgcattagtgtcaatttttaattaaaaaatgctgaattttgtttaaaaagtttttttttttcctggatctggaaaaggaaatgcttttctggagtaaaacacagaggataaggtagaattcttacctgaagtgcctgtaggagattccaacgtgaatgcatttcacacgcttttacaagctactttcttctcctttcttttttcaatcatcttagcagtcattgtttattttctggagatgagtagtttttatttatactagaaagcccatagtttttacataggttgcctttcattcttggtaagacactgagaaaaggagaaaaagaaaactttagagatagagcaatggtataattgattgaatgttacgtgaactgtcaagatcagaactttctcatactatcttaggaataaaaatatgttctggttagtaatcctcaccaagtttggaaggttagaggtgactcagcctccatgaatgtggtctggtcttattttaagaagggcttctgagtcatgtggagttgtgtcaaactatgtgttatgttatgttattttaaaaagacagcttggagagaggaaattgaactatctttttttttttccaaaaaactctgccctttaatagaagaaaagggcaagttatttcccacaaatctcactctatgtaatgtagcctagaatgtatttttaccacagatatattcttaaagtagtttggcatgaccttacttagagtattttaagtttgtgacttgaattgtttttgcttaatatttatccttagatgtggttgaatgcactgttcataactgaataaatttactatcgatccattattatcgtgattgttcacctattcaaattgatagctacacagatacatgtactatttttatcaatattcaaaatgcataatgttaagtgaacttcaattttctcaactcagaaaagtagcaatagaataaatcttgcctatctccctgagttgcaataacatgtaataaaatccttggaaaagtacatcagataatgacgggttcatgatggctcacgttgactggtaatgccatggcttacaattgagtatgaagtctgcactgcggctcagctgagggaaaggcacatccaggtgggtgagcaggtctgctacaggaactcactcttgcattctaacttccctgagcctttgggtatgtttctcgatgttataccaagaacgttctgacattttaacctcaagtcgtataggtcacctctggttccatgattcagccaaccgattgagaaaattattagtgccattattagaccctcaagctaagacactgaatcaataaatccgcttcaaaacatataccatgatacaattgtatattatttccatcttaatcccacactcttaagatacattgtcattcttatttcccagggtttgttgatattaattggcagatcatgcaactctttggatgtgtatcatatcccatcacaggtttgagacttgagtcaactctaggtctaaaaggaagaaaaaggagtgggagtagaacttaatgaagattagtagggctctcaatgcagtactaatgggcggtggtgggcattagagattcttcaagaaaagggagactaacttcctcaggcacggctgcagactgcttctactggccaagaaggcaaggaaagctgtcagaattaagggctctaggtttccagattaactagaatttgctcatatattcccttcccaaacctcagaatcccactccttcccagtaaatgtcctaaatttaataaaagagactctatgaggtttggaattcaattttggctataattcagccacccacaggatgaaactttgggtttcctgttcaaaaaccttggctctctggctacaggagataggatttctttcaggaccaatctagaagctttcaggacccttatatagaacttgatcttggtacttaaagccctgaatttctccagtgtagttagaactagccaaccaacacaattatattcatcattttcattaaaatggtcaaactcaataaattcttggttactcagatgggcacttaataaaagatgtgtaaaggtgataatttgagtctttctttctttctttctttctttctttctttctttctttctttctttctttctttcttccttttctttccttctttctttcccctctctctttctctctgtctctctatctctctttctttctttttttttctgacctctccatctgatgctaggaactacttacccctcttttaccactgtgaatagggtacttagtgcttttaaatctaatcagatcagaaaaacaattccaaacacacacacacacgcatacacacacacacacacacacagaaacaactcaaaaactgtacccttaagatcccattcctctgaaaccacccttagtaccaaattctgtgtaagtcaggtttaaaccagaaatatagcaactctacagatttgtcttcaggtatttgaccttacaca

SEQ ID NO: 1883996 - DNA, 4001 bp, Homo sapiens
gcccaataaattaaagaagtgattagaatgaatgggttttactcatgatgtgatcatttagttttcataccacttctgttactatatctgatggtgatgcttgcttttactttgagcacaaatccacattaacgggcacaacagcatgataatagttacctttttcccagcccttcacctctgcagggacttctcatgttagttgacagtgtgggcggcaggtgttcttgtcttcaccttctctgttgaaagctgtgcaccccccatgctctaacactttactttacttgatcgtgtttcctgttatccccccaaatagttgtctgtgtgtttattgcttccccaaccagaatgtatgtttcataaacagcagctttgttctctttttttcctctgtaagctggagcagtgtgcagcgtgatgcatgtgctcagtgcacggctgcttaaatgagaggacacacacatcaactccccttatacagaggaggaaaaggagctttgtaaaaggacatggcagtaaacctcccgtctgagcctgtagctcatgcctttgcatgtttcagcaagaatgaagaatatcagtcaagagtttccacatcacgcctgccagggctataccctgggtatttacagagtcgaggacactgagaccaatataacaggtagattgactgtgatagaaaagacgcctcaaatacaatttattcaagtctaagaaatgaaatctcattcagtttcaggcctcatcaacagcagggagaaccacaaatcacaaacttcttttgcactgggaaaggtgttgccatgggaacagggctgctggccatttggccatctcactcatctctagaggaaggcaggtgaggaaggtgagagtcacagtcaggtaggaaggcctgcgataagatccaaggaagatgggggatgtacttctaccatgtgtcatgttggtagcaaatgcagtaagaataaaatgtcaccatctgatccacattacatctgaatagaacatcatctagcggcgtttccttgcctctatatgattataggctgtgttgacatcaaagagatataataaagcatattggcctaacagaacatattatcatagaataaataaaagtcctaaaaaatgaacaggggacagattgtaagtggctgggtttatgcccatgctaagatcaccaaagcttctaacctctgggagatgggaaatcatgagtctcatagcctggcaggctatagtctaacaagactggcttcatgcatatatattgatcttttgatggtggtcaagcatcccaagccatggaccctgttgatattaaaaatgtgatgacacccaaaaaacagtgtgaaatcagtaggaaaaagatttgaataaaacgaccaacccacagatgtccagggacaagaccaagacaattcctaccctgacacagtgacaaataggtgctaagtggacatcattcgtttcctatcttgttggtctttcctgttgacaaatacctgtttaaagcatgttttaatgttttcctcagtaggctctgcgaaataaaacccaaatgggaaacagttctagcatatgatcctatgtaaattaacagcagcaaaaaagagggaaagaagaaaagaaggaaaccctccttaacacctcctttcactcacgtttcctcatattttcccttagtccttcaatagagcagcagtagaaatacaatgatttatgaattccacggggtgaattcttgaagtaataacacttaccaccatgaagttctcagatttcttttccaaacaggaactctgagagcaaagaaaattgctggactctcacggccaggcatttcattgtatagtcctggcaacgtgaccctaatgagaagaagtccatacttcagttttggtttagaattcagtgacagtttgattgtgggctcaacctcttctgcttccattggaatgtgagttacatgctgaattaatgagcaaaaacattaaggctttgagtctgttttgcgctttcctagttcccttcattttattttcactggtttattttatttttgtatcttgatccaaaattcatttgcatatgatttttgtgcacactaagatcatcctgaagaacatggacttgtaaaacactgggaatcaattaccctcaggaaatccgtcgacttggtgaggtgtgtcctttacagttagttactatgaaattccccttttctaaaaatcctgtcattaaaccccatgatggctttccgttgctcactgctgatcttttgcctctcagtaagcatgaagaacactttctctttcttgctgtgagttaatgctatttatattttagaaatgccagattccttcacaagtcacttgagactcggtggcaagaatgaattaccctgaactgtctgtctctctcctgacaggtctgcctgaaaggcagcttgcctggagctgcattcattgttatttcacaatctgagagccagcaagagacagttttacaaatttctaacataaggcataaaatgaaattcaacagaaactaatctttcctttttctaaattcctggctttgaccaaattagtagggaatgacatattttgaatcgcttagtgtacatactattgtatttctctgcaatttaatcttataatcattgctccagggagacatatattaaagtttattggcaaatacatttcccttgattccctttgttccaaaataaaatgatgaattaagacttagcacatatattagcatttagtatttgctatagtttccactttgcacatacaaatagtgatctgtaccctgtggcaaccaattataatacgtgtactgatattgtacaattttaaattagtagaaaaactgagctgatactttaagccagcaaaaaaaagtttgttttctagattaatgaaataacaggataaaacctgaagtgaatattaatgtgtgttatctatgatattgtctatcaattaatataaaatgcatgttcttttatttattctagaaataaatctactgtgttatgattatttctctaataattatgtaactaatgaacgattaatccatgacaattggtccagcatttcttcatgattttttgttccctgggtaaaccaaaggtaaacaaatacatggctgagatgcccagagttcctaaagctccctagggaatgtcaaaaataaacagatcttcccaaacattagcactgatctccttttacattgaaagttcatgtttaaagagagggaattccccaccccagtaatagcagttgaatcaatagaaactgtgattcttgcctctatttgtagttttaaaatgaactcttgtcagaatattgtccccaattaataatgataatgataaaatcctatcagtaataatgaatatttatttagttctttgacttgtgtcacatgtcatattaagcactatttttcattatttaattctcagcaatcacatggggttggtagccccattttacaaacaaaaacaaaacaaataaaaattctggaagtttttagagaggttacatcacttgtcacaaggtgtgtaaatggagaatctacgactcaaactaagacatccttaacccagtgcctctgtcttaagcaccaaatattttcattaatcatcagtctcataataagaaaaataatgatttaataaagaaatttctgttcaaattctccttttaagtacttagagtaataggtttcttcataattagttgcagccttgtatttcaatctcattcttttgtcaaacttaccttctgctaaaccaagtcccaatgatttcattgtataatttttctccaatgcatttatttctcttgctctctatcaataaattatcattcagcctacaaacatttcttgctaaaatctttaaaaaaaaaatctttctaagcagtctctccagagtctctctgcaagcagcaccgttttccaacccattc

SEQ ID NO: 1883997 - DNA, 4001 bp, Homo sapiens
tgcaggcttcctcatctatggagaagaaggagatggagacaatatttaatgactagaagttttattttactttttttggtaataataacttttattattattttgcttcagtatgtcttgactcactaccagttccttcttcatctatgaaaaataatattactcattcctccaaaaaatgcattaaagtactagggtattacacataaactgaatacattcaggtcagctttaatcagaattataaaatcagcaacataaataaaatgcaagatcgtgcaaattttaacatttgtcaaaaaacatagtcctcattgtttatataatgtgttggcttgaacactttttctctgcagagattatgatccctgcttttgtttccatttgcatttgcttgtaggtacatccttcttcctttttctttgctgatgcaatcttccccatagttggtatattccttgagtcatgttaataagaggaagtttatacactcacatatatgtcaccatttgactaagagccccttatgtttgtttgtgacaaattaccatcagttagtatatgggcaatttatggtggtgatgagaacaaacctgggaaggatatggtttgaggtttataaagtaagcttacctaatgttggttgtgactaataaatcaacgtttaatgctccactatcaaatactaattaattctttctttcctccttcatattaatttcgtgtcattccaagtcttcaggggaaagtgtttgcagcttgaagcaagaacactcttatgccttgccagagaattttattaattgcagtaagtgcagtggctttggacacccgaatttaaaaaagaaaaatgattttggaagacaattctcccctatggcaaatatgatattttaggatctcaataaatcctttggaacctaatggaagtaattttctcatatcttttttggtactcagatactctggtaatccaattactaagacccttgtattccaacactcatattaaaagcaacttcaaaatacaaaataaaataaattcaacaaatttgttcagagacctagtcattatatgatatttcactccgatggcaaaggctatatttgcacctaattgatattcatagagggctaaaatacccatttacctatttaaaattctggtagccagctgaatcttgtatgtacaattataaatatatgttttggatattttaatttgttctgagtttagtgatttaaaaggtcctctataaatcagatgacagaatcctttttatgggggtgagggggaagggtctcactctgtcacccaggctggaatgcagtagtgcaatcagggctcactgcagcctcgacctcccaggatcagctgatcctcccacctcaacctcctgagtacctgggactataggcacgcaccatcacacccagctaattttctttttgtactttttgtagaaaagggatttttccatgttgccctggctagtctcgatctcctgggctcaagtggtccatccacctggcctcccaaagtgctaggattgcaggtgtgagccactgtacccaggcctgatggaatcttttttaaacaatatggtatggtgaggaattaaatagaaagtcacattactgtacagctttgatggctgataaatgctaggtgaaactgcactttgtggattcatcattttttgtgccaggcagaaaatgtggacacagatacactcctcctgctttcttctgtgtatgttatagaagatgacagtaagtggtagaatggatggaagaccctagtgtggtaagtcttgcttaaatgcccgtgtgtgtctacaataatacaggccctctgactcctggactcaacactaggagttgaggagggattacctccatggagaggcatagcttgctccaatatcttgagtcagaaacagaacagccctgggttgttgtcttcccaaacactagctttcaggtgtgtcaatttttcaatcctcattgggttttttcaaagagttcagaattttaggggtgtgtgaaagttctttgacatcacaatgtgatgaaagcactctttactttagtctctgtcaagatgtggaatgaaccagggagttcccagggtctgctcttccactggggagtggaagagagatatcctgttcaaggctggttcagccaccagctagattcaggagccctgactcctgatggaatggtgaaccagggtggaaaccaggacatgaaataaggctgcagaaactacgtgctgaaaggaatatagttgtgtggggaatctagtatgtcaacatcaccagtgtagcgtttactgcatggtaagaattaaagcacctttcaaatctcttaaaattttgggcagggaaaaacacacctactcagcaaattgggctcagtgtgtgtaaagcttagagaataatccacagttacaaaagctactggcaagcgtcaccatgcctcttaaaagacaagctgtgaaggtcactataggcattcacattgctaggaactgttcactttaaaactagatgctcaaataaatcaattctgttagaaaccttcacaaaggctgggaaaaacataaagcccagatcaaactttcctttaggttgtattttagattgctgacataaaactatgtgaaaatgtttccccttttcccctttttagcatgtgttttattagtgaagtagaacttaagagttccccagacattatacagaactatatatattgggtacatgtgtcagtacctctaaatacccatagaaatttttacttagcaacattttcatgttcctctcaaattcctacaattatacacgtcaaaacaattcttgtttcttaagggaattctctctaaatctaaatgtattaagaaaaagttagtatttccagcaactgtgggttacattaaaaatagggactccagggggaaattttgagctcaaaaggtctctatctcatggctttatactgcatttaggaagcaatatataaaatacattgtaaaaatttctagcacattttttggatctttttatagcacttagcactacatgccagtaataaatatgtttacgtccctatcatttcctctacaagggtataggggcttactgttagtgtttttgattcattttctttctatcccttttgaagcagcttttcaaacagtatgttccttgatgttaacaagttaagaggaataaagagctgcagttcatgtaagcacaggaaaactgagctaacaaaaatttaaatagttttttttaaaattggtgtcctctgacacttcaaaagttggataaattctgaagtaaaccctaaacttacctgattatctgttactgttttaccattgccacagtaaagatagagactatttccttcatcccacaaagactactctgtgctctctgtaatcatgctcttctcctttcgcaagcttacagagtccttccttgctctgtcctctgtgcatatagaatactattgccgtttttagaatgtaatactaatggaattacagggcatcctcttttgtgcctatcttccttcactgaggaaaatatttttgatatacttgtcattgataaaaataagacattagcttttattactgaatactattctattatgtgaagagaccacgattggtttatctattcttctataatagtaaccgggcatgtaggtagatttcagtttccaccgttatctattaagtattaatcttaatcttctagtaagaattaaactattacatccaaagcttttatgtacaagcctttattgactgaattttcttttcttttttttttagtaaatgccaagaggtagaattgttgagtaatgtactaactatatgtttatctgcgtgagaaacttcaagatcatctttcattcccacaagcaatgtgtgagactttcagctccacatcttcatcgacgtttttagtaattctatgctc

SEQ ID NO: 1883998 - DNA, 4001 bp, Homo sapiens
caaatatctttttcttgtcagaaattttagatgtgagaagacagttgaaaaatattataaggtaatgcaaggaaagaaactgccaacccacaattctacatccaacaaatgtattcttcagaatatgaaggcaaaatagagacaacctcatacgttccaccattgtgttttggaagcagataatttgttttctagttttacagttctgtggatgaagggactttgccccagtatggatgaaaactaagagtctcacccatacctaatttagatcatttcaatgatgagatttgtaactttttgagttgatattaatgtgacattttttagagttaacgcttaaatgggttaagaatttgggggacatgggtaaatgtattttgcacacgggagaacatgaatttggggtgccagctggtggagtttactgggttaattagtgccacccttcagccccctaaaaatgcctgttcaactggaacctgtgaatgtgaccttatttggaaatgggattttttgcagatttaatgatgaggtaatcatggattagagggatctataatctaatacatggtatctgtggtttcctcataggagggaaatttggacatggacacatagggaagacagccatgtggagacagaggcagaggtggacctgctgccgcaaaaccacagggcgccaagtactgtgggccactgagaaaactaaaggagaggaaggattcttccctggagctttggagagggtgcggccctactttcacctggatttcagacttcagacttccagaaccatgaaggaataagctctctttgtttcaaaaccactcagtcaaggcactttgttacaacagcctaggaaactaatacaggaattggtattagtaaaatcattattgttggctcatatgaccatactcatagaacttttaagataatatgtaaataagcaactaaaacaaaaagtcagaaagctttatggtgccagatcaatatacaaataaatatcattattttccaataaaaacaattatataatgtaacaataataaagtaataatacaaagaaacttcccataatagctaccaaaaattctaaagtagttataactagtttttaaaaataatatgttcagaaattttatataaacaaatataaattttaagttaaaaagaaaaagaaatggataaatacatcattaatgaagtttcaatcaaaattcatacatgaatatttcacagaatttgacaagtatatctaaaaattattttaaaggagtaaaacgagcttggaattatttgaagaagaaagtatttatccttttgtatattaagagttagcctaagtctcccgggactcaatggtatcacctctctaacaaaaaaggtcacagagatatgaaaacacatcataaaaaaatctatcgttttatcacacaatgatttgatcacctgtgcacatggaaacaaccttattttaaatccttgtttagagtcaattttaagggataatgttgcatgtgaagctccataatcattcttttgtgttaagtggttgaggaaaatatcaggctggtgagatgttaattataggtccagggaataacttgagttaataaatcagagatgagtccaaagttctgtaaacaagtttcaacatttctgggcacctgagattaagcacagctctgagaagtgctccacacgttcctaagtatatgatgcaagttttactttggcaagaaaatgtaactatatctagtacccaccttaggaacatgaatgacgaaatggagatttcacatttgccagatgaataggactaatgtagaaaaacaaatcaaactgtcctttactctcagtcaacccccttctcaataacaaaaacatccacatatccacattgtccatctattttaaggtcaatatagtatggatattataccaacttgcaaaaataaattaaaccacttaccacaggtatcctccaacatcattggcaccattaaataacattcattcagaactacttttagtgaatgtagatacttaatgtttacagacgaggaaatctgaatggtacgaaacaaacagagacttgttcaaggtctcacactgactcagcagcaaagtccacataggaagtgaatgttcctgaagtagcacattttgtttggactacaagaccaactgagttattatctttatttgaaaatgattcatgcaagtctgccacagatgaaggcaagctgtggaattcttactcaaactctttgttgttattatgggaaagcttcaagtctggggttttttgtttgtttgtttaatacctcatatttgttatccgaaaaaaacaaacagcgttcattcacctgtcaagcaacaaacgactctccacgagaatgcagattttgatcaataggagttttattacttggctcaagtaaggggagcactgggtgtattctccaaagcagtgtctccctgagggaaagtggcaggagggttttatggggtgatggagaggggagagggtgcattatcgcatgtagatgaggggtcccagcggtgcagacacagtgtcatcatggcaacacatgggttacatgttatgataacggaactacagttcctccaggatggagacgttacagtcatgaggaagattcaccagggttcatctctaagttgccagggtctgtcaggagctggtttcaaccaactaggttactatagtccacccagggtttagggaagaacaggctgcagggcaggaagctgtaaatcaggctgatggctcacgtggattaaactcctatggttcctagagaccctccttgtctgcttatatatcctagaactgaaaaataaattgaaaagtgaagtggttatggtggtcgcacttctgaattctggtatgcccctcctacctccccctactaagtaaagaaagataaatcagtcgtcttaacagtatttaaaacagcccttcccaaaaactcaatacatgaaactttctttctagttgatctttgtaccaaatgatctggccaataaaggaataaaatctttgagctcaaataaccatgaaaatgcaatacccgattttcctaaatgcacttcctaatgtgaaggccattcacaaaagcaaatatccaccccagattctactgggtatgaaacatctcaatgactgatacttcatcttatcacctgaaaattaaataattttattacaaaaagaattagtagattatattgctaaatcaagtttagcctagagctgcctccttacatattttaagttcagtctaaacgtttctctgtaggtaatgaactgtaacctcactggacgtgtaaacagactgtgacctacctactcttgtgccaatcatggagtttcagccaatcacaggcggccggctgttcaaaccatgtttaaataaggcaaacgcagagctgtaagcaatctaggtgtttctgcacctctcgtccattttctgtaagtcctttttctgttcataaatcttcttccatcacgtggctgtgctggagtctttgaacctaccctgcctcgggaggctgccccaatcagcaatttgttctttgctcaattaaactctattaatttaatttgcctaaaaattttttaacaatgtttactagtaaatttcattttttcttgcaaaaaagaaaaaatcctgaaaacaggagtagggaaagattgatggctaaaattaaatatggttaactttaatattttaacttatcacaagaaaattgcattgctttggactataaaagtgatacataaatctttcacttcagtagcgccatcaccatcatcaaatatttaaaaacttacatatgaaaagaaatatggtggggagggaagtagacagaaacagttaagaaactaggacataataagacagcaaaattcctgttggtttattttttgcttgtttccttgcttagtattctctgatagccaaaga

SEQ ID NO: 1883999 - DNA, 4001 bp, Homo sapiens
tgtgaaacagcttcaggcacttccttcaggagctatccagaaaaaggcattgtcatcataggagatgccagcttaatgcgtgacgttgcccctgaagaccttccaatggggcaagaaatgtaggtggaagacagtgataatgatcctgaccccgtgtaggtgtaggctattgtgtggtttgtgttttagtttttaacaaaaaagtttaaaaattaaaaaattaaacaatataagagcgcttatagaatacggatataaaaagagacaatatttttgttcagctatacagtggatttgtgttttcagtggagtgtaattacaagagtcagaaagttaaaacaaagtgaaaagtttatactgtaaaaaaagttatagtgggctaaggttaattcattattgatgagagaaatttttttgtacattttgtgtagtctaagtgtacagtgcttgtaaagtctgcagtagcatacagtaatgtccaaggctttcacatccactcaccactcgctcactgacccagccagagcaacttccagtcctgaaagctgcattcatggtgagtgtcctacacaggtgcatcatttttatcttttataccatatttttactgtatcttttctatgtttagatatgtaaataccattgtgttacaattgcctacagtattcaggacaataacaggctgtacatgtttgttgcctagcagcagtaggtgtgtagtaggctcttctgtctagttttgtgaaagttcacactatgatgtttgcataacaacaaaatcacctatggatgcgtttctcagaatgtatccccattgttaaacgatgcatggctctgtgtgtgtatgtgcaggactctgtgtgtgtggtatatgcataccacatacgcacacatccacactatactatgcactctacatatatacaactacataggcaaatataaagctgcatgtgcataaatacacaaacaaacacacatacatatgtataaaaggtaatgtattgatattaatactgacaatgtgtactaagcatatatttatatacccttaaatgtatattattttaatacatactatattatgttatatactaatacacttttttaaaactgaaagaaatctcgttgccaatttgtgtttctaaatatgatgtccatattttttctgattttattactatagctgtgatcacgtcatgtaacttaattttgatgatgtttctcacagtatagtttgagggtatccagcctcagattatctgaggatgtagctcaagatttcctaattttgcaaacagcaagcttcccaggagattcttagattcctgctaacaaaaggcggagactcactggacagttactgaagatagacagtagggggcggaagggcccacgcttctttgatattggtggctttggtttttcagtgacgggggacactttgacttcaggtatgttctgcatttagaattttcaaatgaacgtttcttgtctgttcccttcttttttctgcctccaaacataatgtctatcattgtaaaagtaataaaaaatcactgaacaaaatttggaaaataccaaatgaataacaatagaaataaagtaaaaaaagaaccactcaaattcccatcatcaagaaataaacattctgataatatttaattttattttcctatatatattgtgtgtgtgtatatatgtatgtgtatatatatacatatattcaaaatgtattataacacaaaatgtataaaatatataatagtataaacaaaattatattatatatgtcattttcatgtcatatgtcagatatagcatattaatacatacccagttttctaaaatgctgatctctttgaaatattcaattatcaattgtgtttctttcctcactgaagttcctttttacgacttttggtagtgaagagataaagttcattacaaaacatgccaggcttaagcaattttccaaagggattaacgaattgcagtggccgcaggctatgtaaaaatttttaaaaggtggtgtctctcatattcttcagcataacttgggtcacagaaacccaggcataaaaattcattgtgaactcatattctaccatggcctgacactggtaagttattttgttgcaaaagccttaagcaatttgagatgtcgaagcacgttttcaagagttagcacatctccattgtctataaactgcatgcatattttatgcctaaaaaatatttcatcttctgattttctagctttcttctgcaggttgtttttttttttttagaatatttttcaatcattttaattctctattgtaaaacttggaaatctctacttatggactgccaagaacagtctgaaattaaatcaatttactctcactcttagtgaatattttgggagtgctaggtattgaatgtgtcccccaaaagttcatgtgttagaaatgtaatccttctgcccctatgatgagatgaatggatgaatgagggctctgttctcatgacgggatgaatgttgctgtcccaggagtgggtttattatcacagcagcgttattcttgtgcctgtgagctctccctggctcccttgctcccactctgagcatgtgatgccctctgccatgaggtgaggcagcaagaaggccctcacagatgccggcactgtggacttccagcctctagaactatgagctaaataaactttttaatataaattacctagtttgtcatcttttgttaccaataagaaaaggcaataagaccgggaggttctattatgatgtcattcatgggaaaatggtagacaggacagaatctttgctggctccctagatactgccttggaatgttactcttggaaaacagtggctacagagtgatgcctttctccataactttaatttaccttaagaaaagctttgagtgctactgagtcgggaatgaaaaacctagagaatgttctgtcctgtgggagcaaggagtatagttagtccctgtattactacccaaaggggcatgaggcttcaccctccttgggctccctagggacttataatgccttcctgtaattatcgggccagttaatttaatactaatccacttaattcagttaacatcagatttgtcctagggatcttgttacatccttttgtatactaaaagagaaaaagaaaaaaaaaaagatttgcttctctttcaatattcctgggaagttggatatccacatggaaaaggcagatctctagttcacaacagataaaaaataaattttactcaatgtgaaattaaatgtaaaaaataaaacttcaacattgtagaagaaaatatagaaaaagctctttaggtctgtgaaggagaaaagaattatcgaaatcaggccataaagaaaaagtacaagtcataaaggcaataaatatacaaatagagtttaacctctgaaacacttgaccgaatgttctgaggtaaaaacaacaaaccagccattgaagggaagaacagattgacagtgcatataacacagaaagaagtagtaatcaaactatttaaaattgcctaataaatcaaaaagaaaagaccaaaaaaggaaaaaaaaaaacattgaaggataagaataagcaattgacagaagaagaatttgtaatggtcaataaagagatgtagtaatttttaaattataataaacaatggaaataaacagaatgcccattagcaggataggtgaatatacatatttttgtacggtcataaactggagcgtattattccctagatttttgtatttctgaaattgtttattaaaatagtcttagtctctctaacaatttaaacaaagccactaaaaggacctggtgctatattgtaaattaaaatttacatgccaatggaaagaattgaattaagcatagttcagtttgcatttttttgaagcaatgtatttttaaagacaaaataactgaactaagataacaatttatataaaagaaaatggctgtt

SEQ ID NO: 1884000 - DNA, 4001 bp, Homo sapiens
ggctggagtgcagtggcatgatcttggctcactgcaacctctgcctcctgggttgaagagattctcctgcctcagcctcccgagtagctgggattacaggtgcacaccaccacacctggctaattttgtatttttagtagagatggggtttcaccgtgttagtcagtctggtctcaaactcctgacctcagttggtccacccacctcagcctctcaaagtgctggcattccaggtgtgagccaccacgcccagcaattcagtaaagtttagatttactttgtgagaaaacacatagctaaagcaaacattcgtgcagggcctacttcgtgccaggtgtggttttaggacctttatactatgattttatttcaacatttttagcatcagcaatctcattctactaggtcatggcaaaactggactaagagctgtggcatttttctctgaatcccatgttcttttcagagggattacattacttctacaaaataacactgtcttagtcaatttagtgttgctataacagagtatctgagactgggtcgtttagaaagaaatgaggtctattgagctcatggttctgcaggtgggaaatttcaagggcatggcgctggcttctggccagggctttcctgctgtgtcataacataacagaaggtcaaaactggggtaggcatgtgtgaaaaggaagggaccaaggagggtgacatgttttataccaacctactcttgagggaactaatccatctctgcaagaactaatccagtcttgcaagagtaagaactcactcactatcctgagaacggcaccaatttatcgtgaggaatccacccctatgacccaaacacctcccactgggccccacttcccaacactgtctcttgcaatgaaacttccacatgggttttggtgaggacaaggcacatctaagttgtagaaaatacccataaaaagcttgagaaagcacatggatggatatacatgactttgtttcaccatctttgcccttttctattgatacaacgatgctcttgagtctagaaaaaagtgcttcaggctgaacgggtttcagatggctgtccactggatttctggttttaccttttatctctaatgggctcaccccgcacctaccttaaggccaggttcatcactgcaaaacacaaatccaattccaaaacactgggaagcaatcagattggattgttcttttcttaggaaaagaaagcaaaaacttacccccccataaggcaccactgcctaaaaccatctgtaagcatttctgtcatttccttggaggcttgagactcacctgtgagagggaaagcatcaacctctcccacatacccttagttgccctaaacgattcacccctgtgttccacctttagtaaaagaaaagcacggtgattaccagaattcagtgcagagccatcccttaacaagcaatggttaagaaacaagggagggaaggaagaaaggaagaaaggaaggaaggaaggaaggaaggtaggtggggggggggagggagagagagaaggaagaaaggaaggagggaagggagggagggaaggaaggaaagaaggaaatggaaggaaggaaggagagagggaggaaggaaggaagaaaggaaggaaggaaggagggagggagtgatgaaggaaggaaggaagaaagaaagagggtgggagggagggagagaatgaagaaggaaggaaggaaggcagggaaggagggagggaaagaaggaaatggaaggaagaagagagggaggaaggaagaaaaaaatggaagaaaggaaggagagagggagggaggaaggaaggaaggaagagagggagggaaggagggagggagggagggagggagggatcagaaatcatagccagtgaaacccagaaaaccgttaggcaggaattaggacaataccttactcaggtttgcattcccagcatttagcaccatatgcatcatgcatcaaaaatgttgttgggtgaatgctgagcaacagccacacactgaataaaccaggcaggttgacgtcacaggggagggcacagtgttcctggactctgagtgggtggctatttttcatgccaagtcatgacagtagcattcagtgtggtgggtaaacacagtcttatgaatctcacttttaaaaaactggaagtgctatagataaaagctttcataattttgagataataatggtaaaaattatcatttttgcttactatttgtgatggttaatattgagtgtcaacttgattggattgaaggatgcaatgtattgccccggggtgtctgtgagggtgttgccaaaggagattaacacttgagtcactggactgggagaggcagacccaccctcaatctgggtgggcacccagctgccagctcagctgccagtgtggctaaaataaagcaggcagaggaacgtggaaggactagactgcctgagtcttctgaccttcatctttcccctgtgttggatgcctcctgccctcaaacatcagactccaggttcttcagcttttggactcttggacctaccccccgagtggtttgccaggggctctcaggccttcggctacagactgagggctgcattatcagctttcctacttttgaggttttgggactttactggctttcttgctcctcaacttgcagatggcctgttgtgggacctcaccttgtgatcatgtgagtcaatactccttaataaactccctttcatatatgcatctatcctattagtcctgtccttctagagaatgctaatacaatatttttaatttttatatcccacaataaaactcagaagtagttaagtcaggcttaaatgcaagagaacggtttatattaattattggccataaccaacaaaaaatttcagaaaagtcagtatcatcatgctgcctttatccagcactgactttgttaagccttccagaatctgtcatgtatgagattcaacctgaaatacatacacgcaacaggtgcatcttagggctttgaggccaactgcaactcatagttgccaagaaccaccagccctgagaaacacctgaagaagaagattggtttagtgtttgggtccttctatgaccttgaagaaagcactggggaagacatgattgtgccttcactgagtagccccaccagccatcaccacttcatttcttacccacctttgtagtatactcattcctaattaagaaggctgaggcagagccaagggttaagttaacgcaaggctggtacctttcctaggcttgccagtcatttgcacacagagaagaccataggaaactgaaagaagaacagagagagagaatctaggtttcctgacaatgtaaattacatcttagtatgagaagttaaacaatatccattgttttgaactattttttcccttaaatccacagtggtaagtcctttctctttcaaggactgttgatcatcacaggaaaccgggaccatccggtcaagtcagggcatctctgctaatctttaagtttataaactggtacaagaaataaataaagaacctgagttggaattgccggttggtttaggcttatcttatttggagaaagtaataaattgattatgctttaagtgaacagtgggaagcgattgatgattcaataactttaaattaaaagaagatttactggaaaattggcagtgctgcagcagatttgagtcgtctgttaagtaacagttagtgccacatgccatgacaaatccagaagccagtttgtggggaaaaaaaaaaaaaaaaaaaaaaaaaaagggatcctcttccctggatatattttacttttgagcccatgaagaagatttgaagccaatgaagaagattcgaaggcacctttcagaaagggaagtgagtgggggcaaaagaaaccgccaccatctgctgcctcccagatacgatgataaaaaatatggcatattgtttagaagtaaggacattgccctttttcttttc

SEQ ID NO: 1884001 - DNA, 4001 bp, Homo sapiens
caaaaccctctttacagttatttttagaacgcctgaaaccctaattacttcccttttagatagttattagtgagaaacttttttccaacaacaacaaaaaaacaacacttacctatgaaaattatgtatcttttttgtgtgatcctaaaataatgttccagactcttgagtctgcctctgttttcccacattccaggactatctggttcaatgtgcagctgctcagatgtgcaggaggtgttaggaccttaaccttccatcatccctgggaggggtgtgtatttccctcatgtacctgccagagatatgaactttcagtgagccgtgtcaacctcaacagaccagaaacagaacttaaaagtccacttatatttcattatttgaaatcataatgatgcacatcaaaattaaagaaaagaaaagaaaaagggcaatgtccttacttctaaacaatatgccatattttttatcatcgtatctgggaggcagcagatggtggcggtttcttttgcccccactcacttccctttctgaaaggtgccttcgaatcttcttcattggcttcaaatcttcttcatgggctcaaaagtaaaatatatccagggaagaggatccctttttttttttttttttttttttttttccccacaaactggcttctggatttgtcatggcatgtggcactaactgttacttaacagacgactcaaatctgctgcagcactgccaattttccagtaaatcttcttttaatttaaagttattgaatcatcaatcgcttcccactgttcacttaaagcataatcaatttattactttctccaaataagataagcctaaaccaaccggcaattccaactcaggttctttatttatttcttgtaccagtttataaacttaaagattagcagagatgccctgacttgaccggatggtcccggtttcctgtgatgatcaacagtccttgaaagagaaaggacttaccactgtggatttaagggaaaaaatagttcaaaacaatggatattgtttaacttctcatactaagatgtaatttacattgtcaggaaacctagattctctctctctgttcttctttcagtttcctatggtcttctctgtgtgcaaatgactggcaagcctaggaaaggtaccagccttgcgttaacttaacccttggctctgcctcagccttcttaattaggaatgagtatactacaaaggtgggtaagaaatgaagtggtgatggctggtggggctactcagtgaaggcacaatcatgtcttccccagtgctttcttcaaggtcatagaaggacccaaacactaaaccaatcttcttcttcaggtgtttctcagggctggtggttcttggcaactatgagttgcagttggcctcaaagccctaagatgcacctgttgcgtgtatgtatttcaggttgaatctcatacatgacagattctggaaggcttaacaaagtcagtgctggataaaggcagcatgatgatactgacttttctgaaattttttgttggttatggccaataattaatataaaccgttctcttgcatttaagcctgacttaactacttctgagttttattgtgggatataaaaattaaaaatattgtattagcattctctagaaggacaggactaataggatagatgcatatatgaaagggagtttattaaggagtattgactcacatgatcacaaggtgaggtcccacaacaggccatctgcaagttgaggagcaagaaagccagtaaagtcccaaaacctcaaaagtaggaaagctgataatgcagccctcagtctgtagccgaaggcctgagagcccctggcaaaccactcggggggtaggtccaagagtccaaaagctgaagaacctggagtctgatgtttgagggcaggaggcatccaacacaggggaaagatgaaggtcagaagactcaggcagtctagtccttccacgttcctctgcctgctttattttagccacactggcagctgagctggcagctgggtgcccacccagattgagggtgggtctgcctctcccagtccagtgactcaagtgttaatctcctttggcaacaccctcacagacaccccggggcaatacattgcatccttcaatccaatcaagttgacactcaatattaaccatcacaaatagtaagcaaaaatgataatttttaccattattatctcaaaattatgaaagcttttatctatagcacttccagttttttaaaagtgagattcataagactgtgtttacccaccacactgaatgctactgtcatgacttggcatgaaaaatagccacccactcagagtccaggaacactgtgccctcccctgtgacgtcaacctgcctggtttattcagtgtgtggctgttgctcagcattcacccaacaacatttttgatgcatgatgcatatggtgctaaatgctgggaatgcaaacctgagtaaggtattgtcctaattcctgcctaacggttttctgggtttcactggctatgatttctgatccctccctccctccctccctccctccttccctccctctcttccttccttccttcctccctccctctctccttcctttcttccatttttttcttccttcctccctctcttcttccttccatttccttctttccctccctccttccctgccttccttccttccttcttcattctctccctccctcccaccctctttctttcttccttccttccttcatcactccctccctccttccttccttcctttcttccttccttcctccctctctccttccttccttccatttccttctttccttccttccctccctcccttccctccttcctttcttccttctctctctccctccccccccccacctaccttccttccttccttccttcctttcttcctttcttccttccctcccttgtttcttaaccattgcttgttaagggatggctctgcactgaattctggtaatcaccgtgcttttcttttactaaaggtggaacacaggggtgaatcgtttagggcaactaagggtatgtgggagaggttgatgctttccctctcacaggtgagtctcaagcctccaaggaaatgacagaaatgcttacagatggttttaggcagtggtgccttatgggggggtaagtttttgctttcttttcctaagaaaagaacaatccaatctgattgcttcccagtgttttggaattggatttgtgttttgcagtgatgaacctggccttaaggtaggtgcggggtgagcccattagagataaaaggtaaaaccagaaatccagtggacagccatctgaaacccgttcagcctgaagcacttttttctagactcaagagcatcgttgtatcaatagaaaagggcaaagatggtgaaacaaagtcatgtatatccatccatgtgctttctcaagctttttatgggtattttctacaacttagatgtgccttgtcctcaccaaaacccatgtggaagtttcattgcaagagacagtgttgggaagtggggcccagtgggaggtgtttgggtcataggggtggattcctcacgataaattggtgccgttctcaggatagtgagtgagttcttactcttgcaagactggattagttcttgcagagatggattagttccctcaagagtaggttggtataaaacatgtcaccctccttggtcccttccttttcacacatgcctaccccagttttgaccttctgttatgttatgacacagcaggaaagccctggccagaagccagcgccatgcccttgaaatttcccacctgcagaaccatgagctcaatagacctcatttctttctaaacgacccagtctcagatactctgttatagcaacactaaattgactaagacagtgttattttgtagaagtaatgtaatccctctgaaaagaacatgggattcagagaaaaatgccacagctcttagtccag

SEQ ID NO: 1884002 - DNA, 4001 bp, Homo sapiens
ataagtcatgtcctgaatatatgtttgaaccaaacacctgccaactgcaaaaagcatatttagatgtcagtataggtagatttactctctgttgccaattattatgtcttaacaaaacaagacaaaacatctttttcccctttggataaaaatatttccacattgcacaaataaaatgcccaagctgagagatctttaaagattgaaaaaaaagaggaaaagagcattggaagatatctttaagtgataatgtgctgatttctcttcagaaggctttggtacattattacaagcattgaacttaaagactgaaaaataaaacctactctgaagggcttggatgaaatgaccagaattatcttcttactttagtgtcatggaaggggcttcagttctggaaacgacaaaaatgaagtttatgtcaatgccaaattttttattttattaaagctataagagtttgcacttgcccaaatttcaatgctgcattttttattttaataaagttgtttaagagtttgcacttgcccaaatttcagaaatggcacagggaatcgattctttagaaactgcattctaaatgtacatgttagtggtccccttggactcttgtattatcattagatatttagtaattagatagattattaataataattgcattgttatatatttatctaatcatagtatctaattactaaatatctaatactaaattatccttggtgcatgaccttagttctgaaaatgtgaggcaaataccctgaggttattgttctggtggcccttaccaagttttctatatagagatgcttctcaacttaggatgggattatagctggataaactcattgtaagttggaaatgtactgaatacgtgtaacctactaaacagtatagtttagcttaccttaaccgtactcagaacacttacattagcctacagttgggcaacataatctaacacaaagcttatttataataaattgttgactagctcatgcaatttattgaagactgtactgaaaatgaaaaacagaattgttgtatggatactcccagtacgggttctactggatgtgtatcattttgcaaaactgtaatgttgaaaaatctgaagtcaaaccatggaaagtcaaagaatctccgtattggggaaattttgaattggcctaggtcttagcatttgtagtttgatatgtgcccagctgagggatgagctgtggcctgccattaatatttgatatatggtggtgttccataagtatttaacaaatgaatgagtgaacaaataacattagtcttagaagcaaagtttggtaatccagttgagacatatttctgtcatcaaaaatatgtattgaaggctgtgttcagtggctcatgcctgtaatcccagctgtctgggagaccgaggaaggcggatcacttgagcccaggaattcgagaccagcctggccaacacagcaaaaccctgtctctactaaacacacaaaaattagccgagcgtgatggcgcatgcctgtagtcccagctactcaggaggctgaggcatgagaatcgcttgaatccgggaggcagaggttgcagtgagccaagattgcaccactgcactccagcctaggctacagacagagcgagactgtctccaaaaaaaaaaagtattgaacaacagttgaaaagtttagactgagttctctttctctgtctcttttaatgacacatacaataaagcttcaaaataaaccaagaacaagaacatctgaaacaaaaccgacaacaacaataaacagctcttaatgctgacaacagcccatggaccactctctctcctgctccccgtgtcggggacgctgcagaactcagcagaggtccttgagtcctgagatttaccagcaaggttcatcctgatgatgccactatttaaaattacagccatccctcctcgctcctgacagtctcagtctcccaactccacagcacctgtcatcctctaaaacacaatatcatgacgcatttttatttgaacggatgccccttgaggacagaatatttgatgtcattagatcaatgctctattctcattgcctggaatagtgcctgacactgattaagcagtcaaacagatatttgtatattatatataaatatttacatatattatatataatatatgtaaatatttatatataatatattaaatatattataattatataatatattttatatattatacataatatattttatatattatacataacatattttatatattatatataaatatttacatatattatatataatatattttataaattatatagaaatatttacatatattatatataatgtattttatatattatatagaaatatttacatatattatatataatatattttataaattatatagaaatatttacatatattatatataatatattttatatattatatataaatatttacatatattatgtataatatattttatatattatatataaatatttacatatattatatatattttatatattatatataaatatttacatatattatgtataatatattttatatattatatataatatttacatatattatatatttttatatattatttacatatattatatataatatattttgtatattatataaaaatatttacatatattatatataatatttacatatattatatataatatttacatatattatataaaatattttgtatattatatataatatttacatatattatataaaatatattttatatattatataatatttacatatattatatataatatattttatatattatataatatttacatatattatacataatatatttcatatattatataatatttacatatattgtatataatgtattttatatattatatataattatgtacatatttatatacaatatattttatatatgatatataaatatgtacatatttatatacaatttatttttatattatatataaatatgtacatatttatatacaatatattttatatagtatataaatatttacatatataatatattttatatattacatataaatatttacatatataatatattttatatattacatataaatattaacatatataatatattttatatattacatataaatatttacatatatgttttatatattatatataaatatttacatatatatgttttatatattatatataaatatttacatatatatgttttatatattatatataaatatttacatatatatgttttatatattatatataaatatttccatatatatgttttatatattatatataaacatttacatatatattttatatattatatataaatatatatattatattttatatatatacattatacattttatatatatacattatacatatagtatatatgtattacatatataatatataaatatatgtatatataatatatattatatatataatatataaatatgtatgtatatataatatataaatatatatgtatatataatatataaatatatatgtatatataatatataaatatatatgtatatataatatataaatatatatgtttaaatataatatatatattatatatgtttaaatataatatatatattatatatattatatacaaatattttcatatattatatataatatatttttttgagacagggtctggctctgttgcccaggctggagtacagtggcacgatcaaggctcactgcaaccccctccttccaggctcaagtgagcctcccgcctcagcctcctgagtagctgggattacaggcatgcaccactacacccctgctaatttttgtattttttgtagagacagggtctcattatgttgcctgggttggtctcgatctcctgagctcaagcaatccacccgcctcggcctcccaaagtgctacag

SEQ ID NO: 1884003 - DNA, 4001 bp, Homo sapiens
aaaggttaggcatgaaccttcacacagatgcttaccctccctcactcccctacataaatattcatgtgtattttacatactttttattctttttaaaactataaaataatactgtacatgctgttctgcagaaatcatttttgctcagcatattatcagtaaatctctgtgttacttcctacagatctgttacattcttttgaatagctacataacattgccttttgctcttaaaatcaaagctgcaatgaagatcactttgcataaagatttcactatacttgattgccgggtcaaagaaagtttattttttattttgataaagtatgtattttgagattttaataagataaaatattactttaaatgattttaatagccctattaaaaattacaccaaatttatattctctgttacgtactccaatagcattactctatgagtaaaacacattctattctttgtgacatgcttaatattcctttcttagagtcatagacaaaagacaggaactggctagaagcatgatcttattttaaaaattagacgtgaaggccaggtgcagtgactaacgcctgtaatcctagcactttgggaggccgacgtgagtggatcacctgaggtcaggagttcaagatcagcctgtccaacatggcaaaaccctgtctctactaaaaatacaaaaatttgccaggtgtggtggtgcatgcctgtaatcccagctactcaagaggctgaggaagaagaatcacttgaacacaggaggtggaggttgcagagtgccgagatcacgccgctacactccagcctttgcgacaagagtgagactccatctcaaatacacacacacacacacacacacacacacacacacacatatatattaattagtcgtggagtcccttggaaataggttttgcccacagccctattaccaatgtggatttgtgactatggacacattattaatatcagtgtccatgtggttctagtgaaagttagcacatgtcctaagtatttgcagggttgtaataaacataaaaagaaaaatatgcagggaagatatattcaggtaaatgcactctagagaaaaatgcatttggttacatataacacacacacacacacacaccacaaataaatgagataatatgccataaatgatgaaatgagaccaaatctcatcagtgtcagttcataaatatcttaaaactgtctaatgacagacgcctcatcattttcagtcaaggcatattataagccagttagtaatagctagttattcattaagtatgttttgaatttctatagttgacattcagaaaaaatattttcttagcagcttgcattagattcccttttaattcaactatttgagtttggaagacactttaataagtctgtttatgttaatagcagtaataatagtaaatacttttgtggcacttattgtaagccagatgctatcatatgcattatatgtacgttaatccatttaatcttcctgacaacccctgaagttgttttacaggtgagacacagagaggttaagcagactacccaatgtcacacagcaagtaaatgacaggctctggacttaaattaaaacaatctggatccaagtctatgctattatccagaatactacataatcgttcttctgtgctgtgacagatagcactttaaaatgtagttattagctagtaccaatttttcagacaaggaaagtactaaatgaggatagaaacttacttgatccggagtaggaaaaagaacgaagagaagaacatctttgtagttacaagtggctatggtgggtgtgcaaagaaacccattttgtgactgtccatatcttcaattaaagtatgaaaacaataagacgtttaatttgaataacttctggtagagactggtgagaaggcagggttttgcccctaaaagagcacaggataaaaactgagagagtatccatggctacagaagccaggcaggtgaactgttccccttataacaagaaaaattcctggagagctttggtttaaagtatatatcctcccaggctacgtaatgggaggttgaatctgattcaaatagatttccactgggaagaactcagctaacctctaggtttcacctgctaaatgccaagcactgattacattttggcaatgcaaagatattcatcaaatcaattaactaggactacctgaactactctgatttcaggagaaggtggtggtggtggtggtggttgatgggtcatgacatggaacattgtcctgaaaattggcccttgaccttggaccataaaagatagctggagaacaagtgtgaaactctaagagagaccgagggaaaaaatgatatggttaagatcaagacgattcccttcattagatagaaacagtttaactgctttccaagaaaacagctccagctaacattgagtagcttttcttcttaatctgccaactctttagttaattaattgggataatttccaatagataaatggatttggaaacttgatagtcagcttaaagattgttttgtttcctttttcaaacaactgtattgatgtatgattgacacacaaaatgctgtacatatttaatgaacacaacttgatgagctcggggaaaagtagacactcattaaactatcaccacaatctatgcaataagcgtatccattacctcccaaagtttatttatttatttatttattgaaatggagtttcactcttgtcgcccaggctggagtgcacgatctcggctcactgcaacctcttcctcccaggttcaagcaattctcctgcctcagcctcctgagtagctggaattactggcatgcaccaccacacctggataatttttgtattattagtagagacggggtttcaccaggttggccaggctaatctcaaactcctgacctcatgtgatccctccgcctcagcctcccaaagtgctgggattataggcatgagtcatcgcacccaacactgtctttatttaatattactattttttttgtgatgacacttaacataagatctaccctcataaaaaaaattttagtatacaatacagtattgttaactataaacactgtgctatagagtcgatgtctaggtctcaggcatcttgcatagctgaaactttgtgccccttgacattctccccaacccctgacaaccaccatttcctgctctgcttctgtaagtttgactattttcgattcctcacataagtggcatcagttattatttgttttctggctctcaattatttcacttgatgaatgtactccaggttcattcatgttactgaaaacggcagaattcctctcctgtcccctgccctcaccattgaggacctaaaggataatgaaaggggggaatctgtgccctaaataatcccttttggcagttactttctgttttcaaagttcagctctccctctccctctccctctccctctccctctccctctctctctccctctctctccacggtctccctctccctctccctctctctccacggtctccctctccctctcgctctctctccacggtctccctctccctctccctctctctccacggtctccctctccctctccctctctctccacggtctccttctgttgccgagccaaggctggactgtactgccgccatctccgctcactgcaacctccctgcctgattctcctgcctcagcctgcctgggattgcaggcgcgcgccgccatgcctgactggtttttgctggagtgcagtggcgtgatctcggctcgctacaacctccacctcccagccgcctgccttggcctcccaaagtgctgagattgcagcttctgcccggctgccaccccatctgggaagtgaggagcgtctctgcctggccgcctatcgtctgggaagtgaggagcgcctcttcccggccgccatcccgtctgggaagtgaccagcgtctctgcccggccgcccatcg

SEQ ID NO: 1884004 - DNA, 4001 bp, Homo sapiens
gacaggcaggaagtttgcactgggaaagggccagggcctgaaccgtggtttctgaatcttggagttgctagaaccccagaggtcattactaagaagaacccagtgcagtgtgtgtgtctgaggacgggaggtgcaggtgagagaatggccactctcatgtgcttctctctgtggtcccagcgaggtctgggtctgaacaaatggggcaaagggctccaaagagtcaggatttcacatggggacctggataaagacaaaggaaatgtgtgatggtctcataaatagtgataactgcaggaggaagtgataccgttcttaatgttcattttattctgtgtgtgcgaggggatacgtatgatttctttaatagcgccttatcatgggactgcctcactcagggacatatagaagaatggcagaattgcaaggatttcatgagggtgacatgaagagggactctggggaccacgattccccattgctgctgccctcttttggaaattagatatcgtttacttatttatcatttttgcacatagcattgcaactttcctgattaaattgcctcggggcacaagtacaaaatatgaaagttcagttaaagtgtctaagacagaagagcagcagctatcagcatgtattaaatacgcctctactgcaaaatgcctcttgcaaaaagtgtgtcatccttggcatctggaaatctaggcctgtgctgagccaaaggagaatttccacagaaaacaccttggcagtcaaagttaagaacagtcagatttgagcattgtggtgtgtgtatgttgtagtggttattctctcatgataggactgtggtaactcatgaaaatagctcctgtcccaatttcagacccctctatttcatgatttgttatttagctagacacttggcgtctacaaaaaccagttaccaaagccatcagaacaaattcttcaaaccactcggaactcaacttcagcaccatcctcctttttcttttctttttagagatggggtctcactctgttgcccaggctggagatacgatcatagttctcagcagcctcgaccttttgggctcaagccatcctcccaccttggctttctgagtagctgggaccacaggcatgcaccaccacacccagctatatttttgtagagacagggttcttgccacattgcccaggctggtcttgaactcctgggctcaagtgatccacctgctttggcctcctggagcactgagattacagtcatgagttactacacctggcccttctccaacacaaaaaaaagatttttatagtatcaaatattcaagcccttcattgtaaaaagtttctgtttggtgaacagacaccagcaaaggggaagggtgattgagtggctgaggatggctccatgccattttactcctccaaggacattagttttaaaggttgaaaaccacagccctcccaattcacccggtgttcagtctttccacttcgcctagtgtctccccatcagagccagcccttgagtaaagaagaaagaaaaaggttcatgcttttccatttaaatcaaactctacttagaaagacaggagaagaaataaagagatgccttgtgttctatccacctacacaacccacccccagcctttctcctcccatgggcccagcagcccaaacatattgaagtcagcatcaagctggcacaagaggggaagaggcgttcggtgtgaagagacctgtggatcccatctccaaaactccaggcacctcctacactgaccaatggctcctcggtcttctgcacgctgagctgctgggattggccgagaggccacagaacaccttggactctatgatcccagagagaggggagagtggagtccaggtggcacccactgcccgagcatcatgttcggtggctaccctgagtcattgactgaagccccagagcttctctgcaggcatccaaggggcgtatcttcagatcttttcaaatgtcagaaaatggcaaccgggaattattatgccagcattaccacgttggttgtacgatctaagaaaataaccacgtcacaacaaactcattatccttcccccctgaagttccgcacccatgatgcacttttctcatcacagctctgtgatccagaccaactctgaaaagagccggactcccatgcctttgaaaaatggggtattggaccaaaccccaaagataggagctacagtcgtgcatggcttcagggctggagcctcttgaggtggaggaggaaattatgaaaagagaagaaagacagtgagcgagcaaggaagtcaggaatgaaggcttccagccattggactcaggagaggaagttagagcagaatagattcccggagagtagcttttcctggcaagtcccagagtctccacagggtgtttccttctctatataaatagatactttaacatctgtgcatgtctgtgtctatctacatatatttatttataaagaattaatgagtatgagatggtccaaaaaaaaaaaaaaagaggtgggggattgtagttatttaaggagctgctttaagtttatttttaatcagccatttgtataatgtaattatggccaatggccttataggagagaagtgtagttgaaaaaggaaattaagcaaagatagaatagataaatgatgcctgactgtttttcaccatttggtccatatgtaattaattttcctcattcctcccgtaatcaggcatccagaattatctctacatttttaaagggctcaggtttgcttgtagtaaaagatgatgctacagaacagattggtgagttggttcagatgtctccataatggaaacacagtcataaaaatgccatcaccttcacattgtgagaagataaaatgcaatgctcatcatggatgaatggttactctcgttctgtcctcgagccacaatcaattgtacatcattaacaagacacaaaatctttactaattagcttttatgattatattgttattgcattgaggcttttaaagcattgaaaatcaaggagataggatgcccacaaaagagaattccgtggcaagggaggaaaatacagtccatcactcatgtcatttcagaaactttcactctataccatctataattaccatctataatttttagctcaattcactgttcagattaatatttttggtaaatgagtgacaactggtaaggagagggagaagaatattgagtgtgctttcacacccaaaagaaatttagctgctgaagttatctaacaagaataattgttcattttctctttgcttgaaatcttcaagactgctgttataaatcctacctacactttcttgtatattgttcttctctaagtgtaaaaaaatacaattcacccagttaaaaagaagttagagccataccttccaccaggatgaatttcaaatggatcaaagacttaaatgaaaaatacaaaataataaacttagaaggaaccatgggagaattctttcatgatatcagaatgggaaagcctttttgaaaccatcagacaaaacccaaaagccgtaagagaaaaattagataaattcagctacattttgagaaattctgcttggcaaactaaaatatacagaacaaaaacatcacaagcaaagtaaaaaaaaaaaaatgacaaaccagaaaaaaaatttgtaattcctctatttcataggcctgctattgaaaatatatcaagggttgatacaaatcaaaatagcaaatactagtagacaaatagagaaagaggcaaagggtatgaataatcattttacaggaaaaggtattgaaattattttaaaacatgtgaaaagatgcatcacacactcctaataaagcaaatgcaaattaaactccatcgtgataccactttttgatgatcagattggcaaaagtcagaaaatttgacaacagattgtgtaaatgatggggtgagaaacagcctcccctctcccactgtggatag

SEQ ID NO: 1884005 - DNA, 4001 bp, Homo sapiens
tactcagccatgaaaagcatggactaatgatgtacagcaacacagattgaatctcaaaaaacgttcaactgactttttaaaaagccatcagataacttcatttatatggaattctagaaaaggcaatactaatctacaatgacagaaaggagaccaatggctgtctatgaccagggctggggagagtggttactgcaaaggaaaccagaattctttggggtgaggtcaattctccatgtcttaatgtggttatggttacataggaggatacatttgtcaaatttattaaactgaaaaataaagttaatttttttttaaagggagactgtttctcctgttttgttttccccttcacttttcagaattaagctgcagttagcagactttcctggttactttgaatcaggaactcctcaaaaagtctgttgatgaagggagaatcagaattaggcatttagagcagcttgatttgacaactaaatgtagaaattcctaataaaaaaaaaaaccacttgaaatgttgccacatatggaatgggctggagaagatatcactgaggcatcattgttgtagggtgttctttctagggaagggaagggaggtgaaggaccatgagctcatcattatcaaggattctgaaacttcagttcatttttattaataaattaccttcatgtggccaatgaattgccggtctgattggaaactctttcctgcaccgaagaaactgcaccaattagcaatattcatctgccaattcagctctgcaggttcaggctcatttaacttgacaaaaatagcttctttttcttgagtaggggaagtttttctctgcctccagccctagtgatgggcagagatggtggtggaatcttattacagccttcctgtccctgatgttctttatccagccgcagcgccacaggctgcccgttttttttttttttttggatacccatttcacgaccttctttggtttctttatcacaaaagtcactgtatgtcttttagctcaaagccctactgcagtattctctgtttgtctttttccctttactcttaatatcttatttgttccttcccttttccccttcttcccttaccccctttcattcttccctctttttttctttaattcttcaccagcccctagcatattctaaactatttgcccctttcatgatgtaatgatgaaccgacccccgccatagtaatcaggtgggtttttttttctttgcagtttccttatactgaagtggtacaaccccacccccattaccatcacctccacttcattttaaatgttctactcttgtccaagattgactggccagttcttcctaccatttcagcccatcataaattcgtaaatatggattcatttgctgagcctaagttttctgcatgaaagtaaatcccttttgtgatacctacaaaagtcacagaatcatcaaacacagttcaaaagagcaaatgataaatattcattgcatcataatgatcttgattctaaaaagcaaattatttgctatataataggaacaggcaggttaaaaacaataattagagtgtgaaagaggtaagagaaagttctgagagtgatataaagtttcattacattgactgaagatggtttcatggaagtatattatgtaaaaactcatcaataatacactttaaatatggatggtttatttacatcaattatgactcaataaagctgtaaagcaaaggaaataaatagtaaaaaacaaagacaaacaaaaacatcaatgacttaggaataattagccaagatattcttaaatgtaggctagtgtatatgtaattttagacttgctatttatcagctgtatccttattctatgaaaatctcattttaccttaaaaaaattaagatgcgaggacatacctctgaatgttcagtggtcctgggatgctctcatgcaagctcgtttcactgtgagctgatgaatcagcataaaagctgaatagtatctcatgatcacactctgttctgccaataagacagtttattttaacttgctgttcccatattttgaaagagactgactgctgcagaaatatacaaatcagagatattatcaatcctgaattcccagtaactttatttttattctactttgctacacaggctactggagttaatgtcctataggtacttgaggatgctgggcacttggcaggtatgcatgttggtcaattcatttgacaacatttgtttgcaaggaaaattttccttaatgcgtcttcaaatagaaaagtctatgagtaatcaaatgtgagtgacagaagggtaaccttattccagtaatgtcccctttaaaaattttccccctgagcaaccataaagaataaaaatagtgataattatcagttctctatttttgctgtggaagctggggagttatgaaacaaatatacagctcagtttatcaggacattaaaaaatgcattatgcatgttattcttaccctagtgacaagttatttttttaaccattgttttttctctgacctgatctgatcctttttctctttctttctttctttttctttcttttcttttctttctttctttctttttctttctttctttctctctctctttctttctttctttctttctttctttctttctttctttctttctttctttccttccctccttccttttttctttctttctctctctcccttccttcctttttctttctctctctctccctctctctctttccctttctctttctttccttccttccttctctttctttctttctttctttctttctttctttctttctttctttctttctttctttctttctttcttcccttctttctttctatcttttgtatcacagaaagcttcctccaatcctttttctaacaaggtagggtgcaaacaaaggaataacaaacttcctttagatatgagaaatgtggatcttttaaagtgttatttttgagagtcttaaggcaacattaggataataacataacatgaaaactgtggagataaattttgatctcatgtgagccccagggtggcttttatttacaaatcatgtttacttctcagaggggtgggcagacataagccggtgttttagagagtctgaggtgaaagcttttctctccccaacaatggcatatttgtagtagaattttctcataagagtcttggtgaacaaaaatacacagggatagaaggtggaatggaaggaagtccatttcagaaggaaataatcccaacataactttcaagatataacaataggttattaactggtggatttggcagggaaaattctgctacatcattttttctttttcttcttcttcctttctttttaaatttattttatttttttatttttagagacagagcctagctctgttgcccaggctgcagtgtagtagcacaatcatagctcactgcagccttcgactcctgggttctagagatcctcctgcttcaccctcccaagagctgggactgtaggtgtgcaccaccatgctcagctaattttttattttttgtacagacagagatcagcctctattgcccaggatgatcttaaacacctggcttcaagtaatcgtcccacctcagcctccctaagtgctgggattatggacatgagctactgtgtccagcatgaaatcatttatgatgtgttgaccatttttcaactggatatgaaggcagtatagacacacaactgtgaatttatcaagacctgtgctttgtttacttagtttctttatataggaattttcaaacaaatgtaaattggaggcatgtacactgcagtaggtaatggctgtatcagtcaacacttagccttagttgtcaccacaatgttttaccccagtaccatgcctatcctcgtgggccaaaaacacagatagagtctagaagaatgcacaaagcagcttttcaccaagggttaagtttccattctacttgctaa

SEQ ID NO: 1884006 - DNA, 4001 bp, Homo sapiens
gcacctgcaatcccagcgctttgggaggccaaggcaggaggactgcttgaggccaggagttcaagaccagcctgtacaacaaggtgagaccccatctctacaaaaaaaaaaatatgtatatatatattcaatatatatattcatttatttttgaaacagagtcttgctctgtcacccaggctggagtgcaatggcacgatcttggctcactgcaacctccacctcccgggttgaaacaattctcctgcctcggcctcccaagcagatggattacaggtgcccaccactatgcccggttaatttttgtatttttagtagagacagggtttcaccatgttggccaggctggtctcgaactcctgacctcaggtgatctgctcgcttcagcctcccagagtgctgggattacagatgtgagccatcatgcccggcctgcaaaatatttaaaaaattagtctggcgtggtggcatgcacctgtagtcctacctacctgggaggctgaggccagaagatcgcttgagcctgggaggtcaagtttgccctgagttatgatcttgctgctgcactccagcctgggcaacagagtgagactctgtctcaaaaaaaaaaaaaaaaaaagaaacagttttttggctgttggcaatttttatgtgagttgcttgtacctgtcctataggaatttgatatttactctctctcagaaagaaaaccctgcaagacagtcctctaagtctgttgcttctcctgcattttcctattagcagcactatctgtgtagttgcccaggataaagacctcagttttggttttcactgctctcaacttctacttccactccaaaactcagcctggttcatttcatttctgagatgtttctcaagtaggttctcttttccatgtcctcaacccctgctctagttcaggcccttctcttgttttaattaagaggttcatggggatgaagacccgaggccagagtttgagtctccccaagtcccataaaggtacttattatttcccttgctggactcttattcatctttgaatctgtagtgcctgatgcatgatcaagtacacataataggtccttgataaacaaaggatgaaattgtttttctcatctcctctctctcttcaatgaatcctctatgttgttataattatctaacacacaaatatgattatgtgattttccttttaagaactgctgtggctgggcttgatggctcacatctgtaattccagtactttgggaggccagggcgggaggattgcttgagcccaggagttcaagaccagcctgggcaacagcacgagaccctgactccagcttaaaaaaaaaaaaaaaaaaaagaagaattgttgctagtgtctcactgcctacagcagggtttctcaatttcagtactactatttggcccaggtaattccttggtgggggaggccgtcctgtgcattacaggatgttcagcagcatcctttgcttcaacccatggatgtcagtagcacttccctccctcctccccttggtgaagacaaccaaatatgtctctagactttgacaaatgttccctggaaggcaaaattgccgctggttgagaaccactgacctacgagaaaaagtcaaaacttagttatcatgtcattcacgacctggtcctaggccacctttcccgtctcatttcttgcctctcctgtaccttcgtgaacgtgccatgtaccttagcgctgtgtcttttcatgtcctgtgctctcggcacttccttgattaggtggaccaactgctacaacccatagacaaacgggtgttggctcagacacaactggtttgtttttgctcacctaacagcgctctttggttgaacgcgctaatgaaacggaccccttcctactctttcagcagttaagcgggcccgagactctaccaacttcaaaaactgtttccaagatggccctggggatcatctccattttacctaatgaaaggagaaaggacattgagaagagcatgaagaagaatgttatggccaggattgaaaaagctacacatcccttgccgtctcattctaattggttagaactcagtcatatgaccacacttaacggcaaaaacggatggaaaacggtttaactgcgtgcttagaaggagagcagaggttttcctaatcagctagcactctcttccacaacctacttattagttcagcaaaattatggttattctttcaagcccagcttacatgtcactcctaggattataaattcgaatgtccccatgatatactattttacgttctttgctttttctagtgcatattacggtatgattagttatggcataaaaatcattttttcctcatcaatttctgggacagttcctggtaggtggtgggtatatatttgtgagaaaaaacaatgagtagtatttaattatatatttaatatcatctcatgaaaatgcctcaaggacacactgaattttattgtcgttgttgttgctcttctagactctggtctacgcacctgcactaatacaaaagtgagccagaattatttgcaatttctggcaggactctagcatcatctgaggcctaggagaaaaaggatgaagttccttttagagacctgctttcccagtctccccaagcctcaggcatctgccctacaggctatccacagatttgttttccaccggctttccacaccctccacttcccctcccagcacagttccctgtgggctcagtgacttaatcctcccacagaagatctgcatttaaaagggagtgggctgggcgcggtggctcatgcctgtaatcccaacactttgggaggctgaggtgggtggatactgaggtcaggagttcgagaccagcctggccaatacggcgaaaccccatttctactaaacatacaaaaattagccgggcgtggtgacgggtacttatagtcccagctactcgggaggctgaggcagaagaatcgcttgaacccgggaggcggaggttgcatcgagccaagatcgcgccactgcgctccagcctgggtgacagagtgcgactccgtatcaaaaaaaaaaaaaaaaaaaaaaaaaaaaaaaggtagatgagtgaggaatcactggctagttagttatattgggaaagacctaggggtcctgattttaaaaagggctaaaatgttgcagttgttttttcaaaaatctacatttgcagggtctgatgtggtgactcatgcgtataatctgaacactttgtggggctgacgtgggcggatggcttgagtccagtgggcggatggcttgagtccaggagatgaagtttgcagtgagctgtgatggtgtcactgcactccagcctgggtgacagagtgagaccttgtctcaaaataaaaataaataaataaataaataaataaataaaaccctacatttgcactttagcatttccctaggaaacaaaagtaataattagatagaaaaaaagtctgccatgtaaaaattctgtaaaatttgtaaaaaaaaaaatggggctgggtgccatggattatagctgtaatcccagcacttttggaggctgagatcggaggatcagttgaagccaggagttcaagacctgcctgagcaatatagtgtgaccttcatcactacaataaaaagaaaaaaaaaaaaaaatcagtcaggcatggtgggatatgtctgtagtcccagctactcaggaggttgagttgagaggatcacttgcccccaagagttagagactgcagtgagctatgattcagccactgcactccagcctaggggacagagtgagaccctgtctctggaaaaaaaaaaaaaaaaaggcagaggggagaggggaattttgtaccttagaaatgaataatctttggaactctggctatatctatcactgccaaggtaaacagggataaggccaggatgtgactttgatgcctggtgttcttattaaccaaaatggagtaagaatgaaagtactttt

SEQ ID NO: 1884007 - DNA, 4001 bp, Homo sapiens
atgacagggtggtcaacagcctaaaactctttgaagaatccaggatctaaaagtgtgagatcttagaaagcacctggtctcactcctccaatgcatttattaggaaatgaagaccaagagacgggaagagggtgcctgcccacaatcacactgtcaatgaggagggagctgactagcaggcagatgccctgacgccctgctgcgcagcttcggctttatccagttgcacttttggtttgattgaacccagatttcgcagagggaagtagtgggagataagccttagaaaggtaggtcagggccaggcagcaaaattgctaaactagggggcttaaatgttattcggaggaacggggtactcactaaagagctttgagcaggaaagttattctaatcacagagatatttggggaaattttaggtgggagttttcaggggtattgttaatattttgctcagataagtcacaaattaagcaattatgtgaacccctccccccaaataattgtgagttgtagtgactaaaactccttaattatattataaattaataaccaataaataagaaaaaactcaaaaatgaagtcacctattgcttaggttcatgagatcatcttaaaatgatctagaaataaaatgaaaagtcctgtgagatttggaaccaccctaggtatcatgtccagctgtggggagggggttgggggtgggtctgagtacactgcagcctcaggtatccacgctttcataactctattaggaccaatgattaaggccatatgaggacgtattattttatgtgatttctccttcttcctctttttcccctgtacatatacatttgttaaaaaggagaataaaaaatgatccctatacctttggaagaatgccttgggagagatgcccatgccagggaccagctttctctgagttgccaatcctattgccaaaggccttccaaccagagtgactctatcttgagcaggggctaggcaaaatgaggctgagtcctactcaggtgcattccgaggaggtcaggcattctaagtcacaggaagagacagaaggtcagcacaagatacaggtcacaaagaccttgctgtaaaacaggttgcaataaagaagtccgtcaaaatccaccaaaaacaaggtagcgatgaaagtgacctctggtagtcctcgttgcttattatatgctaattataatgtattagctgctaaaagacacccccaccagcaccatgacagtttacaaatgccatggcaacatcaggaagttaccctatacggtctaaaagctggaggacccctcagtttcaaggaaatccccacccgtttctcagaaaactcatgaatgatccaccccttgtttagcatataatcaagaaataaccataaaaataggcagccggcagccctcggggctgctctgcctacggaatagccattcttttgtttctttacttttctaataaacttgctttcactttattctatagactcaccctgaattttttcttgcacgagatccaagaaccctctcttggggtctggatcaggatccctttccggtaccactgtgacctggctgcacacggtccccctgaagccacaggttgagctatgtcaggccccaaagacacaggggccccagcgcttcatcctctctctttcccctcagagcttcaaaactttgaggttctcaaacgcctagataatggtttgcctcataggtgacagtacactggtaggtagaaattgacctgaccctactgaaaccccaaagtcccatgagccctgaagtctgattcggtggttcattgcaaagactaacatcaagcgagggaacacaggaaaatgtcacaaacagtgcttgaaattgatttgagggtcagagcaacctgaacttctgaccctgacttttaacctcctcacatcttgctctccgtctctgctgttacgatgatagtgcacactctgtgcagaaaagacggctccactttacacgtacccaggcagaatactacagtgggcctgttgccgggcaaccacagctagaacactttgtttccggagcattttgagaatgattacacttgcggggttgggttgggttggttggggtttttattattattattattattattctttctttctttcctgtggtacctattcctggatgttgtaaatattcatctgagttttgcatagatgaggggaagacgttatttaaatgagattgggagggtaatttgctcgggtgcatcactaccctcttttatgttttgcaggcaccctgctgcagaaggagagaaagcgcttttgtgaccattattgacttagatgacaatgctatgctggcttgtttcagttacatagaacaatgggagcagaaaaaagacactttagcgaaggcatttagtaaattgttagtaaatggggaagatacaaaagccccagctaagtcatcaggcacatttccttgctaacgtggctgcagttactctcctggctccctctaaaccccactcagagaggaacgcttcctcttcctcttgttaagtgacatcaacacattgaaatacagctcttggctaaactccgcgagctgactttgaaaggtaacgggaagaaacatttcctttcaaaaggaatctggcagcctttgagcctttgaaacacacccatttcagatgagtctgagttgggcaggaattgcaagtacttccaaaatcatccgtgtcaatatttcccccacccctggaatattaatatgtacacacacccacacactccccttgagatgtgtttatttcacaattcacaaatggtgaagagaccttttctgaatttttttcttagggacttgggaagccagcatgaaaattgtgattcttccaaatgctttcccatatgccttaaatgcccccattaaagttaattttctcagtccacacgtgttctctgtgtcttggtgaccacctccctgcctcccttaaggtaaccttttcttgaggcttgctatgtcctgtcttggttatgacttggtcaggagcctgggcaccttatggcagaattcagggccccagccaaatacagcagttgtttacagggcacagtcagtgagggactcgatctcttcactctcacggagatgtctatggatagaaaattcgcctctgggccatcgacagtttgagccccaaagctgttgggcttttcagtccagagtgcatttacgaagctctcccatctaaaggatccccatcctggtgatacagaagtgctggggagagaagagcatggtccctttaaatgataccgaagtggaaaggggagtgctgggtagaggagggcgtggtccccggttagggctccacccccaagggcctagatgaggacaggcagtcctgtcttctcgcccaaatgttgcaatttccaagactaccctggcccgccacacccccatcctggccctataccctagcaggcagacacaagtagctggacatcgtgaggaacacatcgccggaagaagacacaagtggctggacgtcgagaagggcacgttagcagaagagcacacggacagacaccgacaagccggcaggccactgaccagcacaatgatgcagagtttggcctgagtggtcggagaagagtcaggctgtggagcggcctaactccaaggaaaaagccagctcccttccggcttccccatctgcagagggccacttccgctcaataaaacctttcgctccttctccaagcccaggtgtgatccgattcttctggtataccaaggcaagaacccgcaatacagaaagcctgctgtctttgcgacaaggtagagggtgtaattgagctggttaacacaagcctataaatggaaaactaaaagagtaaaattaaaagagcactctgtatgtaacacacgcccactggggcttcaggagctataaatattcaccccagaagctgtcgtggggttggagccccac

SEQ ID NO: 1884008 - DNA, 4001 bp, Homo sapiens
tcctgcttgtccttcctccgctgccggcaccccagactcccggactcaccctcggctgggttgccgtcttctcctttcagagatggatgccacaggttccgggcttcttgggctctgggaggacgcgcagcggaaggcgaggtcgctatatgaggccgctccaaagtcgcctcgcgctgttgctgcgtcactgcctccagcctccagcatccagggagagtgcaggcaaaactgattaaggaaaaaagatgaaagaacacaagtgaccagtatcagaatcaaaacaacaactctacataacagtattataacaagataatcagagaattttgtgaaatacatatgatcaaaagtctgacaacagagatcgcaacagatgctgaacccaacttactaaaactggcacaaaaatagcataaaataagaacactcctatatatattaaacaaaattaactaactaattttaaaaatccaacaaatcaacaataatgctccacaaggaaaacaccaggatcagactttgaaaatgttccaaatatttaaggaagaaaaaaatattgacactgctcactctctctcaaagagaaagacgaaagggatggtttttcaatttgtttcgagaagccagcattacattaatacacaatctgatcagacaataaaaaacccagaaataatagatgttctgtttcacaaacacagatacaaatattctaagaaaaatattgttacatgaactaaaccaagcaagaaattaaaactgaaattaaacaacaaagaccagagtaggaaacaacaacctacaatagaaatgaaccaataaaggactaatctctaaagtgtctttaaaaatgcttcacatcaatgtaggaaaaacacaaatgatccaagacaaaaagaacactatgaaggaaaaaaaaggggggtgcatgggcgaataaatatttgctaagccgtactatgaagagggttatttccagttccagatgagagatacccacaggcagcccggggggtgggaccccaggggacaggacccccagaaggtgacagagatcctggcagtgggggacctggggcagaaggtgaccccatcctcttcccgggctgccgctcaaggctcctgccgctcccgggctccagcgccctctcaccgggtcctgatcagggctccctttctcaccccgggtcaggcagaaggccccggaccccagtcccaaaagaaacggaggctgcagggcttccacgcaggagagaaggggagggctcctctccgacccgggctccttcagcgcccaccccagcggactctgagagggcgaggaggaggtcgggggctaggttcaagccgcactgggccccggattcaagaaagaaacgggctcctgagacgcctgtgcatcagaggggtcctggctcggcctgggatggggctcggggagagtcagacgatctgccaggctcccagcctgaggccgccctccccggcgcgcaacccccgcccccaccgctggggccctcctgcctttcccggcacgtcgctccccgagaggccgagactcctgcctgtccttcctctgccgccggtatcccagactcccggactcacgcgcggctgggttgccgtctcctcctttcagggctggacgccacaggttccaggcttcttgggttctgggaggaggcgcagcggaaggcgaggtcgctgcatgaggcagctccaaagtcgcctcgccctcgcgctgttgctgcctcactgcctccagcctccagcatccggagagagtgcaggcaggcggcacccagttctcttccttctcctcctgcccacggcggagcagcctccagcatccagggagagtgcaggcacgtggtgcctggccctcttctttctcctcctgcccagggcggagccatacagaccacgctgcctggagcagggtgaaatgcggaaagcccacggagcaactatttataatgacttatttaactagatatcctgtaaggcatgttcggattggatgagagccactgtgcaaaacaactctgattggataatatgacccaatcagggctggctgaaatgttccttctcgtcctatcagactcagggtatagatgctggggtggggcaggagccagcgcccccaccggaatttgtggccacttcgcctttggctttgcctcctgccatgccccgcaggcccggagaatgtggccccagactgaaatgagaagaaggtggccccgccgagggtgagtctggggaggctggagtgggggctgtgagggggtgcccgggcaggagtctcggcctccgctgggagcagcatattcagtgtgtaatgtgaataacaggcaaaataggtcttaattttttgtattattagtgacaaagacttccggtcaaccgcaggccgttaggagttatgctttgggggagttgagagttaaacttggatttttgactgtggggggttagcatccatatcccccacattgttcaagggtcaggtgtattttagagcactggcatgaatcactttgggtcccacttgttgaaaataggcattgacatttggaggcgcctccttgtagcgagcaggtactactgatctctctcttccacgtactgacctttccccagcttctgtggaaccctgtttcctggagtttacttacattctttagtcaattcttctctaattcttctgaaagtggatttggagcaagggaagagaaacctgcagtcttggctgtgtccaggttttggttctgattcttgtgtgcggtccacattcagattggggtccttaatgaaatccatggcttcatctctccttgcatgccagcatcacccaatcgtgtatagttaaactcgaactccctttgcaccacagactcccatctccaggtgtttaacaggaattggatactgagcatgtgatatttttacctaaacctaaatacatcttttttccttgtttccctgtgtgcttgtcccctgcccaaccatcagcaccacaaatctagacgcctaaaattcatccacctcctttgtaatggcacccaaccaccacatacaatccttttaaatatctcagttctgtatttggaaaattacacattttaactgtcttttcacttcattgcctttccattactctaggccctcatggtttcttcactgttagactaatgagctatgagtgtttaccctcctaatcctgcatactccttaaaacctcaggcagaaaatggaaattaaactcgtgggcattcaaggacacccccacgattttcagggtaaagtttttatggcttagcttaatgcccaacgactttcacattcctctgttgataatttcaatctcttgaaattctctcaaacaaaaataactaacacttgttaacaacttcgtgtttccaggaaatactttaagcaattaaagtcataattaaagtaacatatgcaaaaaccctatcagtactgcttttatacttaaagttttgtttaaacgtaaccctgtttacttgtttatgtgttgtctatggctgctctcatgctgcagaggtcgagtagaatatggaatagatgatgtggaccacagctccaaacatgtttactgttttgccattttcaggaaaagttgctggatgactcctaatctagttgaatgtctgtgttactagtacagggagatccttgccagccaatgtcagataaacaagttgattttatggacaatttgtctcatatatacaagcacatttccagtttttgtaactgttaacgatttattttcccacttagtttgctccctgtaactttgagtggctcaactattcatcctgttttgatttcttcataccatttaccctccttccagattatttaatcaggtgtttttatattatacctcagcagggttctgagcttcttgtttgtttacatgtctctatgaccctctttgttgtttcataaatggattgatgata

SEQ ID NO: 1884009 - DNA, 4001 bp, Homo sapiens
tattatacacattatatatataatatacacacacaccatattttatgttgtaaaatatatccatattttatggtgtatatatatatatatcaataccaatacggtgtgtgtgtatatatatactatattggtatttatatatatatatatatatatatatatttctagaatttgcttcaaaatactccaggaaaaataaaacacagagtaaaggggtagatgaagtaagaatagctaagtactgatcattattgaagccaggttatgaacaagtgaggtttcattagactatttgttctacttctacatatgcttaagattttccataacaaagttaaatttaaaaagaagtgatgacacccgggaatagaatcttaaaccccaaaacaacactgtactctatatggaaatggtcacgctctccctttgaaaagctttctcatcacgggagataaagttaccaacttagagaaaccgaagggtctcagtgagacactccccaggaatataccacagaaagcaaaagcataatggctaagagataaaaccatggaaaatttaagaaaagatgtatgttttaaaatattagtgaaacatttaaatatacataatgaactgggaaagtataaagtacatgtcaaaaaaatcttaacattatcattacatttaaaatattataagcctataagaaaaaacagactattccctctgaaagggcaaaagatatgagcagacagttcgtggagggaaaggaaaggtataaagacagtgaatatgtataagggaacaaacaagaggacaggttcacttgtaataaaatcagcacataattaaaaagcacatgaaggtctacacattattgacaagatgagctcattggagaacatcgcatagtcctgccgtagttgaggggaaaatgttcttccgccacactgctggttcacactccctatttatatgtagcaaaagctcattaatgccctttgtttcagcagttcttcttgcaactatttattcatgagaagtaaaaataagcaaaggtttgtcttacctacaacagtaagtacaggcagtttcctttggcgctgtgtaaaaattcgtgcgcaattcaagatgatgagcccttggcttgaagtcagaggcctgaaccctggtgctggcctacttttaggacttggtttcttcttatcctatgggctaaaagttagcacttaagtctacagctactgaaaaactagaatagatctaaaagacaaagtgtttatttttgctaacatatataagtcacctattaaaaacctgcttattcagtagatatcattttgtgcataagactaaaataataaaaataatgatcttcttcagtcttgagtcttgaatctcagaatcttcctctgtatagtgaacacactgggatagttttagataacacatccattggctctcagttctagtccaagatgaaaagcatatccttgtgtgatccaagtcataaaggtagagccagtttccctaagatgtattcttggaattttccagaagattaatttttctcaagccttagattgctacaggattgacctcatgggctaacatccataagaggacgttaccagttgagaacccatggacttagaggtgaaactgcctgcagcttgcttctatctgaatttcacctgaggtgaacaaatctgtgccagaaggagttgcccaagtctccattctagagcaacagggctgttttgagtgcagttatgaaggaggaaaagcagctccatgcctccatggaaacccagcctgaagatctcaagatcctggtccctggagaagcagatccatggcaccgaaccccacaccgtacagcccatctaaaggtcaatggcacctgtgcgagagatattaaggaggagcaatggtagacaaaatcagagcatctatgagctgactccaggggtgaatttgaggaaaagctttggcgttatccagattaaaattgaagttaaatgctgcagcgtttccagaaacatgaggcactggtttgtccccaggacaggaaatactgatgttgactttcatgatggaaacaatgacttctgcccactctccaccctcctttcttacacttagaaaatctggcattaaaatgaaaggcaaaccaaagaagaaatggaaggtgacaaccagagaaaagaccatgtcagcaaaatcccggctccaagtcctgagccctggtagtgaggatgcattcacaggttgacgcagagggtggtattaggatctaggaacagatcaggaaatattgagtaaaggaagcacctgaccaggagagccaggctgcacttggaatcactggggaaggagaatcttggttacgtttgcttaccaggattaccctcctgtgggttaatcaatcctaataggatgctgaagggtttttttaaattttcaattcagaggcccattttaaaaaatatgctcactgttggttaaggcacacagctgattttgttaatatatatgaggatccatgtctaaagagctcaaagttattattaaactcataactactaaattaacaagcacatatataacataaacatcctcaaatacacgactgtgtcatgtttaaaactctacttgttctctgagcaccattttatgcaaaactatctaagaaaacagctgccaattaaattggaataagataaagtcaacctatgccaatgaatggagcaatattggaacctattttccagaactaacttgatgatcattcaacaagagattctggcaggaaaaaagaatatatacatacacacacacacatatacaggttcttttcagaaaatgtctcaaaaatgtggtcctcatcatgtgaacacagtgttcgtgtgtgtgctgcctgatttgactcccaactttctgccattgcattggtgtttggggggttttgttctcatagtacagaaaagcttttaattgttaaacgtgtgcaaaataaaatgcaaactgcacaactcaattactttccttcaaactgatggccatgtttctcagtgtctgtcagttgttttaacaaaaacttttctcatctgcaaagaattgaaattaccctttcaacatatgttttccaaaatccctgctctgttttctctttgaaattcaaaattactaatataccttactgcaaatataagtgcctttctccagaaagctctagtggccaagtagaaatgtttcccttcggatcaaggaaatggtattttgtgattaaattagtttgagcaacacagctctgggtgttttatatcgcagagctgtgattttctagcagatggcttcgacatttttatactgaggcaagttttagttttccaacctcagttaaaatctttaaaatgtttgctttagaaggaattactacacaatgggaaaagaaccatatgcaataccttatcatttaggaaaaatattccattttgaaactgagtttcattaaggcctgttttgtgtaagcaggctgcaggttcagttgctacacacattgttagggccctgcaagtgtctgtttttcgttaccctccccacacaacccagccctctgaaccccggcgcctgcatctgtgcgcttacatgctgtgattcactacaataacaggaatttgctgctgttatgattgagataaatcagctttgtggtctgggcagccattctgataaccatgactccacctcaaatttgctgcctggtcttaaaccatctgcaatacagtctggtcgatgaagcagacacagagatactatattttcttaggaattaaaataaaatagatactatggaccaggaatttaactaacacctttccctacattaactaatttaatccttacaagatccttaggggttaactccttctcttatctgccttagatataataagggattgctcgcccacagcaccccagttggtgtgcagctcagcttgatccctgagtcctag

SEQ ID NO: 1884010 - DNA, 4001 bp, Homo sapiens
actatttttcacatttatttccactcatgattttgttttctatttcatatgcgcttttatatttgttactagaatgttaggtaagtatgtcttccatgatgccattcaacccattgattaaaatgttgaagagaataggttcaatgacagagctctgtggccatccactagagatcaccccagcttgagaaacagtcaatgtttaacattcttagacataattctgttctaaccaactagagccaaactaaaaatctagtagaccaggaataatttgaaagagcctcagaaggctgggcctgcaagctcccacctccatcccagtgtttccattcctggcactgaagcccctgggatctcatccttaggtttcagatccaccgccctaggccagccgctcaccctgctgatccagagctggctccaaatcagcgcagcccatgggcccagcgcgccaaagtcctgaccagcccctgccaggcacagctttccaaaacaggcgtttttgtcactgttgttgcttttaatcttgctgtaaagaggcacataatttcttgccagttcctactggcagcctcttaggaaaatcactgtgtgtgtgtgtgtgtgtgtgtgtgtgtgtgtgtgtgtgtgtgtgtgtgtgtgtgtgtgtaaagtgtgtgaagacagaaggcctaaattcccccactacccagggctcctcccatccttcttttcatagctaatttcgttaagtgtttaaacaatgtaaatccggcagccctccttcattaaagctgtgagattgagggcagctgccgcctagctatgggccctcccagccagcctcggagccgaagcgtccaccagctttcccgaaatagcgaagctcttccttccctgcctcccctggaatgaccccgggggaaggatactccatttcctacgcccagattactttatttatgaccatccaatgagtccatatttggagaaaaaaatatcaccaccatgtggaatgaaatcatgcagctgtaaataactgatgtaagtgtttaaattaaaaggagctcacgataagattgtgtatgtatggaactaggtatagatggggagtatgtgaactggactccattctgtgacaagcagggtgacccaggacaggacaagtggggctctgacaacttcaggggccttatggctgaggagctgttcaacatcattcttggtcagattctgcaaacctggatgaggacagccaaggagttcagctccttaaaaatacaaagtcaccgccgaatcacattagaatggagcccatgccacatattgaaggaaacattttcatgctttttctccattatctacttattaaaaataatttattaaccttgcaggtgactttgtctttaagcacaccactcctgtcaaggagagccttgtggtctcattttagaccctgttggcagccctggtaaaagagtcaataatttttcctcataggtacacataaacacattctagagaagtcttgtgaaaacctaatcaaatttgcaacacatcagcatgtttagtatttaagatactttgtacagtgaagaatcaccttataaaccaataattatcctgtgatcctgcaatattgcttaaaatgaaacctgcctacctgggtttcaaagcttatatttccagaacagtttagacttcacaatgaagatcactccttctaaaacatgacccttccagggcaagccattctcactccaccatgaagcacttatgcctgaaatccaaatggagagtaagagtcagtgaaagtcactctccttctgttggaaatggaaattactccagagatactagattttggttccaccattggctgaggctcaacaattgccagctggatgatgaaccaatgcttgggagtcaggagatggtatattcacaactgaccaaagcctggcttcttttcttttctcttgaatgcatgtcagtggcctccctgggctcgccgtctatgccaccctgcaggggcacatgtgcgttgcaggctctcagtcaatattttatgataacaatagccatcattgtgaggatcccccaacagcactgggtgttttatgacacaaccaaaaactaggcactaatgcaaattttaactggtaattgggaagtgtgttaagatgtttttatgatcaatttgtagatcaatattctaagtatatttggaaaaatacattatccatttgtgcaatacaaatacgtgacatggtttgaatcctctactcccttattggttgttgtccacgtgatttcttgcaacacaagtttgttaacattactacaacaacagtgcttcccttattttcttttgtattgctaaaacttttgttaattacatttgatgcttttttttaatcaccatagaagtgtgcaaaattgtcattctttcattgtggattttttcttttagctgttttggccttgagttccaccttgtctcctgttcatattcacactcctgtctctttttgttgggattcattcactatatcattgcccattgccttatttttaatatttttggattaactgggtacactaacgcagtatttagattttactcttaaccaaatgtgagtctgtgattcaaaataagagttcatcctgatcattttattaacatgatttatatgcttaattttatttctgctattttgttttatggtcatttttaatacaccttttatattgaggttacttttttaacctgacttttcccttgtgatttggaactcacatctactattttcattctgttagtaatgacatttaataagtatgcactggaatctactttctctaattttcattatcaaaaataggcctggcatagtggctcacacttgcaatcccagtgctttgggaggctgaggtaggaggatcacttgagcccaggagttcaaagttacagtaagctgtgattgcaccactgcacttcagtttgggcaacagagcaagacccctcttcaggaaaaaaaaaaaaaaagacaatataaattgatccttctctgtgtgatatgaggaatatactccacttttacatcttgtcttctggccattcaattcccaatttttagtgatacagtaggttatttgaactagataactattacttagttaatatttttaaccatgtgtcctcttttggaaattatttttggcattcttgttgtgttttaatgtcccattgagaattacattaattttgttctatagtttatgtttgtttggggggaagaggttatttgtttatttttattagtattttatatcatgaattctccatttttggatttgatattttgattcctcactcagttggcttaaaaatgactcactaagatgtttcttgtttgcatttttttgtggctgttgtctgtccagaccctcacatggggtctgaacttctcaagttcacaagagaacgcagcttttctgcactgggatctcaatgtctgcatggcagctaggggagccaaaatgggagaatgcaggacagacacttcaatttaaatttcagataaacatgaaataacgcttctggtataagaatgcccccaatattgcctgggcatcctgcattttatctggaaaccccatgtgggtcaccatacttttcttggtcacatttctgcaactgatgatcattgtcttcgtgttacaaagaaacaggaaccaagttttatcgccttgaccctcactgaatttgtgggggctttttcttgaaattaaaataaattatcagggtaagtctaggcaaaaaaaagcccttcattattttatctagatttctgaagagtctttctttaacttgggaaaatttccaccaaatagttctttaatgatagctccacttttggaggttctttctctggaatgcctaatatttataaattaaatatatctcagcccatgcttttcctatattttctctaattaaccttctcttatcctct

SEQ ID NO: 1884011 - DNA, 4001 bp, Homo sapiens
ttttatcaagtgcgtgcattacttttttgccttttaggtttttattttatgtatgtttagacttttaaattttcaaataatcatagattgacaagaatttgtgaaggggtcccaatatccttcacccagtttctccactgtttacgttttacattctacaaaacaatatcaaaacaaagaaactgacattagcacaatgtgtgttcttctattacattgtatcacatgtgtagattcctgtaaccaccaagacacaaaactatcccatcatcccaagatctctcctgctacctctttgtagtcacacttccccaccaccgcctctaacgcctgccaaccactaatctgttttcactgtttataattttgcccctggaagaatgttatacaagtgaaatcgtacagtatgtgactttttgagattggtttttttcacttagcctaatgctcttgagatccatccatttagttatttgcatgaataatgtttctttttattgctgaatattggcatagatgtgtcacttagtttaagcattcacttagtgagggacattttggttcttttctagtttctggctatgataggaagacacaggagaaaatcatctggacctaggagttgaggatgagttcataggcatggcacccaagtacgattcattaaagaaagaattgataaattggacttcatcaaaattaaaaactttgcctctgcaaaatattctgttaagatgatgaaaggacaagctatggaggggagaaaatatttgcaaactgcatatctgacaaaggactcacatttacaatgcataaagagctctcaaaactcaacagtaaaaaaaaaaatctgataagaaattgggcaatagacatgaagagacatttcatggccgagtcaaatcagcatgtggaaatatatttaacatcattagcctttggggaaatgcaaattgagatcatgagaaatcactgcacacttatttgagcagttgaaataaaaatataatgataaaaccaaatgctagcaaggatgcagagaaaccaaatttctcatcccttgcttgtgagaatataacatgatacacacagccactcccaaaaatagattgacagtttctcaaaaaacatgcacttaccatattactcaacaatcacattcctgggcttttatcagagaaattataatttaagtttgcacaaaaagctacacacaaatgctcataactgctctattcgtcatgtttttattggcaggtaatttacatacaaagaaattcaaaaatcttaaatttcacaattcaatgtgttttgtcaaatgcctgcactcctgtccctcccccactgtaagatttacaacactctagcacccccaaaaagttatttcatgcccccttcagctaacctctaccatgccactccatccataaaccccaaagcaactattaaaaaaaaaaaaaaaaggcaaaaaccgcaattacttttgcaccaacctaatactagtctgatttttaaatcacagattcattttcatataaatggaatcatacaatgtttattctttcatacctgacttctttcattcaggaacacgattcagagcttctgctgtgcagtaggggacatcaatagttcattttctttttattgtctgctaacattccattgtatggattcaacctagtctgtttattcattcttcttactgatgaagtttttttctcacggcttaagtccaaggtgtgtctttttcgtccagccaggtggccccggcaggtcgctcctcagggacccacatgggtcagggcggtgcagcagtgacccacaggggccagtgcagttgaagtggctttgaaacctgattggagaaacagactgctcagctgttaagaacacacagcgctccagaaaactggtgttcaacacaacgcgtcactccggcttccactgctgctgcggagagtcaggttctccggcaaggccccgcgcgcccgcccccgcgcgcccgcttctctgtccagggaacgcctttctgcgggcggaggcggctacgagggggcgctgcgaaagcggatttccaggcacgcctggcgccactaagcggcgctgagacggcgctgcctcctgactgccggttggaggctacaggggctctggggcaagggccgcttttaggagtttgctggtcacgaggggggacgcgacctcgtccaagatctgtctgcaagggacccttcccagccgatgtgaacacagcccggggaaaggggtcttccggggagcaaaggcagcccgggaagaggagtaggggctgaaaccaaaggcagcctgggtacccaggttttcccaggggacaagtcccccagttagctgggcacagggaggcatggagagcggcagcaactgcgttgggatggggcggctgccccaggttggggcggtgacccatgttccaccaggccaggcgcagggctgaggtggctgactcctgtttcacaagtgaagacctggtcaccccagcagcaaggcattccggagtgggagaattcctgagtcctggggaggaagccgtggttacagggctgtggccctgagcaggagctggctggcccagcagggtgggccgagcacttcagtcaaggctgagcgccaggcaccagggactcaggtctgagagacctgatgtacatcctgctccagagcagatcacagagatgcgcccgcatgaatccccaggctaagcccagaattccgtggaagatgcccatgggccaggaacacgggtagtcaccgcgctagggcatcacacagggccccccttggccaaataccacgagggaacttagacacctgcatggggccatggaagtgcctgcaacctcacactcaggcctagggcttaccgaggtattgcagatatttgtgttctcagagtaggagcttaggaatcagtatcttctcttcgctacagggacagagatgcagtggcctaggacacatcacaaatatttaaaacgatgtccttggtcaaggacagaggtagccaaggccagccttctcccaggaaactaacccaggaccccaaagcacagagctgttaggtgggagggaattggtctgtatgtctccctatagtgttgcaacacttcggcgctgggctccctgtcccagactcaccttctatactcaagccagaggcctacgaaagccgggttaagatcttcccctgcctgtccctgtaaagcttccccactgtctctggaaatcatttgagcttcttagccccacagcatgagcccgctctgactcaggccctgacaagctctttctcttctgtctctccctcctctgttgatatggacacaccattcctttggcatgtctagtacagaccagatcccctgctgttgttagcattcctccctctccctggaatgttcttccttatctgtctacctgataagcactgagtcatcctgcaaaactctgcacagctttcaccttccctgaggagcctcccctggccagccccaccctgttgcaggcagaatgcttggcggtgggttgctgaccacaaatccattccccctttattccttgccaagggaatgctgattttgctcaggttgtcaaccctcagggaggtgaccctaaacatgccaagtccaacacactagctctaccccctgagagcatgagaacaacacggatgggcatgtgcccggatctggctttgccctcatggactgcaggtcaggggtgggaagctcttatagagcagccccaggagccctaggggccatcctgctggccatgccatggcagtgtcagaaccccaaacagcacctggggtgaaggagctactgaaagagtggagagactccactttgtcctgttagatctgtctcagaagtatttttattaggattgactgggtaagctttcttccacagggagcctaagggggcccagagattcttctcagaattggaggccatcaa

SEQ ID NO: 1884012 - DNA, 4001 bp, Homo sapiens
tacaaaaaaaaatatcgcaaagacaagaaaagaaatagctaaatgaatagacagacaattcaagcaatttattgtaaggaagaacaatcaacttccacaaagaaaatatcatggagatataactggacattgcaaacactttatgtatggattctgatttagaatttacttgcttgaacccaaattctcatgcttctatgtgacctgtgaagaattataagttcttccctctgtgagtcagatcccaattctgccatactgtttctggttcagattttcttcctataggtctgtcaaaaacaaaaaaaaagaagaatcactggagtgggaactagaggccttaggttcctgccctgcttcttgaactagcagttaacaaatataccaagttacatttttgggtaaagaatagcctgatggatgaatcttccgaagtgatgtccttggacaaattgcctaaatctgggtcagcttcatgggcataagatctgtgcggtctcacagagtcccatacttaaaagggctttgtgcttagtttaaggccctgctgtcaccatcttagtaattttttaacaagggactccacagttttgttttgtgttgggcccattaacttaagcagctagtcttgccttaacactgcgcagcctctgcttccttttctataaaatcagaattggaagagccctaggatcatttctaatttaggaagtgatgatacaaacccttcaggattgtctggcatttagacagcacaatgccacaatcacagtgaggagatttttctgggatctgtttccaggacagtttctttcttaaattggccaccatactccatgatggaaactgcaagacctaccatgccagggattatcctgctccctctttctcctctcagtgaccaacctctcattatagcaccactgactagccaagtgttgccacaagaatgttgcaaacaaccacctccaaaacttaagaggcttaaaacagcagccattcttactgttctcacattcacagttagctggtgggttctgttgatcttggtcaggcctggctgagcatttctttgaccatagccatctctctctcccatgtttcagatggcctcagctggcacacctcagctctgtgcctgtggtctctgtcccttcagcaggctagtcagggctaatagaggcaaaggtcaagagaaggagcagaagcaagcacagcttttgaggcgtaggcctgggactgcatagcatcacatctgctgcattctactaaccaaagcaagtctcaaagccaacccaggtttggaggtacaggaagtagacctcaatgagacctcttgagtagacttcttgatgggaggagctacaaagttacatcccatggtgcttggatagagagaagaaaagaattggagcccctgttgcaataaatctgccgcactcacattaatcaaaagttctactagctgtatatattcatcacaacaaggtatcaccgtgtgaccctaagaaaatcacctggggtctccttccattgccacatctatataaatgagggtatccagattcactctaaagccctttctgctctgacattctcatagtccacaggctcagttcttactccaaccagtttccaatcttcccttcctcttctgaaccagacacctgtctctacatcctatatagggcatttaatcatagactggtcaaagtagtcaatttaacttactttaatcttcatagctttgtcaggtcctgtaattcctgtaattctcagaggaagtttaagttttgcttagccatgcaagaaacctccttgctaaaactgaacgagtagcaaaaggtgtatttcccagatccatgtctatgtctctgtgtttcctttgtctctacagagcagaatcctttctgatttcaatgttctctgcgccacccccatcctcctatcagactgcatcaagcactcacagtccagccaaaccacattggcatggctcactgcaggcctttgagcaggggcagcattcttttaaataaatgagagggacagtgtgttcttgctgaagcctgcaaggtcctgtcagctttacgcttgctgatttacatggcttttaaaagacataaccataaaatttcactccaaaattcactctggccagtcagatctttgcctaggcctggcaattttaatttaccaaagtaacgagataatagtttaatttttccccttgttggatgcccctttaatcttcataattcacgatacagctctttctcccagtaagctctctgatgggagtctatgatctagatcttgttttattttttcttaagaaatcattaaagcgcagaagctattcctacaaggatctgtaatcctaacgtgtagaaccagtaaagcaccacagagctggatagtgggataaacatgctgcatgtggcttcctgggcacgtgcactagctgcttttgccactggttcagggaacaggagctaaatttggtctgtattattgtgttttaagctgaaaactgattcttggctggcagatatgcttttttcttttctttttttttttttttttttttttttttttttttttttgagacggagtctcgttctgtcgccaggctggagtacagtggtgcaatctcggctcattgcatgcaacctccgcctcccgggttcaagtgattctcctgcctcagcctcatgagtagctgggactacaggcatgcgccaccacgcccagctaatttttgtatttttagtaaagatggggtttcaccatgttggccaggatggtcttgatctcttgagctcataatccgcccacctcagcctcccaaagtgctggaattataggcgtgagccaccgtgcctagccagatatgccttttctttgcacattcatttgtgtttcattgtctcaaaaataaacttgtcttttcaaatcaggaaatcttccactaagccaacaaaaaaaagaggggtgataatagaggactcgccagtctgtctcttacttgctgacatgcctgtttcctctgcggtggtttttgtcattctgctgcatgtgtccatgttggcatcaggttggagcaacacagcgggttctttggctctcaaggtggtctttaaaagtcactgatatttggtacttggtcaccttgcctacccttcaattgcttttctctatgaaatctagtgctctgtgcattgtagtgctttctccaataattagaaaagaaaaacagaatctccaaaattcctagatcagggactgttaggtaggtagggagggagaaaaggggcagagacggttacagccagcctcacatttacaaaagtcttcaccttttcacttttcttgctttcaaattaggttatatatataaaaccacgaagatacagaattaaaagcaggcattaatcttatgccccattctggttctaatgtactttaatgtttataaaatgataattatctttaaaataacactctcttgcaacatacttactgtgacaaaagttttcatttatttaatgaaaatatttaaaatattctgtaaatgtcatcactttattctggcctgttttattttttaaataaaccaggagactcgaatactcaaggttgctggaacttctcttaacttctgaagggctctgctttggacaaattagttttgtttcattgtgcattactaacctcttctaaagaaaaccatagagtagaagaaatgtggctcacatgtttggggtagaagaaagaggtggacactcaatcaggtaaaacattgtcaagagcttaggtcctagacaggagctggtatagtcacttatagaaagatcaaggctgagaacacaccatcttgagatgggaccctctgagctccctctggatttccttgcacaggtcactttagctttcagaatgttgtgtcaacaccttggcttggcacacaagaatctttacaacttggccgctgaccactg

SEQ ID NO: 1884013 - DNA, 4001 bp, Homo sapiens
tacaaaattctgtgtataaaattccttacttgagctcaaagatcccattataagacccagattggagttacaccaatgcaaaaaggtaaaataagggaaatggcaatgttctggttatttttctacctaatattaactataaagatgaatcatagaaaattgcttttggtaataaaaaataattaaataacagtaatttcataaggcaaactaatagtttggctgggcttcttcatgacatagtctgagttcagcatagcattgcaagtctacatcacagaccagaataacttaaatctattcttgtaaaggccattgcccaagtgaagaggttagacaaaatagcaaagaaccaattttctgaaggaagctgaagaacgtaagtataataacattatgaaaatgtagttggctatgtcaaatctgccataagaatgtattttctttaaagcaatccttgcacaatccttagactgtcaattatcctcaagtggccaataatccaattctactggttataaacttgtatgcgtgtcaaaccctctttttgaataattttgagctctgagctaaatcctttgctttaaaaaaaattaatttgaggaatgatagacatagctagcctatatatttcaggttcctagctccttccacagcacatggaaaacctcacttcccaatgcacttgcagttaggcaggaccacggggctgagttctgtccggtgaaatgtgagcagggctgaaaaactgaaaaggcccatatagccccctttcttactgtaacaatcaaggaagccttgaattgagattttgagtttacagagaaacaaaatcaaaagaccttaaattgccaagccaccttgtggaagacaactgaagaatcattcaaatcccctgggtctgcatgaggaagaaattaacttttattgtgtaaaggcattgagagattggagttgtttgttacctcataataacctaatctatcctgactacaactaacttcaaaaacatacagggcccaaacaactggtaattcctcaaatactctgcttattactaggctattaaagaaatgcatataaaaagaatattgaatggaactacagtaaaatgacatcagaaattagaatataatctttttaattttttaattcttcaaattttctctactttggagagttgtttaaaaaattaaaaacagaaaatttaaacatccctccccacagcatatgccccctttccagaaaagtcttggatgtgtaggtatttggttttgtttgtttgttttcgtcttaaggaagagttagttagggttggagactgaaaatttgcaactgggacctgagatttgagatctaaaatcttcaatcctgttttataaaaatgtgtctagagaggattggattaaagcctttggagaaccaagccctggagatattttgtttggccctgatccctctatctatatgtaattcaatatggcaaagcaaagtcataaatatgagtaaggaattctaaccaagtttagatgttttttcttataactacactgttgttccttatttctctttcttattttttaaaacatcaaagattaaactgttttcaaaagagatttttttgtccattattttgctatagccctaagcactgtgcctatataacttagaacaaactaccatcaagtgatcaaataaggtttgtgtagtcactaaatttcagtatgaaattgagaagagtcatatacatataaaagaggatagtttacctcacagaataatcaaattaggctcttcttagttatttagaacaagatagataaaatatccaaaatagtttcaaaaatcaacaaacaaagtaatgtaagtttcacctgtagagaatcagtttctagccttgcttctggagttttaagccaaatagagctactcacgtgcaatcctgccaataaaaatggactaaatcccactagcaaacactgtcttcagtgttctccctttccttcatccttgcttcttgctctcacctactctacccaaattctgaactttggatgtttgcacttttgaacttaaacaaaaagaatttgttctctggtttttacgccctggcatgcctcaggattctcagtgtaaatggcctgcagcccatcctgctctgctactgttctgcagaaaaactattatagctactatttagtgagcaattgctatatgctaggcatgtgctgaacacttaatatattatcacctcaaaataatatccaccatagcctgattgatgagtatttaccatattatcatgattggggcagcgaagaaacttgagaaaattaaatggcaagagaccaggatttgatcacagatctcaattctatacttttaactactacttatatcatttctgccaccatattttcattaaaaatatatatttaccaagcacctactatgttctaggttctgtgctaaataatgattatagagatgtgaacatatagacagggtctctagtttcatggcaattgcattttaatggagattatgtcataatatgtaaataaataaataatcccattttcaaaattggcttttaaaaataggttaaagtgatgtggaaggactggaggggtatgtggccacattagatgggtagggaggaaaggaacattgagaaggaaccagtcatttgaaattttgggctctgaacattccagagagaattacaagtttacagatgcaaggtcaaaaatgagcaagctatcttcaagaaatgaaaagtcatctagtatcaccaaacttagtgataagagagtagatagagttagagttggtcctacagggccttgccagctatgctgagagaatttaattctaggtgcaatgggagccacattttaaggagggaagtggcataactgtaacataattttttaagtataggtaatgcatcctttttaataatggagagaggcgcaagaaagatattaaagtataaggtaaaaagaccaaagcataaaagcctaaaaacaaacagatttttgtacctttagcaatccgttctatcctaggaaataatggagtaagtgggagacgaaggatcagattttaatttactaatatttaatgatattaagatctctggctgtcatctcttcaagcttggatatcctcttaaggtcaaatacttgctctcatattggcactctaacattatggtttcagaattccaggtactccctgcaataaattccaaggtctacagtttctactcacaaagcatgttataggtggaaaatgaatacattactaccataaaataatttattaggcattgcatattgagaaagcaaaacagacagaatccttataatcaaagacttatcttcttttatggaatgaaaaaagttggtgcccacatgtacaaaatccacctggacagagtttatagagatgtcattttactattcaatgttttcttttgtaataaaactcagaaggcatagtactgtaaaaatatgtattttttaaactctgagactttgttaataagaaaatgaaatgaatcttctgcacaatccatgggaatttggttacagaatttacaagtcacctttgtaacaactacaaataaatttccaaattcctttcagacatacaccatcctattgcagcttccaaggctgagaaaaaaaaaaaaactatcaaagttaaaaagataagactacatccaaaccttaacattttttttctttaatccatggcataaaatctcatattaactagcttatgaggaatatcatgagaaataactatcaagcttaaaatccggagtctggagccagaaattcaaatgtagagggaaaacacaggaactaaggtgacttccagaataaatatgagtgtcctagaagtaacaaagaaaaatattcagtgtattttaacaactaaactgcagggtaacttcatgcccctgggaaaaagaaaatctttattttttc

SEQ ID NO: 1884014 - DNA, 4001 bp, Homo sapiens
ggagcctttgtttgccatcacagatgccactcaggagatgcagcgcagggactggagcttcagcagatgatgcagtcctagagcctttgccacacctcaggttgtttttattgttccctatttctctgcaatgaccaacagcaaagcagttaacaaggaagtcctgtggcttaccaaggaaggaagtcatggggccaccataacccgtcttgcagcccagcttggtggggtgttggggagggatgtcacagatgtccataccccacctaggagccagggcaggttcggctggggcactaggtagacttcggaactgtggcaggatatccacgtcagatctagattcaagctgtaataataatttatttgtatcattgtaattatttgtttaacgtctcccaattggctctatgtgagaaagtgagtgaagctatgtctgtcttgttcagttcacatccccagctgctggcttagagcctggtgtatagtaggtactcaataaatatttattacatcaacgagcaaagagaataagtataagccagggtttctcaaccacagcactattggcacctggggctggataattctgtttttagaggcctggactgtgcactgtaagttgtttcagcagagtccttggcctctgcacgttagatgccagcaggactccctcctcgaaataagaaccaaaaatgtcccctggggggcaaaattgccccccagctgggaatgactaatataaaccaatattcttggctagtgccactaattgaaagagagaagccaaatttaatctgcatatgcagtgggcaagggggaatctgagccctaaaaaccaggaggggctgagaggaagaaggtgtgaaagtcggggccacccactgagctctcagatgactaccaagtgcaccctccagtttgtctcttgggttgtaaggcatgagggcgattgtgctgactttaacatacagaatagggtaggtgggaatgaagggggtgatggcagcgtccaggagagagaggtggacccaagaccagacaccaaggcaggacaaaaacagcccaggagtgggtctgagaacagattgggcagcagaaatccccacgcagttcccgaacaaggaatcttttgacaggtggccttgcaacaccgaccctctcttgtctccactttgaagcctgccctgtgcaatgtggcctcacacccaggaggccctcagatcaaggtggtcttggcagatcctctaggagggattagaccgtgacattacagctacatgacggcctcgttcttattacacacacactcgccctgtctaagcttgcgaactctgatttgtttatttctgaaaaactgtctccacgaagacaccaagctgggctgcgagagatagcactgactcagccatttccccatcctcagcataaaaggatctaaaaagaataatttaagcttctctggaatgagatcatttaatgaatcttcttgatgctaagaggttttatatgcctttttaaaaacccttccccaagcacggagctatgatattaccttggagagcagagagatgaagtgatacacgtatgcacagcacacaggaggaaggaggtggtttccttggcaacaacatccatgttctggcttccctcggctaaattggaatatattgaaatatctgctttgggcgcctcttttgcgaagggaaatgagtggttttctattcaggcactctcagaaccgcgagccagcagctggggagcgatgttctgtgagttcgatgcatctgaatggggcaaggccgttagcaagctggcagaagtccccagcattcctttgcaaaaccaaaccatcgtttcctcagccaagggaaaatgaaagcagcgaacacatgaggttcgactggccggacagataggctaggactctgtctcacgcagtctttctatggctactgctctgtagctttccaaacatacccagctcgatagatcagactccaaaagcctactcacgatgcgcttaaaatggggagtggctgtaagaaaaatatagacctatcgaaaaaaggtcctcaaatctgatctgctcaaaatccttgacaatagggaggcagctatgcccctaaaacacagtgcctggcaccgaggagtatgttaacatcatgtttgtggaattggacttggactcaggcagacctcggttttggccctggcttcactattaacattccacatgacattgcacatgttccataaaccctctggcctcagtttcctcctctctaaagcagagacaagcatcccttcctatagaattgtgaagattaaatggggtgacctgtaaaatgcctagcatgaaggcggcattccattatggttacttttccccaccaagaaacaagaagcattctgtttctttcagataggtgaaatttacagaaaagaacagtgtcttagggagagcaggaacaacctcacccaaggagccaaactcctttccatttttattttcagggtgcttttggagagctgagacagcctaggttgggaagtgtctggatcaggatgtcagaagggccaactcagtcataaccacagaaccagccacaagcctcaggggaaatgggacaaggagacagcgagggtctgaggtcttggcaggccagtggcaggtagcaccacagagaccaatgggagcatcagccatcagctggggccaaggaggggatgctgaaagggcagggaggtgaggtctgctggggaggaggaccagccccacacatcagggacacagtctttataaccggctctctatttaaagaccctcacataagattgtacactatgttttgttgcaatagctcatacctgtcactcctaagaaggtctttcataagactcagttaaaatagttgcttcaatgtaaacacatcaggaccaaggatttcccattagaagcacagactttaattcctagactgtcattctttctaagaagtcttatgaacacaaaaaggcatttcagttctatgtctaatatttatttgtgtgcctttgggggaaaaaaaatattttctaagccttgtacttgtgctgtacacaataaccgccctttcctaaagtcacaggacagcagtgagagtaaaattaaaaggcgggcagcatagtgagtgggaacacaccatctgtgtctttatatcatatgattttatgtattctgaccatctgtgaaagagaggtttgctacttggctgaagaatgtacaagctcaggccctttccccctgggaaggtaaaaaaaaaaaaaaaaaaaaaaaaagaagaataaaaattacaataataattcaaaagatcctctagaaaaataaacttctactgctcactaataaatttctgaaaaaagaacatcactaaagggatatttgttctgcaaattttaaaatgcattctaaatctgcaataattaaaacagtgtggtactagcaaaaaaaaattagcagacggaacaatgaggcagattcaatacataatatatttaaactttaatatacttttaagatagaatttcatgtcattatgggaaaatatggactattcagtgaattatggcttgaggataactgaccaacctactagggagcaaatttaaattctatccctacctcacaccacatgatttttttttttgagacagtctcgctctgtcgtccaagctggagtgcagtggcgcgatctcggctcactgcacactccaggttcacaccattctcctgcctcagcctctcaagtagctgggactacaggtgcccaccaccatgcccagctaatttttttttgtatttttacatgttagccaggatgatcttgatcttctgaccttgtgatccacccgccttggcctcccaaagtgctgggattacaggcgtgagccaccgggcctggtcctttggtttttttttttttttttttggtttttttttgagacagagtcttgctctg

SEQ ID NO: 1884015 - DNA, 4001 bp, Homo sapiens
aaacatatactagacaaatgctatctcaggataacaatatttatacaaaaagtaataaaactgaataagtcataaaaggataaaacaatattaatttgtataagcctaataatttgctctcaaaattataaggctggccgggtgaggtggtacatggctgtaatgccagccacctaggaggctgaggcaggaggatggcttgaggtcaggagtttgaggctgcagttataatcacacctgtgaatagctactgtactccagcctgggaaacatggtgagacactgcctcttaaacaaaaatcaaaaaaccaaaaaaaatagtataaagcaaaatcagactaaattagagggagaaattgacaaactacaataaaagtgggaaatgttaaacctactctttcagaaatcaatggattgaacaggagagaaaaaaaaaaaaaacccaggagataaaagatctaaataacctgattagcaagctagatggagagatatagagaaaaaaaaaccacataaaaagtgaagagacgttcacaaaaattgggacagccaaaaaaagtctgtatatgaggccacaaaggaggcattaacaaattctaaaagaacacatttcctcatctccaagcattaaagttagagatcaatgacaaaatgattgatttatttttatttaaatttttttttgtagaggggctctcactgtgttgcccaggctggtcttaaactcctgatctcaagcgatcttcccaccttggcctcccagagtgctgggattacatgcctgagccactgggcccctccccaaatgattattattattttttaaaaaactgaagtttgaaaacaaaaaaagaatggaaaatatacgtctaaataatccatgaattaagcatacaatcctaacataaaaaacaaaatattggccaggcacagtggctgacgcctgtaatcccgacactttgggaggctgaggccggtggatcacttgaggtcaggagttggagaccagcctggccaaaatggtaaaaccccatctctactaaaaattaaaaaattagccgggtgtggtggcgtgcacctgtaatcccagctactcaggaggttgaggcaggaaaatctcttgaacccgggaagtggaggttgcagtgagctgagatcttgccactgcagtccagcctggacgacagagcgagactctgtaacaacaacaacaacaaaatccaaatatgtataactaagtgataacaaaagcatagcatattaaaacttgtgatattcagctaaagcagacttttgagggaaatgatagtcatatatacttattagaaaacaacaaaagaggccgggtgcggtaactcacacccgtaatcccaacactggccctaaaattaaaatttttaaaaaggaagcttatataccatactactcagagctatatagcacgtcaccattttttacagtgcactcaccttcccttaccttgtatgatgtttctatgagccctgggaaacaatgaagcaggggtgattttatggatttttataggtcacgttgaagattttataggtgagaaagccgaggctcggaggatgcatgacttgcaagtgtcagaatcagaactagaatagatcccacacatttgaacaccgagtttggtgtcttttccttcacaccgcgttctctgggggtgcctgggcggtgacccctgccattggccttgaggattagggcctcagctcgggtcctctgcagagcctcctcagtccctagcaacttgctggcacctagccggggctaaacgcaggtttgttgaaaattataaaagggtaagcccaggggtagctattcaccattctgggtttgaagagctctgatgcagaaaggtgtatacatccagcaggaattccaccctacatgatttattataaacgtggtattctaggagcattcgctcagccacggagaaaaatgggcctttcgaagaagctggccttcgcggtcgctgtggggcggcagagcaggcgcaggcgtccaggcagtgggggctgggtaggcgccaggagaccttcccggaccaatccccgggcccagagagagcgcctggagaccttacctccccaggaaattcacacagatttcttgggggcttcacacccgcgcccccagtcccgccatctcctacgccgcagcaggcgcccccaccagggtaataacccactctgagagtctctggtggtgcctctgatcctctgctcttctgttccaggcagcgttttctccgagcggctctggagactttggcctgagtttcaccctcactcgccgactcatgtccaaaaaatgcagtccagccccgaaagagagccgcgcctgctggtgggggtagggggtgttggagcggccacggaatatgactgagcgcccggggcccgttgtgaggccggggccaggctgtcccaaggcaccgttcctgcccggcaccagcacacctgcccagacagggagaaggtcggagcctcccctccagtccttccggattttattgttcagagcgactttaaaacgcaaatcgggccgggcgcggtggctcacgcctgtaatcccagcactttgggaggccgaggcgggcggatcatttgagcctaggagttcgagaacagcttggccaacatagtgaaaccccgtctctactaaaaatgaaaattagccgggcgtggtggtgggcatctgtagatccagcaactcaggaggccgaggcaggagaatcgcttgaacccgggaggcggaagttgcagtgagccgagatcgcgccactgcactccagcctgggcgacagatcgagactccgtctcagaaaaaaaaaaaaaaaaaggaaaatcgaaccagcagcttgtttgtaacagccaaacataggcaacaacctaaatgtccttcagtaaggagctaggtaatgaagaatggtgaagcgcacgatggcgcgcagtgtgcagtggatgggaagaaccaggtctgttcaggagcacttgtatggaaagaccctccaagatatagtgagtaaaaaaacatgttgcagaaaagtactgcaatatcgttttgtaaacaatacgtttatgtaaacacacacacacagtgttaaagagagatatttggaaggacacacctaagagtgggctgggggagtggagggaagagtgaatctcaatttttactcattttttgaattttttatttttagttttttagagactgggtctcactatgttgcccaggctagtctggaagccctgtcttcaagccatcctcctgtcttggccttccaaagtgctgagattacaggcgtcagccaccactcattaaaaaaaaaaattgtatacctaccatatatgcatatattacctgggtgaccttttaaaaatatgctttatttttagaacatctttagatttacagaaaaagtgtgaatacagggaattctcataaacccgggcttttcctattattaacatcttaagtcatttttatatctccgtgggttcctcttggctgtgacagtgtcctagactttccttgtttttgatgaccttgctagttttcaggagtactggtcatgtatatggcaagggcctcaattgatttgtgatgttttcctcatgattacagtggggttaggtgttcttgggaggaagaccacaagcggtgcatgcaatcagtatgatttacccctgtcgaggtcaccttgacggctgggtggtttgtcaggtttctccacgatagtcactgaccgctcccttcctcacatactgtgcgtgaccttcccccctccaccaccaccgagtgttgctataaaggaaatgcgtttgaccttttcagtgtaaaaagttttctcgaccttaaagagagtcactaaccgacgcacacggggctggagaggacttaggaaatgcccacccctgcaggagggcgaatgcggctctgcgcggcactgggcgccgcaggggtta

SEQ ID NO: 1884016 - DNA, 4001 bp, Homo sapiens
ctgtcattatgatgttagctggttattttgctcgttagttgatgcagtttcttcctagtctcgatggtctttacattttggcatgattttgcagcggctggtactggttgttcctttccatgtttagcgcttccttcaggagctcttttagggcaggcctggtggtcacaaaatctctcagcatttgcttgtctgtaaagtattttatttctccttcacttattttatttctccttcacttatgaagcttagtttggctggatatgaaattctgggttgaaaattcttttctttaagaatgttgaatattggcccccactctcttctggcttgtagggtttctgccgagagatccgctgttagtctgatgggcttccctttgagggtaacccgacctttctctctggctgcccttaacattttttccttcatttcaactttggtgaaactgacaattacgtgtcttggagttgctcttctcgaggagtatctttgtggcgttctctgtatttcctgaatctgaatgttggcctgccttgctagattggggaagttctcctggataatatcctgcagagtgttttccagcttggttccattctccccatcactttcaggtacaccaatcatacgtagatttggtcttttcacatagtcccatatttcttggaggctttgctcatttctttttattcttttttctctaaacttcccttctctcttcatttcattcatttcatcttccattgctgatagcctttcttccagttgatcgcatcggctcctgaggcttctgcattcttcacatagttctcgagccttggttttcagctccatcagctcctttaagcacttctctgtattggttattctagttatacattcttctaaatttttttcaaagttttcaacttctttgcctttggtttgaatgtcctcccgtagctcagagtaatttgattgtctgaagccttcttctctcagctcgtcaaagtcattctccatccagctttgttccgttgctggtgaggaactgcgttactttggaggaggagaggcgctctgcgttttagaatttccagtttttctgttctgttttttccccatctttgtggttttatctacttttggtctttgatgatggtgatgtacagacgggtttttggtgtggatgtcctttctgtttgttagttttccttctaacagacaggaccctcagctgcaggtctgttggaataccctgccttgtgagatgtcagtgtgcccctgctggggggtgcctcccagttaggctgctcgggggtcaggggtcagggacccacttgaggaggcagtctgcccgttctcagatctccagctgcatgctgggagaaccactgctctcttcaaagctgtcagacagggacatttaagtctgcagaggttactgctgtctttttgtttgtctgtgccctgcccccagaggtggagcctacagaggcaggcaggcctccttgagctgtggtgggctccacccagttcgagcttccccgctgctttgtttacctaagaaagcctgggcaatggcgggagcccctcccccagcctcgctgccgccttgcagtttgatctcagactgctgtgctagaaatcagcgagactctgtgggcgtaggaccctccgagccatgtgtgggatataatctcgtggtgcgccgttttttaagctggtccgaaaagcgcaatattcgggtgggagtgacccgattttccaggtgcgtctgtcacccctttctttgactcggaaagggaactccctgaccccttgcgcttccctagtgaggcaatgcctcgccctgcttcggctcgcgcatggtgcacgcacccactgacctgcgcccactgtctggcactccctagtgagatgaacccggtacctcagatggaaatgcagaaatcacccgtcttctgcgtcgctcacgctgggagctgtagaccggagctgttcctattcggccatcttggctcctccccctagttgcattattttttaactgttgagtcttcaggttctttatatactctagacactagcactttgtcagacatattgtttccaaatattttcttccattctgaagcttgtcttttcatcctcataacagagtccttttgcagatcaaaagtttttaatttgatgaagagcaatttatcaggttttccttttatggacttatccttttggtatcaattctgagaacactcttcctggccctctattctgtagattttctcccaagttttttactgaaagttgtatagttttacattttatatctatatccatgatctattttgagttaatttttgtataagatgtaggacataggtcaaggtttatttttgtttgttgtttatttatttttgcctgtggatttccatttgttggaaagattatccttccattgaatcgcttctgccccattgtcaaaaacagttgggcatgttggtatgggtttgtttctgggttctctgtgctgttccaccgacctgtgtgactatccttctgccaaattacacagtcttggttacgtagctctgtgtcttaaaatcgaatacacagatttctccttctttatttttcctttccaaaaactttaaagtaatcttgcttttttgcctttcttatgaatttgaaaataatctatagctacaaacattttgctaggattttaatagtcattcctttctacctgtatatcaatttggggagaattaatatttaacagtgttgaatagtctagttcatgaacatgatgtgtctttctgtgtattcggatcttctttgatttctttcatcagcattgcatagttttcagtatacaaatcctgtatatgctattttatatttgcatctgagtagttaattttatttgagcaattataagcggtattgtattctaatttcagtttccatgtgttgctagtatacagaaacaatttgctttttatatgtttatcctgcagcctgcattgatggtgacttaattctgggagcttatttgtaagatgctttgggattttctatgcagacaaccatgtcatctgcaaagtgatgcagttcgatttcttcctttctaacctgtatgcattttatttccttttcttgccttaattgcactagctagaaattctagcactatgttgaataagattggtgagagcagacagcttgctttgctcctgatctcaggaggaaagaattcagtttttcaccattaagtatgttagctataagtttttgtagattgtgtatcaagttaaagaagttctcctctattcttatatttctgagtttttcctatgaacgggtgtggaattttgtcaagtaccttttctatatctattgatatgatcatgggattttaaattctttagtatgttagtatgatcggttataatgattaattttcccatatgaaaattagccatgtatccctgggaataaaccctgtttgatcatggtatataatcctttttgtaggttgttaatttctatttgataatattctgttaagggtttttgcatctatattcatgagaggtattggtctgtagttttattttcttgtcatatctggtttgggtataaggttaatactaacttcataaaatgaattgagaagtgtttcctctgcttccattttctagacaatattgcatagaatgggtatttgttcttctttaaacatttgatggaattcactaataaaatcatctgggtctggaatttcttttttaggagtttggaaattataaattcaatttacttaatagttgttgggttagtaactttgttttcattttttatttttttgagagggaatctcgctctgtcacccatgctggagtgtagtggcatgatctcagctcactgcaacctccgcctcccaagttcaaacgattcttatgcctcaacctccctagtagttgggattacaggcaagcgccaccgcactgggc

SEQ ID NO: 1884017 - DNA, 4001 bp, Homo sapiens
ctgcccaaagcaatctacaaattcagtgcagttcctatcaaactgccaaagttatttttacacagaattagaaaatcaattctaaaatttgtatttaactaaaaaagagcctgaatagccaaagcaatcttaagctaaaagaacaaaggcaggggcaacacattacctgacttcaaactatactacgaggctacaataaccaaaatagcatggtttgggtacaaaaatagacacatagaccaatggaacaaaatagagaatccagaaatgaagtcccatacctacaaccaactgatctttaacaaaattgataaaaatacaatggggcaaggataccctattcaattaatggtgctgggaaaactggctaaccatattcggaagaatgaaattagactcctgtctctcaccatataaaaaaattaactcaagattgattaaagacttaaatgtaaaactttaaactataagaagcctagaattagacctaagaagctcttttggatattggcctatgcaaagaatttatgactaagtactaaaacacaaaagcaacaaaaacaaaagttgacaagtgagaccaaattaaactaaagagcttctgcacacttgcatgttatattgcaaatatgaaatagcaaagacatggaatcaacattggtttccaacaatggtggattggataaagaaactatgatgcatatacaccatggaatactatgtagccagaagaaagaatgaaatcctttcctttgcagtaacatagatgtgcctggatgccatcatcctaaatgaattaagatgtaaacagaaaaccaaataccgcatgtcctcacttataggtgagagctaaactttgggtacacaggagcaaaaggatggaaataacagacactggggcctccaaaacaggggaaggaaggagggcaaggtttgaaaagctacttattgggtactatgtttactattcagataataagttcaatagaagcccaaacctcagcatcatgcaatatgttcatgtaacaaatgtacacatgcatgcttaatctaaaataaaaattaaataatcaaataaaatgatttccatgaataaaatggtagatatgattatgtggaaaatgctttactatttattatgtggtgaataatttaataatatttaataaatacatgaatgaaaaatagctacaactgtgtgttaggatttcaataattttttatttcattcctaataacttttatgtattattatatacataataatatatatagttaataataacaaaaacaacatggtattgaaataatttccacccagacggaggatcaacatatttaagtgattacactactcaagataaaaatcatttatcaaacagatcaaagtcatttacctgctttcctttttataggtcctaggaacacacgtgccacagacaataaaacatcacttcccccatcccactactttggactttatttaacatctttgggtagaacagaaactgttgataaggtgagttttgttttatagacaagagaggaaaatggatactttgtgtggtctgggccttagaaacagactaagatctttttttttctattttgctttttttactaggataaaatattaattggcaaaacatcgaatacaagcttcactatcataaaatcaaaacatttaagcaatattccaaaaaagatttgacaaaaactagacaccaagagtacaaaaattacacatcaacacaaagcataaaaaatgtgaactttcaaattaaacagtcaaaaacatgtacctgcatgatcacctccacaccttgactgccttcgtctgcagcacgctgctggtaaaggctgggtggctgcaccgtcgtcccctaacctaacattgctttcatctgtgaaaattcgcttgatagccaattaagccatggaggctattacatttacacggaggctacgcacaatctcaggggaggctcaaacagcagttcgttcctcacacgcactgttgggtgcaaagggcacctggagagtgagggagacctgggcgctttcctgcggggccttggccacgcggccgtcgcccgcaccctgtcccttgcctggcaggggacacaatatttgtacagattatggtataatttgaacgatttcctaatctacttatcttaatttatatagtttatttaaatgtcaaggcagagaaatacattgctcatgttaaggtcacgtgatgtggtggcgcagtaatgacttcctgaggaaacagagaaattggatgttttgtgatttagctatgtgcactaaacttattttccatgttttgagagcacattaaacattcacgtacaatgtgggaataggctggctcgtaaccaaaacgtccaacccagtgccaccctttgaatcgctgcgaacaccatcctattgcggttcagagaaaacaagcaaggctgcgaagcccgggggttcaggcagctgcagcgcttgggccaaggtagctccgctctctggtctgaagccacgtggccccaccccggggcggcctggcttttttatattgcttattgctgtgtttggcatgccattcaacccatcgggatgttggatagtgacttgagagcaatacctagatttgccctgtcgggatgttgcatactgagctcggaataagccctgctcaattgaggcactatcactaggaggaggcactgattcccgcctttcaatgctgtctattggtgaaagaggagttggatggcatctgggaaattagtatcacttctactttttcttcttttcttttaaaggttaaaaataccttgtattagttaatactgctataaaatatgaatatccaaatctctgtggctcagtaaaatagatttttttttcactcagagaaagttcaggtccacccttagtaacccaggctgacagagactcttccattttctatacatagcttccccaattgcccagagaagagtggaaagattttataggtgactgtacacaagaataagaacttagtacctagtcactaatttactcgttgaataaacatttatggagcttaacatattaatcactaggcagacgctgggacacaagaaaaatctttaagatatgtcactgcttattaccaataatgttctagtgagtaacgagagttaataatacgactaattatagtattgtaaatataattacagttccaataagacatacacacacagagaacaattttatctggtggttgaggaaatctttattgatttaagatatcttttgatgaacaggatttttcaataactatcagaaaaagaatgtctatgacttatttttaaaaatgattttcttatctgccttgcatatctgacactttcatctcctatcttccttgaatacaatatagaacctgacatttctttcctttcaaagatccttagagcatttcctacatttaatctgaatgtctttctcagtaatttttcctatacaagcaattatggctacattttcttaatataatcatgaaaaggtgagcaaaactgaaaatttaatttggagaatagatacgaaacatattcaattaattcaagttgttgttaggctgcatatgttcagctttcagtgaagatgaacaaatgatgataaatgagaaactgaaagaaaacaaaccaataggtgttttttaagaaacaatattattaaagtgcatgtgttttctactgaatgaaagcaacatagaccttttcctcacattggtagttagtaagatatataaaaacaactttgtaaagaacaattaatacaggttaatgaatcattgtgaaaaggggataacacactttattctaggaatgatctgcaaggtgttaaaagttaaaaaagatgaagaacaattgagtagttatttgatcatagtgtttattaaattgcttttcctgtatctggaaagctttacagaaatgtcttcaacagaataa

SEQ ID NO: 1884018 - DNA, 4001 bp, Homo sapiens
ttacatggtagcctacttagatgccatgaaagatgtgctcatgggacattaaagagattgagtagactgtgaggccaaagtgaaattccaacctgatggaagtgaacagggaatacttcaaaaagagaagaatgactgaaaatgaggaaagtgaaaaatgctaaaactggttaaacagaagggtcaggaacagtcaatatgttatagtcagtatggaagaatacaatatacattatgtatatgagcttttcatgagaagacatgggggaagagttaaacaatagaataacaaccataatattttattaataactattatgagctgctaaaatggcatatatttggtaggatattagtatataaaaaaggcttgaggtatttaaaaatctgttcccagaaaattatccccaaaagtcaaaatatatatttcatagttcttttaaatccctgactttccagccacatattcataccacaatgctgcacactaagctgtagatggttgagtgatatggttttgaaaagataataaaagaaaattgaaaagacactcttaggtaaaacaaaaagaaaatatttctctcagacaatttaaaacttaggtagtataagataattagggtttttaaagaagtcactttacagaagaaaggaaataaaaattttgctgaccatggcatatttaagaaaaaaaatccaagcaaagaggggaagagttatgatgagcagtgagcagtgaggtataagcccaacacttttcagcccactgaagtgtcctgcctacagaactcaaggcaatttcagacttcctatcgactgacataggtttgggggtgcgggaaatgactcaaatgctgcccaaaatatatttttaaaaactttttccctgataagctttttaagccagataatgaaaccaagttgttcgtgtttcatatttgagaatctaagtactggataaataataagggctatcaattattgggggctttaataattcttcaaacatttaatgagtgtcttctgggtgccaggcgctgggactatagctgtaaactaaacaggtggctacctccacagagtttatagtctaaggattaaaaaattagaccttgcacaatagtgggaggagacggggaagtaaggccaccgttggaaggtggagaattggagaaaagtctctattcacctctcctgaagtagtcaagtgaaggaaaagtcacaggttacatatagagaactgggaacatccagttgcaagagtgagaccacaacaggagctggcgaagaagtgcatggaaggctgttgcctctgcattgactgtgggtttggggctgctgttggtcagcaaggcaggcagaaaaggacaccagctggagtcaagacagaggcaggcgaggacaagctagagcccacaagcagtacatctacacttctctccttccgcaccagctacacagagtaacggttactctttcacttctgcttcccaaatctggcatagatatatcttttggccaaacctgatatggagacataatggaaatgaagttctagcttaggccagttgatacaaaaccagcacggtccatcccttgtcaaattggcggccgagagcacctccttttaccatatttaatttccagtagcaaaatcttgcttcaacctaaggtgcaactaaccctgctacaactagaaacaccctaaacctctctccaatgaggatatgaagtcccgtaggacttaccgcataggtcactttatctttggggaaagttcatccttttctagctgagtcacactgcccttttaatatcctgagatacatgctgaactacaatactattgacacgttttatgttcaatagtagaatggatggaggaagagaaagaaaatgaaccagtattatatttgcaaaatgaaaatcaatccttctgaaatatttaaacggtttctgcctttgtaggagaccgtttggtaacgtatcgaaatccataacggccgtgattggcgcgcaagcgcggggctgcccaggggccctccttgcctcccgccttatgggcccggaaggtccttctttcccctagcttggactccagctcctgcccgcggagcttggtctagctgcgggaagcattgaagcacaaggagagtacttttgcacaatgacctccaaattttactttgaggactttatcatagtgaaactaccatggctgtagcttatatcggtttttttttaaatgaaaataacctaattatgcaacagcgggagggttgcttgagtaaattattgttaactccaaatgacagaataatgtatgaaacaattaaaaataatttgttaaaacaatgaatgacttagaaagatttttattattaagtgagaataaaagcagaaacctaaaagatatattcagtatgagctcatttctgtaaaatgatgtattttacagaggagaataaagtttaaagcatgcaaaccaacgtggtaactgtattaaacctacttaataacaagaagctattcatagtaaataagttgaatttatagaaagaaatttactatgaggacaaaaaaggataaacaggaaaatatttgcaaaacagataatctaacgtataaccagttccttcaattaaataagaaaataagaatccaatagcaaaaatgaggacatgtttagaaaaagaaataaaacattttaaacatgtgaagtgttttatttcatttctgctaagaaaaagcaaattaaaacaaaaatctaatattattttaaccatcagaaagcttgacacattgagttgacaagagtaaaggaaaacaggcatcccgatatattgccagtgggagtagaaattgctgacacctctatgaaaaaaatacgcaagccaaaattttcaataatgtgcccctaaacccaacaattttactttaaagtgtagacattcattgcagcattttttataatctgaaaaaaacagaaacaaatgtacagataagaactggttaaataaattatggcaaagccatacaatgaaatactctgtgatgattaaaaatagtaaggcacttcttcatgcaattatatggaaagatccccaatatatatcaagtaaaggattttaggtatataatggtataattaaaccctaccatttttgtaaaaataaaatatgtgtgtatacacacatatcaggtatgcacacccacattcctatatgggcataaaacatctctagaatggaacaacaacaaaaaattgataaattgctccctctataattttgaggaagctcccaacagctaattaatttttgttctttgccctaaacctgccccttttttcatttttttcatttccaaaaaggtactaccattgattgtctcagaaaagtagaaatgagatttgttccttctcttgtcctcacccaacccccattaaatcagttatcaaatcctgctaactttatttccaaaacaagtctcaactttatctacttgtattacagatgttggctatttatcaacgttttctgttcctttcaaccttagtcatagacgtcctgattttcaactagacctgtagtaacctagagtaaacattttattgtctatcttccattgtaatcacatggggccatgctactgagtgctttccaatgagctgtaactgcaagcatcacgtataatttctagaaattctcttacaggaaagggatgtatcttttttcctcccttcatcattcacgttgtctgggatgaaaacaacatgactggaattaaagcagccaccgtcaatgaggaggttgaagtcacgtattgacaaaatggaaggaatctggtccctaagaatggtggagccaccaattgaattctaggctatgtacagatttcagttatgcgagagaggaataaatatctgtccaagccactgtaatttggagtttcagttacagctactccaaatcccaaatgataaaatgtctctgtatttc

SEQ ID NO: 1884019 - DNA, 4001 bp, Homo sapiens
cggctcactgcaagctctgcctcctgggttcatgccattctcctgcctcagcctccccagtagctggggagtagctccccaggtgcccaccaccacgcccggctaatttttctgtattttttagtggagacggggtttcaccgtattagccaggatggtctcaatctcctgacctcatgatccgcccacctcggcctcccaaagtactgggattacaggcgtgagccaccgcgcccggccacgatatctgtcaccttctgataatctaggcaaatatagctctgttttcatatctatcaataaagcaaatgtggcaaaaagcaattgttggagctaggtagatggcatagtttattgtactattctttcaacattttggtatgtttaaaaatgtcaaaataaaaggttggagaaaaaacaaaaggtcctagaaacagtctagtgaaatccaacactcacattttacagaaagagaaccataagctcagaaaacaagacagttgctcgaggttatacagctggaaaagcctgggccaggtctcttggccgccaggttctccctgtgtgtgggcttcagactctcaggcagcagtgagctgcagaggagcacaccccaccacccctcaaagagaccaaggggtattatgggtatgtaaaaaggcacttgtgttggtgtttccttttttttatgtctattttatttatttatttatttatttattttttgagacagagtttcgctcttgtcgcccaggctggagtgcaatggtgtgatctcagttcactgtaacctttgcctcccgggttcaagcaattctcctgcttcagcctcctgagtacctgggactacaggcgggtgccaccatgcctggctaatttttttttgtatttttggtggagatggggtttcagcatgttggccaggctggtcttgaacttctgccctcaggtgatccacccgtctcggcctcccaaagtgctgggattacaggtatgagccactgcttccggccttatttttatttttttaagagacaggctcttgctctattgcccaggctggagtacagtggcacaatcatggctagctgcagccttgaactcttggattcaagtgattctcctgccttagccttctgagtagctgggaccacaggcacacatcacaacgcccggctaatgttttcattttttgtgcagacagggtcttgcccaggctggtcttgaactcctgggctcaagcaatcctcccacctcagcctcccaaagtgttgggattacaggtgtgagccactgcacctggtctcctttttattaaacaaatagatcatttagttggaatttatgatgtcaaaagtgcgaaggtggcaccagagccagacctgccatccttggagagtgagcataccggtttggcaccatctgcttgtggtttttgagtggtggtggtagtggtggtgcgtgtatgtaaactcgggttgcagaggagagagggaagagtaaagggtggggaccaggtccaggaagagcagcaaggagagactggcttcaattctggagctgcctgaaagaagggaccccaggctatggctgagaacgaaatgtgggcacgtatttaaagaaaggaaatgattctctgcggtcggcaggatctttgtctagctagtggggttccaggaagtgcaaaggagaggggaaaagaggggccgtccgtgcaagcctgactgtgtgtatatggggggggggcacacagagaggaaaagggagagaaagaaaagaaattattctaaagaggaagctgggggcggggcgagggaggggtagagccggggcactgggggtggctggaaaggtagagaggcctcacctgcgggcctgcgagcggctcgggagcggtcagccttgcaggctgaagcgtcttgccccggaaaaattcctgccccactgtccttcaggctggatgtcccgggggccacggaagcgagcgcagagctccggggctctcacgagggggagggcaggaaggggaggcggggcctcgcgcggggcggtagccgagcctgtggcccgggcggggctcctctccggcggcgccggagtctgggggccgcggcttccccctcccggccagcggcggctcctggcccctcctcccccggccgcccccatccccgccgccgccgccgccaaagctaaacccggccgttgcctgcaggagccgcggcagcgggcgatcgggccgtgaggagcctcgggcgcggcctcgcctcccgggcccggcgcctgcctcagcacagcggacagcgccgcgccccttgcctggacccagccgcccgcccgcccccggcccacctgagcccgggcccgcggcgcccgcatcagcactgcggacagcgccccgggccccagctcgccgccaccgccgccgcccacctgctcccggggtcagcaccgcggagacccccctcgcccggccccgcgacagcctccgagcgcccccggatcatggccaccgaggtaggggcgagcgccccacccgcaggcagtgcccgattgccgcgggaccaaatgccctaggggtgggctgggcaggagtgggaggcgggagttgggggtgggatggggtgattccccaggtcaggtctggagggaggaggtaggggcttagtgagggctcatctcccccttgcgtgtcaatcttcccctcgccccacctgagcccccaagctgtccgcgacacttgttggcattagcgccagggttgcttcagggccccaggctggggtttccccttccctggacttcacaagtcctgaaaccgctttcctagagggttggagacgcgtgtgtgtgcgtgtgtgaggggagggaaggcggctgtccgctgttgctatgcagtcagcttctgaacccaaaagcttggctaagggatgacagacttacctctacatccgcatttcctttgcgggagggaggggacaaagacatcctcaggctgagaacccaaatggttggtctccacttttgcatatcacccttcttgcttttttaccccattcgagttttttttttttttttgtcccagggtgtccagatttcccctccatctgatgggagtttctgccttcttcaaggtgcactgataggtgtgtcaccttcaagcacttgaaggctgaaccacggggcctgttagctaagggcagaatcttggtataatgcttgaggtcgaggattcccccctctacccctagggattgccctttcccccctcatttcaggagggagattgggctctttatgttcccactttatacatgataaaggtgatgtgtggaaaacgaaaggactaatttgctactccacacagcatgtcagcagcagagcggaaagtttttgcctttgaatttttggagcgaaactcaggacatcagggtctccccagttctgatgttgacttcctttgtggtgtctccccatttccaatccagctggcatacactgggggagagcagaggcctgtgaatgattcaatgcagtgcttctgggcatcctggtgagcagtgtgacattaataccaagtgtggctgttgttattccactcaagtttccaccacagaacaaggtgctgttgcttggcattgcttggcattctgacaaggcacaaggttagctaggcggagagttgcccctcaggacttggtgtgagggcaagccctgggcagaccctgggagcttggtttctagagtagaggaatgcagagtactcacaaagcaccaaagacatggaggacagcaggaagaacaaagggagaaaccaaggagttggttaccttccagatagggctgccagactgcagcagaggctgctgtgttggacagaaaaggggaacttcagctacatgggcatggctgggccagcagcgtgggcagagaaggcagctgcctctgcgatgtgatctgacagattccaacaggcccatctgtcccaggatgtctgccat

SEQ ID NO: 1884020 - DNA, 4001 bp, Homo sapiens
cttccttgggaactgttgtccaacttcagcacacaaaagagtggcctttcttctcacaaggaaagagctcaatgaattatgaatcttttcctttttcttgaaaaaccacagcctatattttggaggaaaattcaacataattggtatatacccatctttttaggtgaattaggccttaactgacagataacccactttgttctaaaattcaacaaactctaggaaaatcttattccacacaatcttttgaatatgtcatttgccatttatatttgatggccttaagaaaaaaaacttataaaaaggtattaatgcaagtagataataaagctgcattctataaatctatagcagcttacagtaatcattaaagcatgcaaaagcctttcatctattcaaaaatatgcagtgcacagaatgtctgctaaggtgcatgacaagtcagagttaaatatatattaataaatgaattagcttcataaataatagccataatgacattttaggagacaataagtctgaggattgtcagaaaacggttgatgtatgagcttcacgtctcagtgattcttcaaaatgaataggctttgcgagatagttcagacccgcgaccagcctatttccttgaataatttacttgttgtcaatttgtacagccacattacacatgcaaattgtgctgcctgtgcaaacaccacttggagatgataaaaacaaatttacgaaggctatagaagaaggatttatttcactttctcacccaggtcaagcaatacatgtatctgacgattgtgtgtacccaattttgttgtaattatatcagcaaattattccttataatcttattatttttagcagtctccttgtgcttgggataattagctttcttcactcagtgtaaaaacaattcaacttgccagccaggtagggcatagctccattatctgttttgggtttaaatttattccctatattcttggacactttgtgtaaattaaaaatttcatagtccctaatactgtacacgctgttcattcagtgatgaattaaggcccctaaacctctccgtttgctattagatatctcacccactttatatgttaatctgtgctaatgaattccacaacccctagccacagtgagatgactaaaattattaccacttacagagatatgctttttcatttaaagttcaattcaaattgctcgcataaacagtctgccacacaaagatacctcctataaaggagagttacttacctataagtagagttctctgaaggtagtattatctttggatgcacattcctgggtcacgtgccctcaggtctgtggcactgggggagagaattcatcgctgatgggcaggtctttctttccttggggcccttcattagctctgtggcctgtattcctgagggttatttgtgccacacccctttacccaaccaatcctgtccttagcacaacagaccccaaggaaatagtggggtaacagaactgcctaatgagaattgtaggactggttaccatcaacgatggctgatgagccagaagcaacctccatctttatagaagttacctgtaaaataaagcgcccagtaactaaaaaaaaaaaaaaaatctattttttttacatataatatataatttaaaatctttttttttttttttttactttttgcagaagtagcaatttcattatggaaataatacattctcatcgtgaaattctcatagtagaaaatatagataaacaaaaagaataaaaatcacacattcccaccagtggtcccaccacccagtgacaggcacaactcgtttctggtatctatttttacagactagttttctacttagatactctcttaagatgacaacaaaatcactagtcttatcaggtccctcttcaacccactccaaccagaggttctaggacagggtgcttacctcatttgtctgttcgtcttccacttaactcattttaaaagtgcttttgctttctttctctaaagttgagtgattcccagagttttgggtgctgagccctttgctccttccacctctctttcctcaacagaacatccaagcaagttctcatcctgctttagccctaatttactctctgtaattaccaccttctgaaataaccttccagaaatgatgcagtaagacacagagtgttaaggcacagtctgaggtcagccctggggccagacctcattgtaccttgtatacctggattgtctcggaggtacaggtggtgctgcccttttattgccgcctctgcatttgatcctcacaactgctgtgcaagctggcagagcaggtgctgttattcctgttttgcagatgaacatctaaactctgggaggttaagtaacttgcctgggagaaaagaattagtacccaggtctttgcaattcctcaacacaggactctccattttaattattgctcttaattgttgcttatgattttggaacttagggcagttggtatgttttcagtatttctccttagagatggattatttccaaaggtaaatctttggaaatctttttggttagggattcagagcttcatacattattttattttgaggttccttaattatttattaccttgagaagtctatttacataaagcaaatattttgcttgaggagagtttataatagtctaccttttacaggattccctgcttaaaagtcaaaataacttcttgggaataagagttttccagtctatggttaagaaaatactcacagattaacttaattcattatcacacctggatgtagtatgatcagggcccaagctgagtcattcccactctgcgcttgtctttttgccacagggtcacttacagcattacacactcatgcagttaagatggcaaatcccatgtgatatatagtatgggaataatatcaacttagaggaacatttagtacattgtttgaaaatgtgaagccatcacatggatgatagattgagcagcctacaattaacctgagttaatatttggcagagccagatggatagctcttaacatctaatctcacgcaaagtgctttatgttcttcataaataaagaataataaaaacaaaatacttgaattcagcatcttctctggaacacagtgtgttcacctaattgtcttatctccatttgtgaatggcaaatgtgagtttggttgcagcaagaccaagcccagaaaaacgtgaagtgggcgagggtggctttctgcatctcaaccatcctcagtaactcctttcttcctcctcccagtgtgccccagccctttcttcttgggtgcctttggcctgctacttctcctttcattaaaaccacctcccctgaacccagaaggtcattcagtttcactgcagtgcagttggataatgaagtttattgtgttctcgcccccaggattatttttgtttcgataggggaaaaccttggagaagatatttagggaccaggaagacgttcctggtgaccatcaaatgatgttatttggctcaaagttctcaattgttatgcacatcttggttgtagaactgttgaatgccatatggaagatctgggtaccttttctggtttactcatatacaagatggggataataagaaacctccctcctatgactcaagatggggataataagaaacctccctcctatgactgttgtgagaattcaattagccagtgtatgcaaaagcacttggaatagtttggcagttaggaaggactcagttcgtttttagatattcttccatcctcgcccttctcttctttcctaggggaggcaatgaggtataggagaaagcatatgggcttgggagttaggtgatcctagactcagatctaaattctgccattcgctagctatgcaatcatgagcacataaccttttctgaagtttaatttcctttagtttaatttagggataatcagagtatcacacatggttgtcatgaaaattaagtgagata

SEQ ID NO: 1884021 - DNA, 4001 bp, Homo sapiens
agcccaggagtttgagaccaggctgggcaacatggcaaaaccctgtctctactaaaaaaaaataataacaaaaaattagctgggcatgttggtgcacacctgtagtcccaggtactcgggaggctgaggtggaagaatcacttgagcctgggaggtggagattgcagtgaggtgatatcaagccactgcactccagcctgggtgacagagtaagactctgtctcaaaaaaaaaaaaaaaaaaaaagtgatacccaaggaggagtactgaaccatgagtaagcccattctgacttttatagaccccgttttaggttagcacatggtgtcttgcacatggtaggaattaaatacatatttgcacaattaaagtttacagaggaaaacaaaaatccaatcatatttcctgagttacagagcaacactttggaaagcaggtattgagacaatccttctttctgtcttatccagacacacagaatctaatgtggcaagggtggaaaccagtcttttggaaacatagaaagacagagcaaaaagaaaaatgttagaatgctgattataatagagcacatacgtttatggaaataatagtttatattttgaagttgtttggggaggtttctcatcatcgctgatcttagctgtagacttaatgtcttgattgctaacaatataccatcctccaatccacctgtcctcagcatttgcatggtttacactattctaaaaatgaagttactaaaagtagtagaagtcagatatcgcctctacagtttaaattcatgtttcccatcaaaaaccatatttggaggctctggatttaaattggaaacaaatgagagataattaggaagattcaggaaaaattcaaagaaggaatttataaatttgttaaaataacagtcactgtcactatacttggcttcttatatacactgagtaaaccccaccacgttgtaaaagagactatgattctcattttacaaatgagcaaactgaggctcagagtggttgagtactttcttaggatcacacagcttgtatgtggtccaagccagggctcaacaacaagaccacatctgcctccttccagttccctgtcatgcttcccttacacattttatttagaagcctggtgcacatgttcaagaattgaacatacataaccaaagcagaaagctatattagtctgtggtcttgaagaaggattggagtgtcaggttttaaccctgctcaagagaaccaagcggggcattggcctttctgggcttcagggtcccccttttctagacagaaaacatagtgacctactttgaaggactctcagaagcacccagcataaagaaggctgcaaagacaaagaaagcctctggctaaaaaacaaggaaggaatgaatccatggaacaagacaggtgccctctctgatccaaacctataacaagggggaaaaaaacaaaagtgcccaggtctcttgtccaactactcctccccccaatcccctacatatacttttcatatgtgaaaattctctttgaaatcactggaattctatttggagagaaaatacaaggagacaggtcaagctgcagccacaggtcttggtcaagtagtttaaatatcgttaatcctttgcttctcctcctgcctttatttaaccaaaagaaaatgagaggagtagaaatctaattcattggtctctctttataatcagccttataaaaagcagagagatgctgcagggaataggaaataggctttatgagtctaagtgaattttagcctactatgttctccctctatcagaagcacataaactttagagtcacactaaactttcctccaaaatcaacgtcttaaaatgctacattaaaaaacaaaacaaaacaaacaaaaaaaaaacacttactgtccaggggttcaataagcgaagtccaaagtcaagggaatgatctctctcttttatgaaaaacaccatatggtcttggtggatcaggaggctcactggtctgttattaataactggcttagagctttatgaagaaacatgagccagaatgtcacgggaggaggcaagtggaaagaaattgacaggcacaggtggaacaaattataacaaagatatacttatgcccacacaggagctcaaagaacccatgagaaggagatcagttcctccacaatcaatagacccttatgtcaagtttttgaagagttaaacaaccaacaaaatatcctgaatgtcggcagggaacatcacacaccagggcctgtcggggagggggtgggagccggggggagggatagcattaggagaaatacctaatgtaagtcagaagttgatgggtgcagcaaaccaacatggcatatgtatacctatgtaacaaacctgcatgttgtgcacatgtaccctagaacttgaagtataataataatacaaaaaatcaggaatgtcaaaaagacaccatgactcatttaatgttatactatcctttgctcttctgaacaattattttccatggacatctgaatatcttcttaaatttatacattttaccttgtttatattgactcctcaattttaaaaatctatcaacaaatggattttgaaatgcatgttatcaactttttaaagtttgtttacctgtgagcatatcagctggcttcccttagagatcccaaaacaattcctggaaacatataggtacatgtgggggttggaggctggatcttgggattgtatcatacataaattcatgtggtaagaatggaggtgtaatcatcactttacttctggttggcagtggctctcctcttttggaaacttatatttcaaaacattccaaattctgtgccttccctcctcccccataaatggcatcaaattgtttataatattaacagtatgtctttatacctaattacattaaacactggttctgtctgaagtattaaaagaaactgacaattatgtggctgggagtggtggctcatgcctgtaataccagcactttggaaggccaaagcaggcagatggcttgagctccgaagttcgagaccagcctgggcagcatggtgaaacccagtatctacaaaaaaaatacagaaaagtagccaggtatggtggcacatgcctgcagtcccagctactcaggaggctgaggtagaaggatcacttgaaccctggagacagaggttgcagtgagccaagatcatgccatggcactacagcctaggtaacagagcaagactctgtctcaaaaaataaaaaagaaaactgacaattagagaaaagttactgaaatacataaagattgttaaattgcttctttttttctttttcaatagagatagggactcactctgtcacccaggctgaagtgcagtatcatgatcatagcccactgcagctttgaactcctgagtttaagcaatcctcccaccttggcctcttgagtagctgggaccataggcacgcgccactgcactcagctaaattttctttttttttttttgtagagatgaggtcttgcctggtcttgaatcctggactcaagtgaccctttgcctctgtctcccaatgtgatggaattacagccgtgagccactgcacccagccaactgcttcattcttaaggttccagctacttctcaccctggctcagatctagtaactgctcttttgtcaaactaaacctttttcagctaaacgctgtggtcggtggggtggatacctcactacaaacctcacccagtggaatgttattctactgaggcaactgtgaaaaagagaaactgatatgctagtgacgctcagtttaatagatgggagagaaggagtggaataggtatatggcctttcttttttttccattctctggtcaattaaaaaattttgagtacccactgaatatatgtatttttatttatagaacatatgcatatactattgtaaatatatcatttaaatcataaaatataaacacaatttttaaaagaaga

SEQ ID NO: 1884022 - DNA, 4001 bp, Homo sapiens
aattttagttgattaaagaaattcagataatccacatgataaccattcaatcactagcagtatttgccacgtctccactaaacgtctcaaagtcgcagaaaacacagcatggcctaacaggagctcttcattgcctccacaccactcttctctcaaggagcagcagtactgccctcgcagggctcaagtcaacccctacaacaccctggactccactcttcacattaccctgccactgccactccatcagtgagactgtctgctctccctctacacagtcacgtctctctagtgtcaccaccccactgccctctcttgtgcaaacctctgccacttctcctctgacacactactgtagccacaagccttgcctccctgcctgcaccctgatcacacctttcattttccagggcagtgaagtaaggtctcaacacatcagcataatcatgtcacttttctgtttgtttttctgccatctggtagcacagtagcagtgagccacccttggctatgcagaggagggtgacacccaggggatggtgtgaggggaaggaacttaggtccccgcatatcccctgatctgggtaccaccagccctacgcctatatttagtgaccctgggctccaccccactggactgctcacgtccatgctgttctgtgcaggagaatcaaacttccatcttgttagggccagcgtgctttgaaggctcttggttacaaaagcaccctaacctgctatattactgtactatactattactatactacattactataccatattattactatattactggggtaacctgcaccctagtaatataacaattggtacctggaggaggggtgcggctgtgatagaaacctaagtggtactggcttcacggccaggcagtgagtagtgaggaaagagatggtgcagggtagaaagctagtcattcccgctacgcagtaaagacatctaaaaaaatgctgcctgtattaactgggaagacggatcctgcacttaccaagcctgtgtagctctagaagaaaaaaaaaagcaaatatgcggtatgttggctgctcactgctgcccctagcgaggaactttgaaataaacgaggttaagtaagaactggccaatttgcaagcagaggtggaagataaaatacaggaatgccaagcagctctgtcttccagctccaatcctgcagtacttctttcagtgcccctaagacgctaagctccttcctccaacactgttttttgtcacctcccatcctgcctacccccggtcatccttcaagtctcacacatacctgacttacccacgcaccctgggatcttgtgcaagtctccccattaccatctcatcttaccctctgctcatcagttaatggactcagcccaagaagcactaacacgctcaatgccgggtaattttctgcgcgtgttcgctccccacgtactcgtcccccaacacccagccctgggcctggcacgtggcaggcgctcagtgaacgagactcaggaacagtcaggtgtagacggcaggagaagacatgacacggataccaagcacccgaggtcctgcaatgagtctcggcccatgttttagggagcctgggtctggagccccagtgagcgtgtgggtcaggaaggtgcccgagctccgcgcccgaccgcgcaggcgcgaaaccgggagagcggcgtcacaaccccgccctaacaggccacgcccatcactggccacgccctcccagggacgtacgcgagcgtgcgagtgtcttgggccaggcctcctcacaggcagggccgcgccggcaaaaacgaggcgcggtgggaacccgcccaggggccatccgccctcccgtccctaacgcccaggccccgggggctcaccacgtcccccggaacctgcagatcctccgccctccgctgtcgccagcggccgagcgctaagctgtccatgcagccccagggtcaaaccctcccggcatctcaggcctggccgaggcccgcgcaccacgcccccttccgcacaaggccctggggagccaataaggagagggaggggcgggacgccgcgggaagcgcgagagcaccaaggcgaggaccgcaggcaggagtagcagagaccagagtcttctgagactattgggatgctgtgggcgttgtccgtctgccccaagtcattacttcgcagagaggtccctgcatatctctgcttgtcgcttctcccttcacaggagcagccgtggggctctaaagaaagcattctttcaggatcccgccaaacttttgacaacaccccgtggatcggctggaggagcgcccgcctcctctgtcttatgattggttgttaggcctcgtggggagccgtctccctgtggctggttggctaatagatggcgcagcgggtcaattagcttgagcgagacagcgggtgtttctgggagttgtggtccgcagggctgcctcgcttccgggtgggagctgctgttgccgcggtgggaagacgcagagctttcaggccagccccgcgcggctcacggcttttgtggctggtggctggtggctgctggttgggaggccccggaaggacttctactcctccgtaggctggagggcactaggaggtcgcaggtgctgagctgccggggcctttgggctgtgctgaaggggaaaagcgcagccactgtcgggagtgtgtgctgtggaggcagttgccgcggtgatgttcgctccgcctggcccctgccggggattcagccaaccaaccctcaacagccggcggcggctcagtctctggcccggcgcggtgctgagcaccactgagccctcatcttagggcaccgaggcccggactcctgcagccgcatgtccaggcccctcctgccttagcacggagctcccttgactgctccaaacagcccagactggcgccttttttggataaattaaaacggggccaatccgttgccagcgattggctaacgatgggtacacgacctagtacgggccagggagaagtaagcgaggtctgttgaggcagagtttcgggaaagatcttctagttaaaaggggagttgggtgggtgggggctgttttcttcctgttgtccttgcccagtgtaagtttcctggagctgcagcagcctttttgtcaccatgagggcagctggtgggaaccctaggaaagcaggaaatcacctagagccggaacagcctgagcctctgaaccaacccacagctgactacccgtcactttgtcgtgtctctgtgatttgagtccatcattctgctgcagttgaaggtatcctttgacaaagccctgttcttaaccattatggtgaaacgcatgaatccctcttcgggctatttgctgcatgatcctcagcaaattaaatagttaatctccctcagtttcctcatttataaaggataggatgataaagcatagagatcgtgaggattacatgaggcatttacctagaagatacttagaacaatgctggacacaaactaagtacttaacaaatgtaacatttctcctattagttagtactcctaagactaattatgccaccactgattcacagtcccttatcaaaaacctttcaggccagatgtgtttgtgaaattcagaattttttgaatgtttaaaaaaggtgagatatattgtatgcccccgtagtcaaacaatgtttctatagcagaaatgtgtgagtattcacaaatattcaccctaagtgggatatataaaggttgtaaatagggccaggcacagtggctcatgcttgtaatcccagtactttggaaggccaaagcgggaggattgcttgaacccaggagtttgagaccagcctcggcaacacagtgagacccccgtctctacaaaataaaaataacaaaattagccgggcactatggcgcccacctgtagtaccagctactcagaaggctgaggtgggaagattgcttgggcctggaaggttgaggctgcagtgagttggct

SEQ ID NO: 1884023 - DNA, 4001 bp, Homo sapiens
ttcagaaaagtgcctctggacttcagtaggggtctttctggctcagcccagagatgagatgctgtggtcccatggaaatagctgagttctggggctgtgatgccaggtggtgggcagcagcttgttcctgtgggcagcactattctgtatttatctaaaactaacttatctttgcaaaactgaacaaattcagtaagggaatatgctgtgtcacaactggacatatcagttgaaagagcaaataacagaactaatattttcatacagtatatccgttagattaagaaaacagcttttctggctataatctttttatttccaaagggttatgactctgctattttcagaacatggttttaccaaagaaaatggaagtagtgataaatcaaaacatttaagaaattaaaatgattttttatgaacagttaaaaaacttaatgaatgggggaaaaaacaaaatatggctgtaatattctttctcccttctctctttgcattagccatcattggttgtcaagataatgccaaaatgaacactgtcccaaaagacatccttgactgtcaggcaagaaaaattctcaatgagtgtgggagaaatggtgagataaaaatgaaatctgatgtcttttcctagaaggtttgaattaaaatctcaattgtcaacatcaggaacccaaagtaattgtgtttgcccaaggtaaagctgagctcagagtctcaatttcctttttttttagatggagtctggctcagccgcccaggctggaatgcagttgcacgatctcagctcactgcaaccaccgtctcctgggttcaagcgactctcccatctcagcctcccaagtagctgggattacaggtgcccattatcatgcccggctactttttgtattttagtagagatggggtttcaccatgttggccaggcggttcttgaactcctgacctcaggtaatccacccacttcagcatcccaaagtgctaggattacaggcgtgagccaccacacccagcccagagtctcaattttcaaggaagttgccacctatttgcaggagaaattggaaccacccgaaacaacaatcagtattatgttttacaagcagcccctccttttgcttatggataaaattaaaatttacaaaatcttggaaatcagtcactgcatttacattgtacacaagatatcttggaagtaatatattttagaacataaaagaaaaatttaagtagtattttctattttacctacatagtaatgccatctttgtgactgattttctcatagacatgtgagctacctctctagaagaatttattgtaaatatatttattttgggatatttggaaaaatgaagaatacttcactcttctaatttgaaatgccttacctatacatggtttttctctaagcatgggatgtgaagctgggccatatttgtgatctttgtgatcacatagcactcagtttaaggtataaaccgagataaactttgagtcatactttctcaacttgatggaatgggtgcgtacttagaaactctgcctacaaggcagcatccctattgacttcacgggttctctcaaagctcctttttgtctatatattttcttaccataacatatcctttcttttctttttctattttttaagatacagggtcttgctctcttgcccagcctggactgcagtgacaggtcactgtagcctcaaactcccgggttcaagtgatcctcttacttcagtttcccaagtagctgatattacaggtatgcaccaccatgcccagttaatttttaaatttttctattgctgtctgtattttcatatcaagataaagcacaagtttagatttaccttttttttttaaaaaataatcttttactgggaggtggcaagagacccatttcttcagaattcctgtatggctcatattctgtgtcagggattgtgggaaagacaattccagggatagatgagccccgcactcatctcttcaacttacactctccatgccacatcttcaaacaggaagtagaaaccagaaataatcccaaccagaagtgtgcacagctcaggatcacagttgcttgcaagaaacagaagtgacacgtttgagtattctctctttcaaaaatggtgcaatgcaatttcatcaaggcattcatttcactacaccaaagcaacaagtactattaaatttaatgagaggtaacccatgcaccggcaggaagttcaaggggacagaaggggcttgctccactctggagccctatctcctctcacctccttccttctagtttgacatgcgatcttgtctctctcttttataaagtgcttccaggcccttttgattaggatgctgtcctaaatccttcctaaagagaggttttggagccaccaacactgcttcactgtggaataaactttccttattaagattcttcattcactcataatcatctcctttttcctcactgctcattcatttatggagatagcacccatatcatagctacttggtcaaatcatggtgatactccccacttaggagaggaagatgactaggttatagctcttgcctttaggaaattaaaaaccctgtggtgtaatctacattacacagtggaatatggcatatatcatgaaaaaatcctatgcagtttctgagaggacttcttaaagatgaaaaagtgaggaatgtacctggaaagatgaacaggattgcagcagatagagacaggtagaaggagagagattccaagtggaaggataaaggagagggaagagaagcaaagagtgcaacttccaagaagattttctggtttctggcactggtcatagatagcttgggaggaaacaggcagagagggttttggagaaacagagctgcaaagccaagttagatgttaggtgagttgaaaaaataacttagggcaaaagcagagggagggaggtatttactctgaacagagatgacagggtggggaggacagattgttttgagtaggcaaaggccaggagcatgaagcaagctaggaattgggaggctggcctagaagcatgggccacctgggaaagggacaaaagttaaagtatgacaaaccctttgtgttcaccaaatttcttttctggagtccttaaccatttgatcttactggaatagaagttatactagaactcactgcaaagtggagtaaggcttacagagggaaaacagcagagggcctaatgcaagattaaccttctcagggacccctgcagggactgggagtgctaagaatcagggaggcttggagcagctcactttacagtataatgagaacaggactcacctggctcaggcctggcatccaatcatcagcccactctggtttccatcctctgcgctagctgaaaggccacatgtactgcagccattgttgctccctttgcccttcagggtgtctttccccagcatctgtccctgcagcacccccaccccctcactctaattctgagcactcaaattgcccatcagtccaagccttctcctaatcacagccctcctacctctgagccccttcatggagccctgttcatggtgcttggcattttatgacaactaaaccaaaaagcagtgaggtttgaaaaaaaagagccaaaagtcaatcctggcaggggaggatttgctctttgtcttaaaaaaccaagagtaccagcttttgatggaaaaatttcaaacctcaaacagtgagtacattttgccccatcaattacatctctcagaattcatcctaaggaaaaaagaaaatgtgtaaagatcaagtacaagaacattcatgaaagtgctatactatcacataaactagaaatagatgtcccacaagaagatctataatatactgtggcacttacatacaatgaacttctgtgcagcaattaaagtaatatagaattatcatagagagatgtcatattctatggctattgcataacatggaatctatgacaatatctc

SEQ ID NO: 1884024 - DNA, 4001 bp, Homo sapiens
tttttgagacggagtctcggtcgcccaggctgaagtgtaagggtgccatcttggctcactgcaatgtctgccttttgggttcaagtgattctctgcctcccgagtagctgggattacaggcacccaccaccacacctggctaatgtttgtatttttagtagagatggggtttcaccatcttggctaggctggtcttgaacttctgacctcgtgatccaccctcctcggcctcccaaagtgctgggattacaggtgtgagccactgcgcctggccttttaaaaaaattttttttagacatgaggtctcattatgttgcccaggctggtcttaagctcctgggcttaagcaatcctcccacctcagcctcctaaagttctgggattacaggcgtgagcaactgtaacatgaggtcccagcttcatgttcattttttgttgttactacaacaaagtaccctacattcagtggcatcaaacaccacaaatctaccatcttacagttctgggggccagaagcccaactaggtctattaaggctgaagtcaaggtgtcagaggggctgcattccttctgggggaggctctagacagaatgtgctcctttgccttttccagcttctagaagccacccccattccttgacttacctcgtgactccatattcaaggccagaagtgcagcatcttcaaatctccctctctgacctcttcttccattaccacatcactttctctaattctgactctcctacctccttctcttataaagatccttgtgattggtgggtatgggggctcccatctgtaatcccaacattttgggaggccaaagaggaaggactgcttgaggccaagagttagagatcagcctggggaaaataggaagaccctgcctttacaaaattaaaattaaaatcagctggacatggtgatgcatgcctgtagttccagctactggagaggctaaggtgggaggattgctttagcctaggaggtcaaggctgcagtgagctatgatcacatcactgcactccagcctcagtggcagagtgagactgaaaagaaatatacatttggtctctgcccctggttcctggcatagagcttccaaagctcttataaagcccttcgtgacagaggtaataggagcattttctgttttgatatttagtcttagtcccaggttcctgacacaagggcctctaaggtcttccagaactgcagcatggtaagaatgcatgtgggatgctgttgagctaacagggtggctgcaagctcctagactgcttcaggaggagggctagctgccagagaaagcaaccacatttttcttttaaaatggagtttgggtcttgtagcccaggctggagtgcaatggcacaatctcagctcactacaacctccacctcccaggttcaagcaattctcctgcctcagcctcccgagtagctggaattatagggatgtgccacaacgcctagctaattgttgttatttttagtagaaacggggtttcaccatgttggtcaggctggtctcaaactcctgacctcaagtggtccatgtgcctcagccttccaaactgctaggattacaggagtgagccaccgcacctggccccagcacattttttgaggcttggaactttcagcctcacctgctgaactccaggaggcaaaaggaactggagattgacttaactaccaatggccaatgattttatcaatcatgcctccataaaaacccaaacagcagggtttggagagcttctgtgttgctaaacacaaggaggtcctgggagggtagtgtgcccaacagagggcatggaagctctgtgcccctccccacttaccttgtcctgtgcatctctttcattggctgttcctgagatggagccattacattgagccagtaatagaaaatacggtggccagatgcgctggctcatgcccataatcccagcactttgggaggcagaggtgggcagaatcacttgagcctaggaatttgagaccagcctggtcaacataagaagaccccatctatacaaaaaataaaagaaattagccaaatgtggtggtgggaaccctgtaattccagctacttgagaggctgaagcaggagaatcacttgagccctggaggttgaggcttcaatgagctatgattgcaccactgcacaccagcctggacaacagagcgaggccctgtctcttaaaaagaaaagaaaaaaacctgtttttctaagttccgtgagttgttctagtaaataattaaactcaagaagagggtcatgggaaaccctgatttctaactggttggtcaaaatacaggtgacaacctaggacttgcaactggcatctgaagtgagggtggtcttgtgggactgagcccctaacctgtgggttctgcgctaactctaggtagtgtcagaatggaattgtgggatacgcggttggtatccagagagttggagaactggtgtagaaactctgcacacacatttggtcagaagcctgtgagtagagaaaaacgtgttgcgggaagtcagggaccccaaacggagggaccggctgaagccacggcagaagaacataaattgtgaagatttcatggacatttattagttccccaaattaatacttctataatttcttaggcctgtctttactgcaatctctgaacataaattgtgaagatttcatggacacttatcacttccccaatcaatacccttgtgatttcctatgcctgtcttactttaatttcttaatctggtcatcttcgtaagctgaggatgaatgtccccgcaggactctgtgataattgcgttaactgcacaagttgtttaaacaatatgaaacctgggcaccttgaataaagaacaggataacagcaatttcagggaacaagggagataaccttaaactttggctgcctgtgggccgagtagaacagagccatatttctcttctttcaaaagcaaataggagaaatattgctgaattctttttctcagcaaagaacatccctgagaaagagaatgcatccctaaggggaggcctctgaaatggccgctttggggacggctgtcttttacagtcgtagataagggatgaaataagccctgggcttgcgtggcactcccaggcttatcaggacaaggaaattcccgcctaataaattttggtcagatgggttttctgctctcaaaccctttctcctaagatgttaccaatgacaatgcgtgcccgaaacttcattagcaattttaatttcgccccggtcctgtggtcctgtgatcttgccctgcctccatttgccttgtgatattttattaccttgtgaagcaagtgatctctgtgacccacaccctattcgtacactccctccccttttgaaaatcactaataaaaacttgttggttttgcagcttgcggggcatcacggaacctgccgacatgtgatgtctcccctggacacccagctttaaaatttctctcttttgtactctttccctttatttctcagatcggccgacactcagggaaaacagaaaagaacctacatgaaatatcaggggtgaatttcccccgatatcacacgggctcttctctcacctgtctaactgcttaactgcataggagaggcaatgcatggtgctcatgaacaaggcaagcattaaagtcagaccagactaacatttgattcagtcttaatattcaggtgagcttgggcaaatcactcattaaccccaagtcttcatcattttgtgcatataatggggataactgtggcacccacctgtttttgtgagaatcaatgaaatattatgcttgatgttactgtgatcatgatactatctgacaagggcagtgatgcatgataacatcaaaaaattagaaactgtaatgaggtctcttgggcaaaattccatacaagtaaattactgtctctacaaagcatttctgctacacttaattcaccattccctgaacaaaatg

SEQ ID NO: 1884025 - DNA, 4001 bp, Homo sapiens
tcccattccgtttttctgctgttgcaaaccagatagagctcacaaaacaggaaaactatattgacacaatccccaagatagaacagagagcgattttgatggggagaggagcagaatgctgaaactccttaatgctgagggtttatatcaacccagagtaccttaaacgcattcgctctggaaaacaccagataaaaaggagggccgagctccctgctttgcaggggcactgggggcttggcccaggccaagttgagggctctctcctctgaaagaccaacacagaattctccttggcaagtgctgctgtgggcttgcctgagctaatatcgtatgaatagagatgtttcaaatgtattaaacattggtcccttttttagaaattacactgacagagccttccttaaacattatttgaataaagcctcattactcacagtccagagaagttcattaggaggagatcgctttggaaaggaatctaggagctcgcctttcttctcagcagtgaattacattagctacttcctagttatttaaatcttgaaataaaagatgtaaacgctacagtgacatcttaagatcattgccaaggcaggtcttgcatgcacaaaaatgcccagctggtctgcagataaaacagattgataattagttgcaaaatgtaacatttcatcaagaatattttgaataatccaatttatctttgtcagatatgcagcacatatttttccggggagcagctttgttctttaacataatattataatttcaggctgctaatgaaggcgcccgccggccggccgggccttgatgtgcggcgtggcggggagcgcgccgcggcccggggacccgtgcgcctgagcgcgccgcgccccgctgccgccacctgcccagcacagcgctggctgtggtctgcgggccgcgggccgcgggcgatcaaagggccggcggcggcagggagggcgcccctggccgggctgtgcgctggccgccggcgggcgggggctcctccgactcccgcttctaatcaaccgatggaaacgcgcgctccctgcccgcgaccgcgaaggcgaagtcatggggtgggcgccagtgcaggctgggggtgtggctgctgcgtcgcgggcttcccccgggggcgcgtccgggttgcaccctgcgtggccttccccggaatagcaaaagagatgggggggccggggggtgagcgggagaagagggacaagggtggcttgcaggactcgggaggagctgcaggtacatctagagctccgcggaccccaggagccaggagacaactacggcccaggtgctggtaaagccttgctggggcactttggcactttatataaggcctattggacaccgataagtgagagctgcttagcgtttgtccggagagcctcagctcccggcccaggacggaacctcctctaagtcccagagcgatcctaaaggctctcccagagacctgggttaagatgagcaaaaacgccctcactcacatcccccagtgactccacatcgcccaggtttcaccaaagactggcccggaagagggtgtggctggatggaggaaaagtatcctcacaacttggaaaattcgctccccctttccaaaaggggcgtgaagtttggcaaagcagagaaaactccaggagcaaagaatgtcttgatactgtatgcacacactatacgtgcacacagtgtctcctattttaaatttaccatttcagctgcgtgtgtgcaaacctcacactactattatatccgtgctggcgttgcttggtaatattcggtattctcaaaaacaaattaaattctagccccaaaattaaagttctttgtctcgcagttcagaaatgataagaagaaatgagtgctgctctcctaattgactgcattggaaaagacaatgctacctgtgttccaaaatcctcaggacagatcgagggcctctgggcatccaggctacaggcgttggttaccatgctacctggtaaaaagggataagagtgaacttgagtgcattcagaaaattcagaatactttggaaaatgaatctgttcacaagaccaaaccgcttgactcacttgaagactaccacataagcaggacttctctttaccgggttatttctgttcctgcagtcaagggctgccttccctgttttcaagtacattacagtctcaaggatcatggtcagtacattaggctgaatatattgacttgaacctctcccaacacgtgcagatcttacaatacattaggaacgtaattcagcaaagtgggtgtgctcttgacatggatcctgacggaccaagctgctccttcttgctttgacttcttccagggtggtgttgcaagccttcctacatgattatctactttgtgcagactcgaaggtcagtctaacatgatctctttttcaagccaccttttcctgggtaaactctgaccgtgtttgttttttctgagcctcctaaccggctaatggtccccacgaatccctcattttcttctgtcctcctcttctccacgggctacctggacccctggagctatagacctcccagtaaccctaaaggatggccaggaggccagtatgccctcaggcttccaacctctccccacctgacctgagcagccaccattctcttctttgtcccgcaagggactcctctgagtacccaggaggataagggaaaaagcatgtcctggccattgacgttctgtgctggctcctggaagtagctgatactcagcccctctgcaggaccctcttcctggcacacaggcccttggtgacctagccaggccccatggccagatgcatgggttcttcagaagtcaaccaccctgagcttctttgaaggagaccttcagaaacactgggaaaacccactcactttatctcagggctgttcatgtcagccatgtcttctccaagagccaagagctacttaacaaacccatgagagggtggccctgcagccctgcctccatcttcaggacaaggcagggaccctgagatggcccaccctgcaccctcctctgtcaagcatgcacaccctcgccacagcaacgccactgtagaggggtcagctctgcctaactccatacttcaccaggttaggtgactctttggtgtcccatgggctcagtcattgagcaaacactcaatgggcggggattgacctgacctgctctgttttgctctgtggccaacagaccccagggagacacacaagctggcccagccagctcccattcagaaccaccccaacacacaccagaatggcacaaacaggaacccactgacccgcaggctcctgagatgagacagtcacccttgcccagatcaacaggcggaagaaccacatgctatcagcaggcccctgtccccaaaaagcagacatcagagagcaaggcatgactgtttccaaggggttttgcccaggaagggtgtcccctctgtcttcctgtctgcctttccccagtgtcctgccctgctcggaagcctgcagagactccacagctagaggtggtgttaaggttaagctgcacacggctgccccagtcaccctgtcttcattgtctatcctagatgaatccttgtttgagaagagccagtctacccactgtcccaggctcccctaccagggagggcctcctctcctctctcagtcaatccccatcgtgcccattcttgaaagccagggtcaaacactcatcttccacacacttgggagtctcaataccaccgcatgtgccctcagcactggcacacagcactttcagctactcaccattgctgaccaggcacaagtctgtcatataacttcctctggggctcagaacttgtagtgcacacatccatgcccagcctctttctgtacccagtgcaagcacagagcagcattcagtgcacattcattaacgtgtccttgtctctgtcctctgaggccattcctatgggaggaggcccagcctgtaag

SEQ ID NO: 1884026 - DNA, 4001 bp, Homo sapiens
aaagccacagagtgaagctaaacttcagcttggtgttttgcaaaatcttttattctttctccttgattgtcccctacagtgaaccttcccaccagtcctattctataaaatgttcccttccctcacactccagggattatccagggtgcagaacagggaggagtatgccccatctcgtgtgcaaaacctcattatgtaaggtaattctatgggataccttttataccccacatgaaaaccctcccagcctcacctcgcacttcacccagtacctcccaggctctgatccactttgcataggtgtcacctgacaccacctgggctcggagatctgctcacctcttacttcctgccttggccccggggtcacctgcaggaggctgctcagcaatcacagttatgcaagtctccaaagacagggcctccacggccaggacagaagcagataataagttctctttcctttactgtcccaaggagactgtgctgagatgcatttcataaagggcctcagaaggtctcaaaaagcccagcatcagccactccaagcggctgtcgattggataagccatctggtattcccattcactccttccctccctcgctcaactcactcctgctcgcctgagccctgagacccctgcccaaagaaacagcctgaactcaagcctttgtccctagctctgctggagaagctccatctaagaccactgataccacacctgaaagctctagatagcagaccttcaggatagaatttgggggctagtcccctcgccaatccagcacacagaggaaccccattgccagtggcaattggggaagtaataagcccctggcctcagctgcctcatcatcaccaagaagggcactggaatagggctagagagaggtgcagggaggtgcgggggaggtacaggggaggcacaggggagacaggctttgcactggcatccatgacaccttagagactccccatccagcagggtaggggtccccaactcccagccatgaaccagtaccagtctgtggcctgttaggagccaggccacacagcaggtgagcagcaggctgaggagcactgctacccaagctcaccctcctgtcagatcagcagcggcattagattctcataggagcacaatccctattgtgaaccgtgcttttgagggatctcggttgcccactgcttatgagaatctaatacctgatgatctgagatggaacagtttcatccccaaaccatccccacccccagtctgtggagaaattgtcttccacaaaacgtgtccctggtgccaaaaaggttgaggaccactgcgccagggcgttggattcagaaggtcttgcagagggtgcatcagcaatatgcatttctaactggcagcaaaagtcctcttacaaaacgttcatctactgtagaaagatttaggatgtagaaacaaaagaaatgtcacctgtaactctgccatgggtcagtgtgcaccatctcaggctcttctgcacgcccatgtgggtggggtcggggttgggtgtctcggccaggtggaggctgggccaggccccaaagctgtgggcggcagatgctgcatccacctcctctggcttggatctagaagcttcctcctctctcttcctcttgcctgaattgacacaggagatgaagcctggggaaaatggaccagaactcagaccccaacccccaacctacaatgacattcaaggatgtaagacgcacatgatagatttgttagcacagtgttatctgtaaatcagagctgtgttcactgtcagttagaacaggctgggttataccgagtaacaaatgtcctgcaatcacagaggcttccctccacaaagatctgcctgtcactcaccacgtgcccagggcttggctcagcccttcacaggtggatgggcattcgcaaactggagcacggcagcctgtcatagagacaggaaatgagcacatggtgaacaagtgctggctcttagcttctgcccagcagagccccatgacacttctgctcacatttcattggccaaggcaagtcacatggccctactgccacatgacacttgtacttgaatttcattggccaaggcaagtccccttgctttgcctgcttcagaggagcagggatgttcagtgagcaaatcaccctgagaacttgatgactgtccttgctccattctttcttttatcacggtcctttgtccaccgacacatcaccagctctggactggagctccagtagagagggcaccaggcacactcatccttgtatcccacagggactgccatcattggcagacaggcagtctacttctctttttcctgccaagagtcggagagagcagtgacttccacaacactggccctgcagactttgtaacctaagttcccaaaaatggactaaaaagtaatgagttcttatcctgactattcactcagcaatacttagttattaaacatcttctatgtgccaggtacataatgtggagaataaatagaagtagaaaataagaaaatgaaaatatcctacaggttatctcttattcaaaatggttgggaccagaaaggttttgagttttggattttggaatatttacattacacttaatggttgagcattttgaatccaaaagtctaaaatctaaaatgctccagtgagcatttcctttgagcatcatgtcagcactcagaaagtttcagattttggagcatttcagatttcagatttttagattcaagatgctcaacctgtataatttcaccactctgggggacctacttaacattttttatatatttcctttccgtttttttctatggatttttttggtcatgccgacttaaataattttctcttttttttcacttaaagttataactacaacagtcttaagaactctttgaaaatttaattttaaagactgaatcatattgcctttaatgtggattacatcagtgcaggttatttattgggccatcttattatcattaaacactttgggtcatttcacttttttattttttaaaatgctatgattagtatcatttttaaaattatacctcaaaaagtctttgtaagaagattattcataaggcgtaagcataaggaaaccttcttatgagatcatttgttccacaacaatttatctcagcctaattgccttttattggccatagagctgttcacttcctcagcaacccagggttcaagtcctgtaaaacacaacactgggcagttctagaagagagaagcgtttctggagcttggctctaaaatcttcagatcacaacaattttcacaatgaaataaaatttaatttttggctcacatagtaaaagattatatcagatttctcattcctcggaaaatcagagagaacttaataacaaataccataattatctgcaaagactgaacggtgattaaattatcaggaggccgttactcctaaaactatttctttaattagctaaagctggcagtatatattaatatttcctgagatatttgcatacattcacaacaggctaaccagacattagctgaaatataatttttctaatattatgttagaaatattttaagattaaatcatattatcatgttttttcctgtgattattagagcagacactcttgatttatcaccataaattctctaatttaggagctgaaaatgcttctcgttttccatgatgagctttttcaattccatttacacaatagaaggtgctctttgaagcccagatctgctggtagaacgtggtttttgataatccacatctgcacactgctcccagacaaacacaaggaagcccaccctaatatgtagctggcaggaccccggccattcagattccgtggccacagcaggaaaagcgtctgggtagcagtgggtgcagggacagggtgaggggagctggtcctggctggccacagcaccaaagagcggaggacatgtcagcaagcaggatttgaatgaggg

SEQ ID NO: 1884027 - DNA, 4001 bp, Homo sapiens
gccgccccccactaggggagctggagaaggggttaggtggagttggggaggcacggagggtccctggtagcggggtgctggcaagcaggctctccagggaaaagcgaaaatgaagcccctggttggaagcatttgcacatcctcccaccaccgctgtttaaactgccccaggggcagcaccagctcacaaagctgcacatctcacaaatggccaggtggagcccagctctggcttggtgacccctccagaaaggcggggtcctggggaccccaaagttggctggaagccgacctgcaccgctgtcccaggggcctgtgctctcctcactctgcctggctggtgtctggcccggcagtgctttgtggcatcggctccactttggggccagtcggtgccggcacggctactttacctatggcttgagaatccaagtgtggagtctgggaaagggggctgggctggaatccccacgtgtgagggctgactgagactgggcccgcaggagaatgttggcccagggaaccaggaagaactgacctagagtcgggagagaccccaggccacctttgtgtgttgggccacgcagtggtgaagaccatggggtggccacccagctacggttggtggaaccccagagcccactaggggagggtgtggtgagtgcatgtgtgtgactgtgagagtgtcagcaggagggggtgggtgtgtgtgaactgtgtggctgcgttagggtaagtgtgtgccatgtgtacacaagagtgcgtgtgtatagtgtgtgacatgtaagcatgatcatgtgtgtgaccatgtgtctgagtgtgcatgtgtatgcatgtgtggccctcccctgtggaggcacaggggagcaggtctctaatccacagacatcaccgacgacctgtgcagggccaggctctggggatcagcagagaacaaaaggggcagaaagcactgcccctggggacaaagaccacactgtggggtccggcagctgggaggggggcctggtgttttctgggaaagcagcttcaccccccaggaaagcaggaggatcagaagagggctcctcacccccacggacacctttcccggtgggacagctcctgaacatggagcgtatcagcaacctggcagccgagctcccgcgtctccaggatgacggccgagggtggtgtgcacatgccctgaaaagacagggaggagaacatccgctgtcatccccaacagcccagcactcagcacccagcacccagcaccccagcactcagcacctcagaccatcatccctaacagcccagcactcagcaccccaggctgtcatccccaacagccctgcacccagcactcaggatcccaggatcccagcaccccagcaccccagcaccccagcatcccagcaccccagcaccctagcaccccagcatcccagcaccccagcatctcagcatcccagcaccccagcaccccagcatctcagcatcccagcaccccagcaccccagcacctcagcatcccagcaccccagcatcccagcatcccagcatcccagcaccccagcatctcagcatcccagcaccacagcatcccagcaccccagcatcccagcaccccagcaccccagcatctcagcaccccagcaccccagcaccccagcatcccagcatcccagcactgcagcatcccagcctccatgtatcccagcaccccagcatcccactacccccagtacctccagcatcccaggatcccaggaactcagcattgctgcatcccagcacctaacctggggtcacacatttttatctgatgaatctgcagctcttaattaatgcttctacctgccttccctctgccttctgcagacaccgtgcacaggtgatgtgtacatgtatattcttttttggttcacagaaatggcagttgcatcatacctgtttagcatcatggcttccagctaactacccatccattcactggaagatatttttgaagccttgctgtgtcattagagcagagcctcgttctgaactcctggtccagcaggccctgctgcagaggctgctgcagctcatggcacacttggacagcggcagcactctcttctctgaggcctctctcttcaacgttttgtaagactgtatttgcatgtttatttttatgtaaatgctgaaacatctggtctagtttaaaaaataaacacaaaacacagccaaaagcacactgttggcattttctccggtacaggttgatttaaagagaactgccgtaagaccgtgtgtcttctgatccagccgcagtgggctttctcactcgcttgccttcggtgtgcatctgcttgctaatactaagaatttgtgcctcgatattgataaggaaggtgattctgtgatattttcaaacaaacaatgtggaagcttgatctttccttctgtgctcctgaactggttcatagcattgtaattacatgttccttaaggtttgcgagaacttgtaaggtggacttttctttctcatttggagcaagtgtgtatatgtatgtgtgtgtgtgggtacgtttgtgtatgcacatgctgcatgtatgtgtatagcgtgtgtgtatatgaatgtgtgagcatgtatgtgtgcatatgtatatgtatgttgtcttcatgtgggtgtttatgtgtgcatgtgtaaatgtaagtacatgcatgcatgtgtgttgtttggtcatgtgtgtacatgtgtatgtgtgtgcctgcgtgtccgtgtgtgcacgtgtgtaaacatgtgtatgcatgagtattcatgtggatgtggatgtatatgtgtagatggagatatgtgtatatgtgtgagcatgtgtacccatatgtaagcacgttcatgtgtgcatttgtgtggatatggatatatatgtgtatacatgcactgtgtatatctatatgcatgtatgtgcatgtgtgcatgtgtatgtgtacacgtgtgtgcatgtaaccacacatatgtatgcgtgtttgagtgtgcaagtgtacatacgtgtaagcacatgcatgtgtgtgtatatgtgcaggtgtgtgaagggatccagatcacactttgtggtgtaaggatcattttgagctgatggtgtttggggatccacagtgcaggaggaggctttctccacagcggccttatctgcctaaaagcagaggcttccagaaggactcagccatcaccgcccaaggactcagccgtcatggcccaaggacttggccatcaccgcccaaggactcggccattactgcccaaggactcagccatcacggccccttgaaaggaggcttctggtaccaagagacagagcaactccagttgctggagatgagaagtcagcactgggatgagcaatggcacacacagacctttcccaagcggaccttgccctccgttagcttcctgtgtctctctcgctcgtttcccaccacatgctggccctcagggtcctacctccttccccttgataagatggtttctcagccccaaattctagctgcttctttgagtcactttcttcctgagtatgcatgtgaatcaactttaccctttgctaaaccgtcttttgtttcatttgcaggcccccaatagagaacctgagatgacagaggacaagttttcctccaacataagcatgtgtggctgactgtcgtagctctttaacacttctctcatagctctttaatacttctcctgtggtaattggctcctccaaaatcagtttgataatattttccttaaaaagcattcatttcatccagatttcaatatgcatagtgttgaacaaagtagtcttatcatagttgtttttcacttactctgcatctgggctattttctgatgcttatttctgattttatgtatttctttttggttaggtttgttgatggtttctgtattttattgttttccttttttttaaaagaaccagctttggtgcctattaattgatcctatcatttcctgcttttcaaatcattaa

SEQ ID NO: 1884028 - DNA, 4001 bp, Homo sapiens
ctgtctatcaacattcctccctccctccatctgtccatcaaaatccctcccttcatccatctgtctatcaacattcctccctccctccatctgtccatcaacatccctccctccatccatccgtccatcaacatcccttcctccatccatccgtccatcaacatccctccatccatccgtccatcaacatccctccctccatccatccgtccatcaacatccctccctccatccatccgtccatcaacatccctctctccatccatccatccatcaacattcctggcacctgctcagcatcgggggggcatcccagccctcacagggagcaggcacagtaggtacaggtagaggctccctgcctgctcagccccaggccgctcctgagagcacccccaaagccacaggtcacagcacattgcccctgattttaccccattaggagagggaagatgtgcccaaggggactggtgagccacagggaggcggattcctgggctgcagcttaaaacaagacacttgttccctcatggttccggaagccagagtccaagattgaggtgtaggcctgcgctccctcagagctgctcgctccagggagatccctcctcggcgcttctgcttctggtgactccgggtgtcctcagcatcgcccagccccacctccatctttgcaagcctctcctttctcccataaggatgccaggcaccggatttcaggcccatactaaatccaagatgatctcatcatgatatccttaactttttacatctgcgaagaccctgtttccaaactggtcacgtttgtaggaaccagggcttaggactcgaacatatcttttggggagacaagattcatcccccatgagcatgggttcagagagcaacggctttagcactaccgaggtcttaatccaagcttcctgtcaggatttaatacaagggaggctgaactgccggggagctcagaaatgcacgagcaagacatgagcgtaggggaggttcccggggtgcctcgactgtccaggcttgcagctgcaggtggagaggaggcaaggctgtttgcccatttcagcctcagaacagtcacagcccagcagccggcggcctgtccatgatgaccattctgctccggagcctacacagagggcactgttcaccctgcggccgcctccctgcgctccaaggatcagcctcatgataaggtcagaaagaaccttggctttagggtctgtcccgcgtggccacctgttctgtatgttaaaaccgacttgcctgccatttctcttcttatccctcacacccacccacccagcctgggccaggcctggttctagggcgcggccaacggtcggggacaaaatattcatggtttctgggttcgtggtcaggcagtttgggtggacacaagcaagtgccacgtaaaataagcaacggtgagaatggttatgagtcgcaatgacactgtgaggcactttaacaggctcatcggcgtggccctaggccctgccctctgtgagcccaggtcacccccaggacgcccagcggctgctgcgccacctccctcctcccactgtggccaggcctggcgggcgggtgctgcctcccgacacgcacactttgccggggcaggtccgcgccagcgccgtcgccagaagagcctcacaaagacgcggctgccaccgtttggcgtctttgaagactgttcagcaggtctgaggatgagctgctctgagggtttttcccaacttaccattttgatacaacgtcaaacatatgtaaaagtcacaagaatacgacaaggaactgccattagagccttaggcgaattcaccaactgttcccacttctcaccggtgtcaccttcccaccgttcccactcctcactggcgttaccttccctccgttcccacttctcctcaacggcgttacattcctgcggttcccacttctcaccggtgtcaccttcccaccgttcccactcctcactggcgttaccttcccaccgttcccactcctcactggcgttaccttccctccgttcccacttctcctcaacggcgttacattcctgcggttcccacttctcaccggtgtcaccttcccaccgttcccactcctcactggcgttaccttccctccgttcccacttctcctcaacggcgttaccttcctgcggttcccacttctcaccggtgtcaccttcccaccgttcccactcctcactggcgttaccttcctgccattcccacttctcctcacggcgttaccttcctgccgttcccacttctcctcaatggtgtttccttcccgcctttcccacttctcaccagcgttaccttcccgccattcctacttctcctcaacgacgttaccttccctctgttcccacttctcactggcgttaccttcatgctgttcctacttctcctcatgccattaccttcctgccattcccacttctcctcacgcattaccttcctgctgttcccaattctctctggcgttaccttcctgctgttctgccgttcacgcgtgtttatatgtgtttgcatgtgtttacatgtgtttgcatgtgcctgtgtctgcatatgcgcatttccctgaatcgacggagggtgagttgagagttgaagaaattatgccattttactgctaaatacctcagcgtgtacttcctgacaaagacacttcttttcattaccacagtatagctgtcaaaatcaggaaagttcacaccaatgaaatatctaatccagagtccatactcagatttcatcaattgtgcctaaacatccctttagctttttcccactacatcctggatctaatccaggaccgcgggcctatgaccttttcaaagtcctaatttccatccttcttcaacagttcttgtagcctttctttgtatttcttgaccttgacatttttgtgagtgtttgtcagcgactttgcagagtgcccctcagtctgggttgacgttcggattttccattttattctaaggtggttttggtaaattgtattattcaaggactttcccccatttcattgtaattgccaaatgtattggcataaactggtttatcatgttccctgatttcccttttagtgactgtagaatctctatatttcctctttcatttctgatattggcaatttaggcttttccctctttatttttcttttatcttggttgatctgttttgtgtttttgtttgtttaagacaggatctcactctgtctcctgggctgcagtgcagtggtgcaatcatagctcactgcagcctcaaactcctgggctcaagtgatcctcctgcctcagtctcctgaatagctgggactacaggcatgcaacaccacacctggctacttaaagaaaatattttttggagagatggggtcttgctgtgttgcccaagctggtcttgaactcctggcctcaagcaatcctcctgccttggcctctgaaagtgctgggattacaagtgtgagcttcggtgccaggcctcctgatcagtcttatggggtctggctctgtcacccaggctggagtacaatggtgcaatctcagctcactgcaacctctgcctcccgggttcaagccattctcctgcctcagcctcccgagtagctggaactacaggcatgcaccaccacactcagctagtttttttattattattatttttagtagagacggggtttcaccatgttagccaggatggtctcaatctcctgacctcataatccgccccccttggcctcccaaagtgctgggattacaggcgtgagccaccatgcccggccctgatcggtcttatgatcagtcttataagtgaaatgggaaaggttcccttgttccccttgcagggtgtgcgatgggggtgtggcttgcttcttcagtgccccgatgctcaaactagccaggggagcatacagacgagcaggctggggggctctgaccccatggcagtgtctaggggtgaatgtttccagct

SEQ ID NO: 1884029 - DNA, 4001 bp, Homo sapiens
tgtccttatcctgcctgggctcctcctggcggctcacacaagggtgggtgtgatgtcacctgggccgacctgcccccgactcagcaccgaggctcctgtgtgcctcaaacccggctcccgccaggaattcgagtcagacaggtccctgggccctcgccatgccccaaactggcagccatacagaggacgccccgcatgcaggtggggacccacaatcaggcccccggggcaggtgggcacctgggtggaggccacggctttctcacctggacggggactaaggaggctcctctgcccgtcccctgtccaggcctcgctgaggctcctaggccatcaccttctttctcctgacatccccacccctccggtgccccccaggccccccccagtcaactcccacttgggctcttgtctcaggcccgaggccagggccagccttggcaaaggcaagatctcttctgagaacaggtgccggcctggagccaacgggtggccttggcgtccggtggcctcggccccagcgtccagattggacccaaggggacgatcgccccaccactgacgagggtgccacgaatggggttgtggacagggggtgtgaggggctcgggggaggtggtgctggtgcgtggctgctgcagcctggggacacagccgtcctcacgctcggccaagggtcactggtgacagacggcgaggcctcgtccccagatgccgcctcccacgtggttcagccagaacgcgctcccacctcagccctccctggtcaccgtgggtgtcagagccaccagggtggtgccatcccgaggggcattccctcgacaggtgacagctcttcccaaacactgctgccccagagtgtgacagaggcccctggtccggagccacaccacagagggacacccccacggcccctcgcactgagagcgcgcggctcaggcaggagccagcctcaggctgcaggccctgtgggcggacggcggagggaggcagggctgggagacgttttttgtatctatgagttaacaacaaacccagccggaaccccaggctcagatctgctcagaagacggaggggaagcagcaaatgctggcgtctgacttggatccaggacttttatttttaagctttaaaaatgtgaagaagaggatgtcaccagctaacgacgtcagcaaacgtcttggaaaatttggaaacgtgttgaccgggttggctgtaatttatttctagaagtgtaagcaagaatttggggctgagggctaagaaaggcaaaaccagaaacatcaagatcggctcaatgtgacccctgccgcatgcctgctcccaggacccctcacccccaacccctgccacacacctgctcccgggggctccccacccctcacccccacctcatgcctgctccccggcacttctcacctgctcacccctaccacatgctggctcccctgaccccccacccctcacccctgctgcacacctgctcccctgatcccccacccctcacccctgctgcacacctgctccggcgatcccccacccctcacccccgctgcacttgcagcccagccttggagtgcaggcctttctccttcactcttccgccttaggacgctggccgtgtatgagtgtcagtgcacggatgagcgagtgtgagtgtgagcctgacaggcatgtgtgagcatgagttcagtgtgtgtgtgagcaagtgtgtgtgtgcctgcgtgagtgtgcacaacagtcggcctctccacgtgcatgtgccaggccggcaggtccagccccctctgcttcctccgcgtgaggagggctcacagtccctgcagggcctgcacagcccgggagaccagcgatagggcaggggctccgggagctgccagcttggctgggaggacagaatcacgttgctgatggacgtcttctgagagaggactgggacgccatcattcgagtgaggtttgaggtgggagtcgactccagaggcagtacttggactccggaccggattgactagttaaagcagggctcgcggaagcagctttccctaagcctcgcccacccgagtgcctgtcagttttccgttgccatagcaacacccgggtgttaccgcccccttctatggcaatgactcaatgacccaaaagttactaccccttccctagaaatttctgcataaatcgccccttaatctgcatgcgattaaaagcggtataagtgtgactgcaaaactgccccaagcggctgctctctgcctacggggcggccccgctgcaggagcagtcagggagctgtgagctgtggcacggccgcctgaataaagctctttccttctacctgcggcttgcccttgaattccctccagggtaaagccaagaaccgtcggggctcagccccacctgggggctcccctgccccgcaccaccgaagtcttggatgggtaactggaagatgccattgtgaatagaaatatcctttctcgatgaattagaaaatgaaaccaactcctgcattaattttacacaaatgacatcaagagggttgagagaagaaggtggctgtccccagctccgggtccctgccagccttatgatagtcttctaaggccatctattatttcctgaaatattcatagaagtatgaaaaattgagcatgagtggtttgctttgtgcttcgttatttattaagcttgtgacttatttttcttttggcgaagagcttcctatcttttccaagaaaaaaaaagtgggccagaataacagccctcatgttttgagcttgaaattaaaatttcgaagacctccctgtacaaagtgaagctgagtaaagatgtttacaaatgcagattgaaaatgaaaaatgcaagggcctttgtgactcattttatgaatatgtgtttttatcaaagaactcccataagttgactcggagcctgatttgcatctagggtttcatccttgcttggtggtggactggccgtcccttcatcccttctataagtccattaacatccctccctccatctgtccgtcaacatccctccctccatccatctgtctatcaacattcctccctccctccatctgtccatcaaaatccctcccttcatccatctgtctatcaacattcctccctccctccatctgtccatcaacatccctccctccatccatccgtccatcaacatcccttcctccatccatccgtccatcaacatccctccatccatccgtccatcaacatccctccctccatccatccgtccatcaacatccctccctccatccatccgtccatcaacatccctctctccatccatccatccatcaacattcctggcacctgctcagcatcgggggggcatcccagccctcacagggagcaggcacagtaggtacaggtagaggctccctgcctgctcagccccaggccgctcctgagagcacccccaaagccacaggtcacagcacattgcccctgattttaccccattaggagagggaagatgtgcccaaggggactggtgagccacagggaggcggattcctgggctgcagcttaaaacaagacacttgttccctcatggttccggaagccagagtccaagattgaggtgtaggcctgcgctccctcagagctgctcgctccagggagatccctcctcggcgcttctgcttctggtgactccgggtgtcctcagcatcgcccagccccacctccatctttgcaagcctctcctttctcccataaggatgccaggcaccggatttcaggcccatactaaatccaagatgatctcatcatgatatccttaactttttacatctgcgaagaccctgtttccaaactggtcacgtttgtaggaaccagggcttaggactcgaacatatcttttggggagacaagattcatcccccatgagcatgggttcagagagcaacggctttagcactaccgaggtcttaatccaagcttcctgtcaggatttaatacaagggaggc

SEQ ID NO: 1884030 - DNA, 4001 bp, Homo sapiens
cagaggaaaaccttcccactccatccccctctgacttccccggagctacctccacgcaataaaacattgcagtcattctccaagcccaggtttgattcgattcttccggtgcaccaaggcaagaatcctggatacggaatgccctctgtccttgcaacaaggtctaattgagctggtgaacataagccacctatagatggcaaagtaagaacatatggtagcacatgtccactgcagcgtcaggagctggaaacattcacccctagacactgccatggggtcagagccccccagcctgctcgtctgtatgctcccctggctagtttgagcatcggggcactgaagaagcaagccacacccccatcgcacaccctgcaaggggaacaagggaacctttcccatttcacttataagactgatcataagaccgatcagggccgggcatggtggctcacgcctgtaatcccagcactttgggaggccaaggggggcggattatgaggtcaggagattgagaccatcctggctaacatggtgaaaccccgtctctactaaaaataataataataaaaaaactagctgagtgtggtggtgcatgcctgtagttccagctactcgggaggctgaggcaggagaatggcttgaacccgggaggcagaggttgcagtgagctgagattgcaccattgtactccagcctgggtgacagagccagaccccataagactgatcaggaggcctggcaccgaagctcacacttgtaatcccagcactttcagaggccaaggcaggaggattgcttgaggccaggagttcaagaccagcttgggcaacacagcaagaccccatctctccaaaaaatattttctttaagtagccaggtgtggtgttgcatgcctgtagtcccagctattcaggagactgaggcaggaggatcacttgagcccaggagtttgaggctgcagtgagctatgattgcaccactgcactgcagcccaggagacagagtgagatcctgtcttaaacaaacaaaaacacaaaacagatcaaccaagataaaagaaaaataaagagggaaaagcctaaattgccaatatcagaaatgaaagaggaaatatagagattctacagtcactaaaagggaaatcagggaacatgataaaccagtttatgccaatacatttggcaattacaatgaaatgggggaaagtccttgaataatacaatttaccaaaaccaccttagaataaaatggaaaatccgaacgtcaacccagactgaggggcactctgcaaagtcgctgacaaacactcacaaaaatgtcaaggtcaagaaatacaaagaaaggctacaagaactgttgaagaaggatggaaattaggactttgaaaaggtcataggcccgcggtcctggattagatccaggatgtagtgggaaaaagctaaagggatgtttaggcacaattgatgaaatctgagtatggactctggattagatatttcattggtgtgaactttcctgattttgacagctatactgtggtaatgaaaagaagtgtctttgtcaggaagtacacgctgaggtatttagcagtaaaatggcataatttcttcaactctcaactcaccctccgtcgattcagggaaatgcgcatatgcagacacaggcacatgcaaacacatgtaaacacatgcaaacacatataaacacgcgtgaacggcagaacagcaggaaggtaacgccagagagaattgggaacagcaggaaggtaatgcgtgaggagaagtgggaatggcaggaaggtaatggcatgaggagaagtaggaacagcatgaaggtaacgccagtgagaagtgggaacagagggaaggtaacgtcgttgaggagaagtaggaatggcgggaaggtaacgctggtgagaagtgggaaaggcgggaaggaaacaccattgaggagaagtgggaacggcaggaaggtaacgccgtgaggagaagtgggaatggcaggaaggtaacgccagtgaggagtgggaacggtgggaaggtgacaccggtgagaagtgggaaccgcaggaaggtaacgccgttgaggagaagtgggaacggagggaaggtaacgccagtgaggagtgggaacggtgggaaggtgacaccggtgagaagtgggaaccgcaggaatgtaacgccgttgaggagaagtgggaacggagggaaggtaacgccagtgaggagtgggaacggtgggaaggtaacgccagtgaggagtgggaacggtgggaaggtgacaccggtgagaagtgggaaccgcaggaatgtaacgccgttgaggagaagtgggaacggagggaaggtaacgccagtgaggagtgggaacggtgggaaggtgacaccggtgagaagtgggaacagttggtgaattcgcctaaggctctaatggcagttccttgtcgtattcttgtgacttttacatatgtttgacgttgtatcaaaatggtaagttgggaaaaaccctcagagcagctcatcctcagacctgctgaacagtcttcaaagacgccaaacggtggcagccgcgtctttgtgaggctcttctggcgacggcgctggcgcggacctgccccggcaaagtgtgcgtgtcgggaggcagcacccgcccgccaggcctggccacagtgggaggagggaggtggcgcagcagccgctgggcgtcctgggggtgacctgggctcacagagggcagggcctagggccacgccgatgagcctgttaaagtgcctcacagtgtcattgcgactcataaccattctcaccgttgcttattttacgtggcacttgcttgtgtccacccaaactgcctgaccacgaacccagaaaccatgaatattttgtccccgaccgttggccgcgccctagaaccaggcctggcccaggctgggtgggtgggtgtgagggataagaagagaaatggcaggcaagtcggttttaacatacagaacaggtggccacgcgggacagaccctaaagccaaggttctttctgaccttatcatgaggctgatccttggagcgcagggaggcggccgcagggtgaacagtgccctctgtgtaggctccggagcagaatggtcatcatggacaggccgccggctgctgggctgtgactgttctgaggctgaaatgggcaaacagccttgcctcctctccacctgcagctgcaagcctggacagtcgaggcaccccgggaacctcccctacgctcatgtcttgctcgtgcatttctgagctccccggcagttcagcctcccttgtattaaatcctgacaggaagcttggattaagacctcggtagtgctaaagccgttgctctctgaacccatgctcatgggggatgaatcttgtctccccaaaagatatgttcgagtcctaagccctggttcctacaaacgtgaccagtttggaaacagggtcttcgcagatgtaaaaagttaaggatatcatgatgagatcatcttggatttagtatgggcctgaaatccggtgcctggcatccttatgggagaaaggagaggcttgcaaagatggaggtggggctgggcgatgctgaggacacccggagtcaccagaagcagaagcgccgaggagggatctccctggagcgagcagctctgagggagcgcaggcctacacctcaatcttggactctggcttccggaaccatgagggaacaagtgtcttgttttaagctgcagcccaggaatccgcctccctgtggctcaccagtccccttgggcacatcttccctctcctaatggggtaaaatcaggggcaatgtgctgtgacctgtggctttgggggtgctctcaggagcggcctggggctgagcaggcagggagcctctacctgtacctactgtgcctgctccctgtgagggctgggatgcccccccgatgctgagcaggtgccaggaatgttgatggatggatggatggagagagggatgttg

SEQ ID NO: 1884031 - DNA, 4001 bp, Homo sapiens
catagttcctggaaacagaactgtagccacaattctagtagctcattctgtccttcaagagtttaaaattttttaatgccggagctccatttgatcaccttcacgcggccctggtgggtcaggcccacctgctcgctggcagcccctccttgcctctctgtggtcccaccagtaattaagccttttaagagctgggggagcttcaatatcggtaattcaatctccccctgtttactgatctctgccattagccgagttgaaagcaaaatgttttaattaaaaagattggcaataagttggtgtaatgccataatttgcacagggccccttctagaggatgacttcgccctgcctcagttgctatgacaactaatggacaagattgttccagtgtgagaagcagcatgaggaggggacaggagtgggaagaggggcctctgcaggaggacagagctgtgaggtggaaagaccaggcctctccgtgagctccagggaggtcttgcctctttgttgccatccctgtggctggaagagtcgtgtctctaagtgcctgggccaaggttgtcatggccagtgccatctgggctcaatggtccagtacagagcagagggcgagactcagcagccattcaccctggagtgtactggggccccgcctctgaacagggcagctgtgcggcgggccaaggcagaccccgggtaaatgtcaaataaatgcccctcacctcccctcccacacaggggccaggtaaagggacgtccgcatgtcacctgcctttgtgtgctgactgtctgttgggacacccaggggccaaggtgatgtcctggagaggagctggctcgggaggcactcaggctgcagtctccttccaggactcccaggctagacagagcagaagatggcaactgctctgggtgccccacagctgatattcactcacttctctgaccatggggccagatcctcctgaagaggtaagccctttgtgggagcggataaggcgaggccttgtggaaagggaccaggacattccgagtcttgatttcctcatctgtgaaacgggaatgaaagcatccttctctcagagtcactctgaggactgacagaaaccgcatggtgggtccaacatcctctgcggctatgctagtggtgtgggtgtgccttgaggagccatggggggcaggggccctcgccagtcagctgctgtctgcacccagggccacagggcaagggtgggctctgaaagagcaggacaaacagccagaggacttggctccccgctcctggaggagggcaggtctgaccagccaggagcaggttggggtgtggggtgaagcagaaaaccaaactcgagtgaaatagaaaacatggaacagttgtgcgtcctcacactacagcactagtacatcttcacactacagcacttgtgggctgcggggccctgcaactgccagtgctggggcccggtcttctgagccacagcaccacgtgcagcagggacgtgatggctcaccccgctctcccctccaccatgagcgcacccacctttcctcaccctgccagggcaggacacacctttgggggcgccccaggacatccaggttttgaccccacaatgctcaggaaggatgacttgtgagtggaggctgggccattctggggggtatgctgaggcgtgagcccaaaggtgacaagtgacacatgagagcaagtggcaccaggtgccattcactcagctctgcttgggaagcccccctggggtggtagacagtgtcatgctctggtattctgtgctgtgaccagggccacctcattcccatacaggcccccagatcagtatctccaccaaccatactcaccatgggtgcaggaacatcagctcctctcctcctgagagtcactgggcagcgtgggggcaggcgagctggaggaggcgcagcttctggagctgggaggccgggtgctcctgcccgggagcccaagggcccgtctgacctcagagagcctccttatcagccgcggggagggcgatctatcacgtggcccatgctggtgtggaaggacaataaagcagatattgaccgtgattctaatcgggtgagctgggcctctcagccccacagaacacagcatgccgacttatgggttcagacgcgagaggagccaagcctgagcaggaacgagataagaacatgccctgggtgattcaatttaatgcaaccgtcgctcccagcaaccttgatttgctaagtgctggggagcccagagacgaaggagacagggggccagcatgttctggtctgacagcaggcacagggcctcgccctggtggggtcagaaggctaaggggatgtatgtccttgaatccactgggcagggaagggcaggggggtatgtgcagctgcctggaggaaaccccaggccccactgagccatggggagcaaggccctgaccagcacttgctgcagatggcccctgcctggagccttcccacctgctcctctgcagatgcctcccctctccctcaccaggaaagtcagggtatcccgactctgtcccgtgccaattatgtgctgtcatccagcccctgcatggccagtgccaccatgggccggtgaccgcgacaccctccacccacgagccaaccacacactctaagcctgcttgaggcctgtggcacctggtaccctgggggccagaactgttccaagacccaaccctgatctcctccctgtttaaactggcttattcctgctacttgggtctaaaaccctttgagagctgggcatggtggcacatgcctgtaatcccagcactttggaagaccgaagtgggcggatcgcttgagcccaggaattggagactactctggagaacatggcaagatgtcatctctatcaaaaaaaaaaaaaaactaaaaaatgagccaggtatggtggctcatgcctgtaatcccagctattcaggaggctgaggtgggagggtcactcgagctcaggagtttgaggccagcctaggcaacaaagtgagacctcatctccataaaaactaaaaaatttagacaggcatagtggcgtgcactggtagtcctagctatttgggagactggggcaggaagattgcatgagcccaggaggtcaaggctgcagtgagccaaggtcgtgccacttgactccagcctgggcaacagagcaagaccttgtctctaaataaataaataaataaaacccttcgagacccccacaccatcattccctcatcccccacctaacccaaggatgccctattgcccatcttcagaatgcaggcaaccctcacctgcattccttcctcaactgcatgcacccccacctgacccttcctcacctggacacattctcacccagctctctccctggcaccatcccctcagctgtcatcctccacagctctctggagacaacttcccccgtgtctcctagccctgccctgccccttcccgcagcagcagaagtttctggagtgtgcactgggtcccgctgcttgccagcttggtcttgctgccatccaccatggcagccaggccaaacccaccctcctccctcctctaaacacccctggccggcacctgcttaccctacagtctcatctcctctctcacctgtcacatgctccccacatgcagctcttgccgcctcaccaggttccttacattcaccctatctccgggcctctgcacgcactgtgccttctgtttagaagcatttatcctgcattccttttggtcaccttccttcctccatgcagaccttgtccctggggccctccctctggcccagctgcagcaactcctgcctagagttcctctctgtaacgcacttaccctgagtcaattctcgtgcttgtgtacgtgccccttgccccacaccagctgctccattcggtctcatccaccgttacacatgccacacccacagcagggcctctgaggcacccagtgccacagccacaccagctgga

SEQ ID NO: 1884032 - DNA, 4001 bp, Homo sapiens
gaagacaacaggatagtgactatttctgaaacagatgagtgaataaaaaagtgcctgggtaaacccaggagaaaacccagtcactctgcacccttctcaagaatgctgcactgtgaggaaggtatctgttgtttcttaaactttgcagaatgaaataaatgagcaacaaaatgctaatacaaatattctcttcaaagacactggtggactgaaaaatttagtattgctgagtttcttgttgtgttgtatccattaattgtggatatatcatcaaagttgtagaagaactatatatttagggtattgttagaaaaaaactaacttagataacaagtagattttgatgagttgcatggcttcctataggcaaagaggtaccatgaaactttactgaaatggaaagattagtttgtcatgatggaaatgaacctgagttggggaacggtcaatttggcaattgtgttcaatctgtgaggtagattgccaaatggttcagcttacctccaactgtgaactccatgagagtgtcagaggcatgtgcatgtcacttctgaatctccaaagctgaacctgcagatagcatatctccaaagatgcctacaccatcatattgtgctcaataaaccttgactgaaaaataaatgataaaatatctagtcagttagaccagataaaggaatcccattgggtatcagcaaaggggttcttagtcaagatggtatagcatgttcataacaggacactccccttctctttcaaatacataaaagaatatacaacataaataaaaacataaagagggataaaaaggcaaagtcaagttaaaaaataaggtaaatacctatatgaaccagaaatggaacccaagcacaaagtagagagtgaagctgaagacatcgaatgcttggctgtccgtttgaaaacaaagcagtagagttgggagttttgctcttctggatacacaaagtaaatgcactctttgtgggatgtggaaatgggcccaggcccaccgcttgcatgtaactcccagagatcttcaccagaagagtgattcagagtgccctctaacaagaagaaaagtgaacccaccacaatctaaatgtctaggtattagtcttataggcttagaaaagtgatttcttttctaatatagaagcaagtttttctatttctaagaagtaagagctataaaatatatgagtcagatttatatacagcacagtagtgttgtttagtatatgctcatttatgaaccagttaaaattattattcccagaatagttaattactatttttgggagaaactgagagtaaacctgaatttcataatgaaaacaaactgaacaatagatgacagaagtgttcaaaacaaactgtaaaaattctattggattctaataataagcagaaattataacaatagcttgttataactgtggcaaacaataccagcttcctaaagataaatggcatcagcatttaaatggtctttagaaaatccaacattttgaaacagttaatactttgtctacaacttcatttttaagtatgctgttccttttgtcttgaatgtctgacactgctattcatacttcatgacctagttcattagtttcttttatatgtatcactagaaaagtgattttttttttaaaaaaagcaaatttagaaagaaatcatcattcggatgattcagataaggcaagctcccagacattacgttaaaaacctccaaaaccctagaatgcaaatacagctagaaataaccaacacactttcaaggggctctctcctttgttggtagatcgagtgtcccttatctgaaatgcttgagaccagagatgtttcagactttttcagattttggaatatttacagtaatattactagctgagcatcactaatctgaaaatttgaaattcaaaatgctccaatgagcatttcttttaaaagtcatgttgatgcccaaaaagttttgcactttagagcattttggatttcagaatttggagtttggaatgttcagctgtactacccaggaaaccaattataatcagaagtttgcttggctagtgtggaatcagagcaaggggaattagttatataattgaaaagctttatggcaagcgttggcaaacttcttctgtaaagggctgggcagtaaatatttcaggctttgtgggccatataacctttgtcaagactactcaactctgatagtgtagtgcaaaagcagccatagatgatgtgtaaacaaatggatgcacctgtggtaccaataaaactttatttaaaagaatgggattcagccagatttggcccatggacagtagtttgccagcccctgttttgtggcattaggtactaaatgtctgacatttccactatggtgaaatcagatgttgtctatgtaggtgaatctcctcacgttcttgaatcaggactctctctctcttagttgtacagtgtcaaaattagtctctgcgattagtctttttgaggtctctgttttctttaggtgggataattttcccatttagattagagtcaaatgttattggtttaggaggctttctgtcttaaggtaactttgcacatctgtgtttcagttcccttagagcttaactctcagaggaaatcttatgtcccaattccatactggtccttggttccccttatttcaccgttctccagaggtttcttattattgcccaacattaatcctgctgtaataacttacggtatggatctagcgaaaagagaatgctgaggcatgggtgtcagttggtgttcaatctgattatttctcccaggtgtgtagttccaggaaaactgcctcaaactttttagcccctagagccctctcagtcagtctggaacacagaaataccttcagctgaccacacattttaaataaatcacatgtaaagatttttttttcacaataactgcttaaatgtttgttctgattggtagcctctggttgctgtcaatgtgttaccttagttaattatgtaagaggggccatttctcatctcagatggtaccatggtttattttagcaacttgcagtcgaagtctggctgggtctacagcagcctcagcctcacctaggagcaggtcagaaatgcagactctcagggccccagacctactgaatcagatctggatctatcttaacaagatttccagatgattcacaattattaacgtttggaggtcctgctctgacttatagtgcatcttaatgttaattcttaatgttagttaaaaaaaaaaaaagacatctctgagtggcagaatcaggaaatggctataaggtttaaggataataggtttaatttctcccatattcttgtgctcttgcatagggcatgagaatatataatgcccctgattggcatcgtcatccccatgccaatttggaccccaaattgatgagataggggtttgagagaactaaaagtgaaattccagttcatcaacaaccttgtttttcaaagatttcttaaaaaacttttttcattggtagcttgtgaaattctttctccatcatctcttttacataaaatattgacaaactgataataagtcttattcctttcagttccttgaaaatctgggcttttaccttctaattctgagtgtggtaaaactcacatgcacagacttttaaatactcacacagcaatcccaccagagtgtaccttgactagccttcacatgtgacacaacatggatcacataagatatagatgaatgtcctttgtgaagcaatgtctgactgtaggatgtagaatggtttggctgagtttggagacaggaactagagatctgattcttggttttgccatattaaggctgtgtgtcttatgacaaaccagttttcccctcaaattagtaatttataacaaattaatctactgtgcttttgaggtgggcaagaattttttaatttaattaaattattttttttaaaaaaagcttcctaagtgactgta

SEQ ID NO: 1884033 - DNA, 4001 bp, Homo sapiens
gatccagtttcagctttctacatatggctagccagttttcccagcaccatttattaaatagggaatactttccccattgcttgtttttctcaggtttgtcaaagatcagatagtcgtagatatgcggcgttatttctgagggctctgttctgttttattgatctatatctctgttttggtaccagtaccatgctgttttggttagtgtagcctagaagacatgattgtatatctagaaaaccccattgtctcagcccaaaatctccttaagctgataagcaacttcagcaaagtctcaggatacaaaatcaatgtacaaaaatcacaagcattcttatataccaacaacagacaaacagagagccaaatcatgagtgaaatcccattcacaattgcttcaaagagaataaaatacctaggaatccaacttacaagggatgtgaaggacctcttcaaggagaactacaaaccactgctcaaggaaataaaagaggatacaaacaaatggaagaacattccatgctcatgggtaggaagaatcaatatcgtgaaaatgaccatactgctcaaggtaatttacagattcaatgccatccccatcaagctaccaatgactttcttcacagaattggaagaaactactttaaagttcatatggaaccaaaaaagagctcgcattgccaagtcaatcctaagccaaaagaacaaagctggaggcatcacactacctgacttcaaactatactatagtcaggattttaaagaaaggacagaaaaagacagaattttccatatagggagggacaatatggataaatgggaggagatgctaatagtatgttgtttagggatgatggaaaaagataagaatgaacaaagataaagaaactgcaaatgtgtacactgtttccaaaagtagtaatggcaggaatactttttgtgttgcattgtagtatcttgtattgatggaaatctctagatctagtttatggtgtacccagtgtgaacctggctgagatatttgactctcaaagtctcctcctccaaagtagaccagttccactttgggcttaaagtgatgggaagctgaggcaagacagaatgaaggccctgagatggcaaccaaaacctccacaaacagcaggaaaaaatggaaaatggggaacagaataaaggcagagacacacccgtctctgcttgtccttctacctggatcccaaggggctacctctccactctgaaaaccaaagaatcacctctaaagaaatttgtatgtgtatgaggatcaacctacagaacttagcactgtaaaatattgttgaagtggaaactggaaaccacattcattttatttaaatctaaaatagagaattatatttttctcaggattttgtattggatttaatgggttttgttttttgtttgtttgtttgattttttggtaaatcctggatagcttggaagatctacatatgatgaacatgtgcttttttttctggtttgtaaaatcgaagaaataacatttttattctttctctttccatcccctgactagattagtattgctcattaacactgttctggagctgtagttagttctgaggtggtatttgagtatggtgtgtgggcactcatgcaggtttatctgctgaagttgcttgcattcctagtggcaagtggaagcaaagcttacatgggagagtcttctggttgctgtgctctgcctacttcttatagtaaggcctcattgctattggcagtgaaaggtactgccagactttatccaaaatattagtctaagcatcacaactacacaggatattcatgtacacaattagtacactggaaatatagttttcttaaatcaccctatatagatttctcctacctttcatgaaaagtactttaacttctctctggggctcaatagcttccctgccctcaggctgtgttctttcaatgtggccgatcccactccagttccagacatgggcataagacttaagcccaagccaagaaacacatttcattcccttgactataaacattgtggtgagggtagttatgaaatcacagtggggccagtttgaaccaatcagaggagagattgatcagaaaagagaaagattttttttaattgctatttctcttcttttttcctggatttaatcctgcatagagtaggagaacctatctgagaatgaggccagcacacataatgggagaagatgactggagataaatttcatggatgatatcatttgactactaagtcaagctatgcatgaggataaatgttatcttggacttttttaagttttattacaaaatatagtcttattatacttttggcatcaagaacatttatttgtttgcatattttcattttccacttatgagtgtcctgatgctaatttttaataataaaatgcatttgcttcttccaaagtttattagacatttcagcaatatgacatcattcttttggctagatatcagtacacagtaccattttactttagttccaaatcctttccatctccttcatgtatttttctagtgaatgacctataaacaaacatgtatagtgaaaagactgccacttaaagggcttctttgtttaatctcaacacacagattgttttgaaagttgagttttgtcatctaatacattactatggtaaaatatggctttcatatgcttgattttctaaagcatgtattcacctataagatattctcattcttgagtcctacttggtctactgatgcttggtccactggttttagtataaaactaaagacattaggtattattaaaatataataataccaacttattgaaagataacgcctcccctcccctcttctctcctctcctgcccttccttccttccttccttccttccttccttccttctttccctccttccttccttcttgtgagggtggggtattgaagggataaaatgcccagaggaaaactccaagatgggatgggagacataggtccaatatatcagaaggttaaattgagtgggcttatgagagaagcaggagaaagggaggctagagagccaataaaacaaagttcatagtgataactggaacagaatagacctcaaaggcttaaagatgtcaaagtccctgcattttttcctaccttcagaatctaccaccttcagtcatggagaagtcttgatgaagttacccaatctataacaattctatgctgtgcatgctgattgaattatcttcatcaatgcattctgttttgcttttatcttttgcaggtaacacagtttctcactcattgaagctcctccaacatttctagaaatatggagtacaaaaagaatacgtaggttttgttaattctatagattgaattagaactcccaaatgatttttcaaatgaatatcccctctcaaatcatttaactttttaaagaggtaatttcactctccaattagtattttctagtaattgtacttaaatgtctcataaagtgctcagtaaatgttacttcagcttttactacctcttgctagaaacagtttctcttcttttttattaggaaccagcatcctaactaaccagctccttcagaatgagtttactaaaggatatattttctaaggaatatccacattgtatatttagggttcatgccaagctgttattgttgtatgccttaactgattactaaggatttattgctagccacttcaaacacatactcggtagtgtcctctccattggccaacctgtttctccgaccttccatctacttgaaaacatccatgactgtacatgactctatcaattccctgggcaggggttggggggatttactgatatatgttcttttgctatttattgaatcctctcattttgtttagtattgtcctggatgttacagaggatgtaatgactaaccacataagaatactgtcctcaagaaatatacagtctaatagaaagaaatgaagaccaataa

SEQ ID NO: 1884034 - DNA, 4001 bp, Homo sapiens
caatcagtgctctgtaaaatggaccgatcagcagcactgtgtaaaatggaccaatcagcaggacgtgcatggggacaaataagggaataaaagcttgtcaccgcagccagcagtggtaaccagcttgggtccccttccatgctgtggaatctttgttcttttgctctccacaataaatctctttgttgctcactctttgggtccacatcacctttaagagctgtaacactcactgcgaaggtccgtggcttcattcctgaagtgagaccacgaacccaccagaaggaacaaactccagacacaccaggacctcaaaatgtgaccttatttgtaaatggagtctttgtagatgaaattgttaagatgaagtcataagtgcgggctctaaatccaacatgaatggtgttgttataagaagaaaatttggccagccatggtggctcacacctgtaatcccagcactttgagatgctgaggtggacggatcactggaggtcaggagttcgagaccagcatggccaacgtggtgaaaccccatcgctactaaaaatagaaaaattaaccaggcatggtgatgcatgcctgtaatcccagctactcaggaggctgaggcaggagaatcacttgaacctaggaggtagaagttgcagtgagccgagatcataccactacactccagcctgggcaacagagcaagactccatctcaaaaaagaagaaggagaaggagaagaagaaaaaagaaattggacacagaccaagataaacagagagaaggccatgaaagagctgaagtggagatctaagtgatgcagccacaagccaaggattgacagctccaccaaaacctaggaagagataaggaaggaaggactccctcttatgggttttggagggaggaagaccctaccaacaccttgatcttatacttctagcctccagaactatgagataacaaattcctattgcttcaagccatctaatttgtggtacttgattatggacctgtagcaaaccagcacacccaccctcccgcatggcctccctgatccctgagacaaaacaatattgaaattgggccaatgaagaaccttatattggcctctaagtgttcaagtaaaaggaagagttgcacttgtctcactttaaatcaaaagctagaaatgattaagcttggtggggaaggccagtgctgcgctgcctgggagtggagggggacctgcctctaggctcggtattcacaagcacacttggctgtcagccctaaagccacattctccaactttgctctttttaacttgatattttaaccctatctgtctctcttagtttaaattttcaaattctttatatccccagcaaagttgagaatgacatttattgagagcccttcaaaaacaccaacctcacacagctaaataaggtataccacacaaccctccacactggggggagtctcttaggagacaaaaattatctttccaagtacacatttcttgtcctataacttccataggtattccatacatttttccaacaacatagctaaatggaaagttgttgaaagaaataaagttaatgaaatcgagaagttgttgaaataaagaatgttgaccacagctgtcatactatgatataaatcctaatgtttaggttaaacatagtactataattggccttaggacagaaagaactgttttaaaacgagaggccaatgttcagtgcactgtggcaaccacagacaggaagacagccctggccaggcagctgcgaactccggcaacttactgtaacatccgcatttggagatgaggatgtggggtcacaaaagtagcaaagtgcagagctcattttccatttcaaaatccagttatttttctaggattccaaattgttatcgtgaaaatgcttaactcactgccaaggaaagcatttccattttacacggtacatgtctcatttgcaaaggtttgcttccctgatcttgctgcagcctcaggagataagaagcgcacagctcgggctcctgattgggccaaagcttcaggacggaatcagggacatttaccaggaacaaacagcccagcttatacactggccacagtgaaggtaaccagtgggggaatgagagtacgttgcattctgctgatttttaagttgacctccactctttcttcagaggcatcttccttcacaaactgggttataccattgttcattgctctgcttacaggggcctcttgcatctccttgtctctgatcctggaaacaagttctccaggcttttacatctggccacagactgtgtgaagtgtgagcagctggaggacaattctattatctccagaagctgctcctccacccacagaatgactctgaagcctctagggaggcatagcaaatgcatttccctactcctctatttccaacataaatcacaatgggtggcactacatgcacactatacttcactttcggagctgcatagagttcccaagtcagctaagggcatatcttctgtgttgtgcatattttatttattttattttattttattttattttattttattttattttattttatttgagacagagtctcactctgtcatccaggctggagtacagtggcatgatctcagctcactgcagcctccacctctcaggttcaagtgattctcctgcctcagcctcccaagtagctgggattacaggcgtacgccaccacacccagctaatttttgtatttttagtagagacgaggtttcaccatgttggccaggttggtcttggactcctgacctcaggtgatccaccctcctcagcctcccaaagtgctgggattacaggcatgagccaccacgccgggcccatactttagcttttagaagtagatacacttccaagaaaacaattgtttgctcagctacaggcatgcctcgttatattgtgccttgcttattgctctttgcagatggtgcactctttacaaattgaaggtttgggcaaccctgcatcaagcaagcatcttgacaccatttttccaacagcatgtggctcacttagtgcctgcgggtcacattttgataattctcacaatatttcagactttttcattattataatatctattatggtgacctatggttagtgatattgcgcattactattgtaattgttttgcctatgtaaagcaacaaacttaatgtgtaaaggttgtatgcgtgtctttggttttaccgaccagccattcccccatttctccctctcctcaggcctccctgttatgtgagatgcaagaatattgaaattaggccaattaataactctacaacggcctctgagtgttcaagtgaaaggaagagtcacacatctctcacttgaaatcaaaagctagaaatgattaagcttagtgaggaaggcatgttgaaagctgagacaggctgaaagctaggcctcttgcaccagccaagctgtgaatgtaaaggaaaagttcttgaaggaaattaaaagtgcttctccagtgcacacaggaatgataagaaagtgaaacaggcttgctgctgatagggagaaagtgtgagtggtctggatagatcaaaccagccatgacattcccttaagccaaagcctaatccagagcaagaccctaactctcatcaattctatgaaggctgagagaggtgagaaagttacagaagaaaaatgtggagccaaatttgctcataagattgagagaaagaagttgtctccacagcataaaagtgcaaggttccgaagcaccaagtgctgatggagaagctgcagcaaattatccagaagatccagctaagatcattgaagtaggtggctacactaaacaacagattttcagtgtaaacaaaacagctttctattgcaagaacataccatctagatctttcttagctagaagggagaagtcaatgacagacttcatagcttcaaaggacaggctgactcaaagttaagtgaagggttaatg

SEQ ID NO: 1884035 - DNA, 4001 bp, Homo sapiens
ggtagtttgctgcacagatcaacccatcaccaggtattaagcccggcacccattggctgttcttcctggtgttctccctcccacccgccacaggcccccgtgtgtgttgttgcccccgatgtgtccatgtgttctcatcgttaagttcccacttgtaagtgagaacatgcggtgtttggttttctgttcctcagcagctactcttaattaaatatttcaatattcatttatttaaacatcttttcaataaacagtcaaggtgtgtccactataaactagacctgaataaagatgatactattacttttacagattcctggaactatgaaaggtaacatgaagttataatacagcaccatcttaggcaaatgcaaggttgtatttgaggcgctgtggaaataaggtagatgaactgtgtctcagagggattgccaaatgctcaaatggattgggaaatgtttttcaattaacatgtaaattgaaaaacacttgaaagaaatactttcctgcatcatcaaataaaaattcctctcagatttcttcctctgtacatctcaatttggaatgatttaccagtgtttgggtatgctttacatacaactttgttaaaattttgaaatatagattaattagcttattcagtaaatattcattgaatgaatgttatagcactccttgttctagcccgacacagtgcacagaacaagacagtctagatccttgtttttatgtgggatggaaaacaatgaactgaaaatgttgtgatgctgaaaattacataaagggaaagaacaaagtggtgggataaagagtgagtggaaggaggtggaagtaacattaataaaattggtactgtagactgagtggtcatgaaaaaaaactgtaatgataggaagtaatcatgaagtaaaaggaacatttaggcagcgggaagaacagataggacaatatattgacatgctggaaaaacaaagggctggacaatatattgacatgctggaaaaacaaagggctggtctagagaagggatagtgaacgagggagagagtgaggtagcagatgaaagctggagaggaaaatgggggagaggctatactgaggaagggaggggatattaggagatgaaggcatagacataaaggagatcaatttgtaggtgatttcaagtactggtaataattttagaacatactctatttagaaggtattctagttttgcttaacccatatgcagcatttgaccttgttaatttctccttcctcatggaaaccctttgctgcttggctttcagacaccacactctcctggttacctccatcttcactggctgccccttctcagtctcctttgctggctcttcctcatcttccagtttacaatggagtgtctcagggctccgtcttcagacttcttcccttttctatttacattcacttcctccatgatctcactcagtctcacggcttcaaacaacatctgtaacagaatgactaccaaaattatatttccagcctctacctctcctttcaaatccacatttaaacatccaactgcttacttggcatcttggcttggatgtgcaatctgcatctcgaatgcacccatcctaaaaccaagtttcgtgatattctcccctaaatctcttcttcccttagacttccttattttaagtaatggctgttccagactttcagttgatcagactaaaaaccctggatccatccttgctccctctgtgccccctcctcacagatgctgagcatgttttcggctcacccagttctaacatttcacctaaagtagagcagtagagttctaagtggtctccccaccttggcctttgttccccttcagacaatcctcatcgcagtagcctgtgttccttctaaaccctaagccagagcctgtctcttccctgctcagcaccgtactcagagtctacaaggactcaggccctccctaacctagactctgtcatctctctaacatcatcttgaattctccccacctctctcactctgcttcttgctgttcctgcacttgctttttctgctccgtggaatgctattaccctcaaactccacctcctttctgactcaccttcttcaggtctttactgaaaaggcatcttcacaataaggcctttgctgacaaccctattgaaagttgtaatgcctccaaaccccatctccttgcctagctccctgctttatttttctccaaagcatttatcactatttaacatgctatctgattcacttttttttggtttattatctatttcccctcattagagtgtaagttacatttggcagggatttttgtctgtctattcactgccatctccccagcaatgagaatagtgctaggaacatactaatcagatactaatatatgtcaaattaaaaagtgggaatctgtgcaaaaacttaaaagcaggaggtgacaaagtctgactgtgctttgagatgatcattctgaccactctgtagagaatggattgggtgcagcaggggttggagttgaaaatgtaaatagaaacaccatttaggaagcaagagcagtagtccaagtaagaggtaatggtagctgggactaagtgatattagtagagatgaggagaagtggatgtgtccaaaatttgtttagggggctgacttaataacatttataattactttacagccagaatatatctggttatttctatgttgaacacagatatacagcttctcaactctgattgctttttctccttatacaaagaatactcaaatgaatgctaataaactggttcttgttggagagagtttaggcaatgatctaagatgattcctagattttcagcttgaattacctggtaggtgaaggtatcatttactgagagagagataagggtaggaaacaattttaggaattatttcatttgaggtacctcttagacatggaataaatgagaaaaaggcaatcggttatataaacataccctacagtagagaggtcaactatagtgatacaaatttgaaagtcataatgtgtaaatggtttttaaaactgtggaactagataagctaatgcaagaagaaaatcaagatggaagagaaatgagggttctggaacataccagcatctagaaattgaacagaggagtccagccaaagaggctgagaaggaacattctggaagcatggcatttattgagaggaaattttattcccctcattagtaaacatgaattacaaaaaatagtaattattgtattttgaattttgtatttagaaaattttgtatttagaaatgtatttagaaatgtatttagaagatttgttttttctcattatctttcattttgcttcttcccacaaagcctaaaaggactaaaatatttgctattttgtcctcatagaaaaagtttgctgaccctactttagactattttttttaacacaaggtctctgtcactcaggctggagtgccgtggtatgatcacagctcactgtaaccttgacttcccaggctcaagcaattctcccatcccagcctcccaagtagctgggactgcaggtgcacaccaccatgcctgcctaattaaagaaaacttgtagagacagggtctccctatgttgctcaggctgttcttgaactcctggcctcaagtgatccttctgcctcagcctcccaaagtgctgggattacaagtgtgagccactgcacccagcctagactaattctttcacattgctgaaagataaactgagacctggaaattttagcttgcttttcagggttacccagaaggagatctatgactcaaagccaggcctgaatgtctggttgcatttctattccaatatgccattctgtatctctgttgtgtacacaataggctagcaaatatttatctcataaaatatgacagaaacttaattatattattgaaatgttttttcaataaaatacttaataaatgcaacaacattccaatagcagaatatacttg

SEQ ID NO: 1884036 - DNA, 4001 bp, Homo sapiens
ccagcacctctgaggcacttggtctttttgagggagtagaaggagggtagagaaactgaactcattagttggctttaaaatctattacttgtaaaatggtgcagccactatggaaagcacaatggcagttcctcaaaaaaattaaaatatgatccaacaatttcacttctaggcatgcatccaaaagaaatgaaagcagggacttggacagatatttttacatcatgttcatggcaccattattcacaatatggaagcaacccaagtgcccattgactgataaatggacaaaatgcagtatatacatacataccatgcaatattattcagccttacgaaggaaggtaactatgacacatgttacacatggataaacttaaagacattatgcggagtgaaataagtcagttgcaaaaggaaaaatactgtgtgatactacttatgtgaggtaccaagagcagtcaaattcacagagacagaaagtggaatagtggttgccaggggttgggggaggaaagaatggggggttattgtttaaggggtatagagtttgtatttgggaagttaaaaagttctggagatagatggtggtgatggttgcacaacaatgtgaaggtacttaatgccgctgaactgtacgcttaaaaatggttaaaatgggcaggtgcggtggctcacacctgtaatcccagcactttgggaggctgagtcaggtggaatacctgaggtcaggagtttgagaccagcctggccaacatggcgaaaccccgtctatactaaaaacacaaaaattagccaggcgtggtggtgcacacttctagtcccagctacgcgggaggctgaggcaggaaaatcacttgaacctgagagggagagcagttgagatcgtgctactatactccagcctgggcgacagagtgagactctatctcacaaagaaaaaaaatggttaaaatggtaagtgttgttatgtatattttatcacaatttaaataagaataaaagaaaagaatctagttttcctaactttttcttcttagagtagctctctcctgtgttccatgtgtgaacacagtctctgccagtggtccacattgtacagcaggccagatgcaatgcatgtgtacgacaaaggggtcatgttccagattgagtttttgtttttctattttataataaccccataacaaaccctttgcttccaggtagctttacgcctgctggaatctatttctttgaaatggaaagtttcaccacagtacaagtgtaacattttgtctttgctccttgaaatgttgtaagccacagtttaacaggcaaacaatggtggaggccaatgaaattacccttggacaaagggtctgctgagcagtgtactcttgcctctaccatcagtttccttcatgaaatgagccaaacattgactgaggctcagagtggaaaagaatttgtccaaattgggctctaatgataaagaagtataaaggaaaaaaaattccttgggaaaattgatgctgctcccttcagtttttgtagactatttcctataatctgccttgtggcttaccttgcactaaaggaaagcaatcctttcctgttaacataacaaataaagacaaatcagcaggctacttaatgtgatggtgaagcatgggctctgaagtcagtctgcttgtatcccagtcttacctctagctgagtgatctagggcctagttatgtaacctcagtttccttatatgtaaaacaggatgatagtaatggtatcgaccccatgaagttgctgtatggatgaaatgagttattatttgtaaagcacttaaagcagaatgtggtacctagtgtggactatataaatactcactattattattagctccagcatgcagagataaactctccagggctgcttgaagggtacaatggcatcctcattactgactcaggatgatgtgatggagcatgcacttacaagagttggacaactcatatttcagctcaggtgcaaccatttatgcactgtgtgacctcaaacaagtcacctgaatacttgagcctgagtttcatcactactagaattagcagtaaaagaaactgcctttttcagtctcttaatgtataactgtatgcatgcaagttgtaaaggctgtaatatttctgttagaattattatctcttcttctctgtttcttttacctctggcctgaaagaaagcggaaagaaagcctttattttaaaaacataatagatattttaaatgatagaagtggtatatatttaatatacaaaatatgaaaaataaggaaaagtatcttaaaaattcattattttacaccttagaaaaagccactattaacgttatgctctttcttagttacaataatgtgtcttaatgcttaaggtttctgtgtagttttttctcttctctggggcaagatcgcagttgagaaggcctatatatgaaacaaattaaatgctcttgattttttaaagcttcattttgtataagaaaatggaagattttatgttcagacttattgctacaggaagaaaatgataataatttggctatgtttacaatgtcatatgagaagtaatttcaaatatgcctaattccatagtataccaaaaaattaaaaatggctttaatttaatgtattttatttcactaatactatgtacacctgggtaaagaagataatgaattataaagttctacagtaaggccaggcacaatggctcacgcctgtaatcctagtgctttgtgaggctgaggcaggaggactacttgaggccaggaatttgagaccagattgggtaacacagcaaagctccatctctacagattttgtttttttaattagcagagcatggtggtgcacgtgtagtcctatctacttgggaagctgaggtaggtggattgcttgagcccaagaatagaggctgtagtaagctatgcatattccattgcactccagcctgggtaacagagagagaccttgtctccaaatcaaacaaaaataaaaacaaagtcctacagtgtttgcatgtatgaccttaacaactgtaaacaaaaataagggctttcttaaagtgaggctatttctctacttggaagcaatcaatccaaataaactcatttctggagaaatgagttgtcggtctgtgttagaaatgaatttaccaaggctgggtcatgacagtagtgtggttcaatttctccattgcttatttaaattgctattggggtgagaaagccttgggaaaagctggcagaagacttggaagaatctaggtgacttcctgccttttaatagtcacatattacttcttggaaaaactggcactcatactcttccccatttgttgtgcctcaacctccagccatccattcatccttcccttccctaatcccctctctctattctttggaagtcacagaagttttatattaagcatcataattctccacaataaacaaaagtattaggcattttcatgaaataatcattagtcattggtattatttttaccagaattaaaaacatttccgataactgaaaattatgatttggtaagaggtaatgtctttgatcctccctgcaatctggctttactggtggtggtaaatgaaacaatcctcttgccctgctataattgtctgctatattatattctttcacggaattgtagctgaagagaaagtagagatcattcgctgtggggaacatattgaagatcatagatggacctcatggtaaatatttttccaaaacctgcaccttttcagaccagtaacagaccgacggatgtgaaatggatattctttttaacatggatgttaaatgtttaactgaggcaatggttgattgacatgtgtctctgtacatgagaaacaaagaaacctgcttttcttgtcccaagccatctcctggaagcctttgctcagttcggttagtgcccttaggtcaaacaaacagaaaattaagaaaacaacattca

SEQ ID NO: 1884037 - DNA, 4001 bp, Homo sapiens
atgaaacttctaggagagcaattaaaaaaatgaaaagattcacctgaaatgttttggctatctgagttcatcacaggatgattttttcaggctttaatagaaaaatctcttctgattgtagtgttacattgttacattttgattagaaagccacgataactttcaacttgtttgcagccttggttacataattaaatgacaatttgaaaagttgagagacaacgggataagcagtggcatttacaactaaaattatccattatctgcctatatttatatgtgcattaagcaatctttgtgtagacaataacagctatgagaacacttaacagttttcaaaaaattgtcacatttttcatttgataatgcatttattgtaatggctagcatgtggttttccttaaaaaaaaaaaaaggtacagacgtttaggcatctatacagcacttccccttcaaggactttgccaccatttactgatgatctttaatcatagggtgggggagagagcttgtataaatgtatgaggtgatgaaagggtaggaaggcagatacactcgattaaaataaaatcaaacgcttccatggatgcagccatacttactttatctgacagtaattagctaaactgtctggaacgaaaacctattattagtagagcacagctcgaggatttcaaagatctacttttcagacaagagaatgcaaatgccccagaaggcgatggtaactggataggcgttggaaccagatcccactctgataagagactcctgcggagcgactgctgctgtacaactacggctctcgagttctcctcctttcaggcccgcggccgtcgagggtacaggctgcgcgcgcgggaaaaggaggccacctagatgagattggcctggcggggatccctgcggggaagcacgccactggggaaccagaccaagggagtctgaacaatactgagggggtagctggagacaacccaaactcctgctctgggcataaaactcagatcaaccttagggatgcggtagcggatagaggttttccgcaggctggaacagcactacactgggctgggtatgaggaaaggaagcggcgataaggtctaggcgccgcccgctaggccccttcgcctggaagtcctcacaggccctggtggcctactgaggagcaacctgcccagggtcctcaagagacaaccgcttaggcctggcgcaaggtacctggcccgggagcggctggggcggcggaatttggggtagaggggcacccgtgggccggctggtggggaggagacagccccctgcatgagctcacagaggcgccctggtgggctccggcggctgcagagcgtctgtgggcgtgtattggcgatcaggcgctggaggggcgctttgtcctggtcgcagttttaagacctggattgttgggctagatttatgaaaggcctaggagcgaagcgagatgggaagcaagggaatgtaacaaggagaaatgcaggcttcggttggaaactggggagagagagattgtttcgatagcctttctccttttctttttccagaatcatgaaatcaccgaggagaagaaaactggggactagaagagagcagaaacatttcccctgagacagttttgccccggaggtggggtggggaagtggcgctggagctcagcttcctgcttttatgctcggcggccaccgtgatgcacacacactcgaggtccgccaccccgcagtgccgtgcacccctctgcccccacctcggaatttttgtgcccgagcgctcgggatccacggcaaaaccaggcacattcctccctctgcagactcaccgcctggtttgtagacactggtctccgcctggggcgtcaatagtttcaggatttaaagcagaaagacaccgggcgcccctgtggctgaggaatggcggttccagcacaagaccctgcccacagagggtctctccctactgcctgcgggccgccgctaccctaagtactccggggcgcacgtggcccgcgcggcatcccagctccccgggcggacccaggggctgcctctccacaacagttccgctcccttctgcagagccccgcctctcccacctcccgacaggctgttctttctcccttcaaccttgggcacccactcctgtcgccgttgcgggacccgcgtggcagccctccaccctcgtacccactcccagccggtgtcttatgccgctcggaggcaatgtccaccgtccctgcacctttcacctgccccttccaggtgagacgggtctctttcagctccgccatcctgaccgccaaaaaatgcttggattggctggggccggatgaggacagccacggttgagctggaaccgttccctatttttttaaggccagcgctgcacacgggtctttctgtggccctcaaagcagcgcccgctgctcctcactgggctaggcctggtagcgagcaaatgcctattgtgggagaagatggtcccagagtttccagctcagagtttccagaatctgtgggggactgtatagactcccccagaaaacaaccagggcctcatgaaggtgccagaaggcgtgtaggtagagaaattttaaaagcctgtcggagaggcaaggcctacattcaggctcctgatttcaataggtggaaaagaaggctgccaaggctgggtcacctcccttgtgaggacagatcctgctctcagtatgtgccacactccagccacgcaccaccaatgcagtcaacaaacactgcttgacctcccatacagaaaagcagtcgttgacacgtactgagcgcttaacacgcgtgaggccgtgcactaagattctggcatgttttgcctcattcaaccctagcaacaaccaaaaaaggtattactgccttcgttttatagacgagaaaacagacttagaaacgccgaagatcacacactgactaggccaagcaagagctgtcgaataccaaagtttagtcataactctatcttcctttcacatactgctctgtgcggctgctgccagggatacaagggcaaaagcaaccccgggacactgccctcatggagcttacagtctaactggggcgaccaggcaggcacatacagctatagaattaagtgggaagtgataagtgacatgcatgtcctttgctaacacaagctgcaggttcagagcctgaaagaggggacttccggctagacgatctaggagctcttccttggagaacagtttccactcgtggaggctaagtgtcagaaacatgttccaagtggagagaaagcttgagcaaaggcaacaagttgaaaaaggacatgtcgcccacccatagatagataaaacactgcatctcctcgtggatccagcgcccagtatttacccgccaggaagttttcctgccccgcgcagcagctgaaaaaaacacactcctggggcatccttccctggcgttggttcgtggacagcaagcctcccagaactggcctaggtcgggaaggtgcagccacgcgggaatcaatggttcaggaaccggatctgtgcagcctcgcccgcagcgtctcggacttcaggactctatactagtccttgtctatttctggtagagccgcaacatcccactcgcagagagcagggggcgtggcccacatgagccagaacctatagggagggaggttggggcgccagccccgcccccccaacgtgacgcaaatctcccggacagaggcttaggagcccgggccccagtccctgcagtggctgtaacaaaacccagacccccaggtcccggccaatggaggcgatttagactggagtgggaccgcgtctgtcaaaagcccgactcggcagcagcggcggagtccaggaggagagctggagccgccgcgctgcctccccgcccccgccgggatttattatttggactggacaattaagtggccctgatgatgttaccaagcccggtcacctccacccctttctcagtcaaaga

SEQ ID NO: 1884038 - DNA, 4001 bp, Homo sapiens
gctttaaaatgaaagagcataagacatggacaagccaggccctgctcaaggaatttagagctgctgtacagaccaatctcagccaaacccaccaaaaggtttatcttctctgtagctaccttaaaaaaggttcattcattcaatgaattgctgtgtgtcagttctgtgttatgggctgggaggagaacaggaataagagtcagggttggggccaggtgcggtggcttatgcctgtaatcccagcactttgggaggccaaggtgggcagatccactgaggtcaggtgttcaagaccagcctggtcaacatggtaaaatgccgtctctactaaaaatacaaaaattagccgggtgtggtagcacatacctgcaatcccagctactcgggaggccgaggcaggagaatcgcttgaacccgggaggcagaggttgcagtgagccaagattgtgccactgcacacaagcctgggagaaagagtgagattccgtctcaaaaacaaaacaaaacaaaacaaaacacaacaacaacaaacgagtcagggttgctgggcgcagtggttcacacctgtaatcccagcactttgggagctgaggcaggaggatcacctgaggtcaggagttcaagaccagcctggcccacatagcaaaaccccatctgtactaaaaatacaaaaaatagctgggtgtggtggcacttgcctgtaatcccagctactcaggaggctgaggcacaagaattgcttgaacctgagaggtggaggttgcagtgagccaagattgtgccactgcactccagcttgggtgacagagtgaaactatatctcaaaaaaacaaaaacaaaaacaaggaaaaaagagtcagggtctagtctagtaggggagacagtcatggagcaaatatttcctaagtgatgggtgttctgcccagggtattgggagactgctggcacaataaaaggatcagacttatctagacgtcaggaaaaaccgaagagtgagtaaaatacagccaagtaaaaagtgaggtagaggaagtgggatttacttaagctataaggcaagttcctgttagaaactaaaaaatgcaatgtgtcagataaggtagaagttctttctgtctcccataatggtctagaggaggataggggttcaagaccagtggcggcctggctccaggaaggcagaccaaaataacagtggatgacccaagacagagatgtacttctcttttccacgtagaggtccagaggtagagagggcaggtttggtgcagaaactgctccatgaagttctcaggaaccgtatctaccagggctcaaccagggaagtagaaccactgcaaatatcatggaatgaatgattattataggaatgagattttacacaattgttggaggagacggagaagtagaggtcacaaagggagttgtaggatggtgggaaaatcacttatcggcccttggaaagcactggttgggggtggaggggagacaagctggagcttgctggaaaatgaggaagataagtttatcttgcttcctgcagtggaagagagaaagggagccactgtaaaaagtcaacagaagattgttgcttcttcatagattctacttctgtgagttctcacctggtgtctagtggtaggcctctgctggtgataagagatgtcagtgaggaaaaagagctgatcacagagtcgggaagaagagtaagaacgaagtagagaccaggtgcagtggcttatgcctgtaacacagcactttgggaggccgaggtgggaggatcacttgagccgagaagtttgagaacagcatgggcaacaaagtgagacctcgtctctaccaaaataaaaacaaaaaaattagccaggcattttggtgcccgcctgtggccccagctaaacagaagcctgaggcaagaggatcgcttgagcccagaaggtcaagggtgcagtgagccatgttcatgcccctgcaccccagcctgggcaacagagtaaaaccctgtctcaaaacaaacaaacaaacaaaccaaaacagttggaactctggaacctttgcattgctctctcactgcctgtagccatgacaaccttcagaagcataaaaccttcagacttgctttacttctaacttccaaatcttgagcaaatttccttaggccaactccaacccagaaccatgcagggaagggtattctgggaaaagtagtctcaacttaaccaaggcgacacaatacaaaaccaccacgaggacccagaccctgtagttcaccacttgacatcccctcctcctgctaattcctccactttgtgcctacataagggaggagtcagccttgggaagtggtatttcaggagcagcagaacctggagacccaacaggttcatccaaaggcacatcctcttctgcttaagtaaactgggagggaagggataggagaggaggttgagggtgtggcagaattagacccagatagtaactctctccccagatacctatcaccagccaagagaatgacacatccagagtaatatgagctcagaaagaaaaataatacatccaaataatgtaatccttttaaaagaggaccccgaaaatgaagaacctatatgagaggaagcggaattaatggaccagtgagaacaagaatttaaaataatccttataggctgagcacggtggctcacgcctgtaatcccagcactttgggctaccaaggcgggcagattgcctgagctaaggagtttgagacctgcctgggcaacatggtgaaaacctgtcactacaaaaaaattttaaaaaaattagccgggtgtggtggcacacccctgtagtcctagccacctggggctgaggtgggaggatcacttgagcctgggaagttgaggctgcagtaagctgagattgcaccactgcaatccagcctgagtgacagaccaagcccccatctctgaaaaataaataagtaaataaaataaaataatcaaaataaaattcttctaggaaataatggagaatgttacacattttaaaaaaattattatctaattttttttatacagaaagggtttctctctgtcatacaggcaggaatgcagtggcacagtcatagctcactgaagcctcaaactcctgggcttaaaggatcctcttgcatcagcctcaagtacctgggactacaggcaggtgccaccatgcctggctaaagtatattgtaaatttgaaataggatgagactgtataaaaaagttaacaagtgtaaaaaatataatagctgaaagaaggaaggcaatatacaagttgaatagtgaaatagattcagactaagaatgaattcataaactagaagataaggatggcgaactctcccagaaattatcaggaagagataagaagatgaaagatataaggctaaagttattaaatatggaagatatatagttaaaatgggagttccagaagagaagagggatgagaaacctggaaggaaatgctttaaaaaataatgaaaaaaagaattccgaagaatcctaaaatttcccagaattagagaaaagtgtaagatttcagacagaatatcaacaagatagatttggaaaaatacttaacacattaaagaaaaatttaagagagacaaaaattccaaaagcttctcaagaattaagacatacaagcaagaaaacaaacataaaaagaaatccccatatgccattcattaggaacaagtatcatactgatattagttttttcaatagcaatgcctgatacaagaaaaagaactttagaactagaatttttatatccagctaaactataattctggtacaaaactagaaagaaagatgttctcaagctttcaagttctcagaagatttactacctaaagaccctctttgaaaaacactttcgggctgggcatggtggctcacgcctataatcccagcaccttgggaggctgaagtgggtggatctcttgaggccaggagttcaagagcagcctg

SEQ ID NO: 1884039 - DNA, 4001 bp, Homo sapiens
aagaaaatttggtttctgaacttgggtttttaaccactgttacagactgaactgtgccccttcaaaatcctatgttgaaatcctaactcccagtgcttcagaatgtgactgtatttggagataggatatttaaaatggtaaaataagatcattagagttggtcataatccaatacgtcttgtgttcttataagaaaatgcaataagaacatagacatgcagagagttaatgtaataattggtatttattattattattattgctataataattattaaacaacgaaaagagtgagaaaagaattccgccattgaaaatggactcttactgcactgatgcaaacaactatattgtcataaaaatactcactgatagtttccaatttctagaggaaccaggcagagagaaacaaatatgctccaagtcttgatcacaggagtataccttacttaattattaaaggccataaatagttcaaagtttctttgactctgaaaaacaaaacacggatcagcaatattccaagcaaaggttaaaaagatttgttcagtttcttttcttttttttttttttttttttgagatggagtttcgctcttgtcacccaggctggagtgcaatggctcaatcttgctcactgtaacctctgcttcctgggtacaagtgattctcctgccttagcctcccaagtagcttggattacaggcatgtgccaccatgcccggctaatttttttttttttaatttagtagaaacaaggttttgccatgttggtcaggctggtcttgatctcctgacctcaggtgatccacctgccttggcctcccaaagtgctgggatttcaagtgtgagccaccgctcccagcctggtttcagtttcctgagttcagtccatttagttaactcttgttttgtttgatatttgtgagcatttcagctccttatgagtcctgtatatttttctttattttaatgttacaatttccaaagttaccagaagcctgtgtttgagagcacctgttaaagttctatagctcattataaaccatctttgagaaggattaaacaaggcaacaactgtctgtgaatagcaaaatgtccagggtacttacagttagaaacacgattgacaaagaagcttggttatctccgtggtttacaataacttaacataacgaccttaattatgactgatagcatatattcagccattagaattctagaaatctcatacaattttggaacatgtattaggattattcacccagatacaacctaaagaagactgagcataatttttgcaatcccatgtacctaaacatgtcaaataatcctgtttacctctcttctctggacacttcaggggccctctgacatatttgaaaagccaggtgccagggaagacaattttgaaactgaggtttgattttgggaaggctgttaaatgtttgaggtttaaataacttgatattatgaaatagaattccaggttaccaaaagttatttattttgccaaaatcatgactcagaaattttaaagaagcaaaaacctgttataaccctttacaaatgtgccaaagagcagattagcaccttaggaaaatcttgttatgcttttatttcaatttacagaaaaaccaaacaatacccttttctgaatttagtcaatatgttcacatagaatctcttctgcaagattaatttccacagttctcccaccacttctttgaaccttcagctttttcctaatttaactcaaacaatcctttaaccctaggcaaaagtttacatttccatgccttcttataaccttttattaaaaaacacattttactgttcttactcaccttgcatgtaaatatatttctagtagtttcaactcctagcaattttgaactttaaggtaaaacttggagagttgctttaattgtgtgctaactgcaactaaggtgtgccttcttagttaggggcgtggttagttccatatgccgtgagtgaggccctttaagagacaggggacatgcagatattgaattagagagggctcatcccctaaggcaggattgctaaacaaatccttgccgccagagttataagccatggcctcaggatgtaaaacaaaatagaggatttatttcacaagcaaaactttgcagagcatacagtgatagctggggagcagagggagtggcctagtaaagtgtcttctaaaaaaaaacaaacaaacaaacaaaaaaaaaactttaagggtttacttgttgaggaggtggaaaaggggagtgaaaaaaggtttaaaaatgcctggggaagaacttcttattcgtctgcaagtgatttcaacagcagggttaaagcttaattactctctgataaagtttaaccccctggcaggggaaaaggaaggctgcggtggcttgtgtctgagaaccatctagccagctgtgtgggacccttgggccatgcatcccgtcccgggcacagaggggagggggagtgaggagccccggctttcctgtctgtcctgaaaaaggaaggaaaaggcctttcccccgacgacccccaacggagcaacggagtttggggtcgtgtttcccccaccctcagtagtctgaggatgaaaatgcttaggatcaacagtgagaggttttgagtccccatttcactcactgtttcttgagctcccctgttgcgcgccaaaaagcaggactttcccttagttcagctaaagactgggtccttgtccattccacgaccacgacaatttaggctcatagatggtttgaagggtgagtaaagcagggttttgttgggtgaaaaggaaggaaaaggggaaacagggaccctcagcaaggccagaggcccctgctagcgtgcttcctacccagccgtttgaattccaggttccacacaggaagaggaggagtcggactcctggctgctgcaaagggcaccaacttctgtattttcactccagtgcgcattcccagtgcgcaggctggttggagattctccagggaccccctcccacctggctgtctcactttccgttcttgacatcagacatattgaaattctctggggacctatgtgaaaagtgaagttaattgcaatgagagaactggagtttgggagctaatctgattggaggctggccactgcaggtgatcacatccaggcaattgctgtttaattaaggcaatgcgattaatcacagatgtcactcactggtagcaacagatgacactgtacaacattccacctatgaaataaacataaagtaacgtttggaaagacagaaactgagttaggtctgagattctcctttaatgttttaatctgtcgggttttatttgaattctaaggatacgtgaagctttattcttcttaccttcttgaatatgccctcaaaactatgtcattaattttgagttcttgttttagtttttaaatggaaactttcacaaataaacattgcaacttttttgccttttttaggtataatataaatttaataaactactcagatttaagcttgatgaattttggcaattgtacacacccatttaactaccactctaaacgagatatagaattgtgctgtccagtatagttcccactagtcacatgtggctatttaatcttaacatttatttaattaaagttaaatacaatttaaaatttactttcttaatcacacaagccatatttcaagttcttaacagctccttgttggtggtaatagccgctgacatatagctattggacatactggatagcacatatttagaactatgtagaaagtgatagaaatgtctttgtaaaaattaatagccagcaacattagaaagtggcttcttttactcataataatttttaaatctatccataatattgcatgcattcctatttttttttcctttttgctactgtgtagctttccatttcattgttatgccataatttgtttagcagttcttgacttgggataaaaagctgagttaa

SEQ ID NO: 1884040 - DNA, 4001 bp, Homo sapiens
tttgccatggcccataattcaaagtggctgatacagactaaataagccaacgtgctgtgagcacctactaagcccaagatgtggaagctgtgggaaatacaaagatggatagggtatggcttcttgatcccgggctcacgatcatctggagggagccagatcagattaagaataagaaggaaatccaggctgggcaccgtggctcacgcctgtattctcagcactttgggaggctgaggtaggcagatcacctgaggtcaggagtttgagaccagctggccaacatggcaaaacctcatctctactaaaaatacaaaaattagctgggtgtggtgccgggcgcctgtcatcccagctacttgggaggctgaggcagcagaatcactggaacccaggaggcggaggttgcagtgagccaagattgtgctgctgcactccagcctgggtgacaaagtgagactccacctcaaaaaaaacaaaaagaaaacaaagtaaatccagtctttagggtcataataaaccaaccctaaggatgccaaaccaggtattcaggagaagaacagcaatctgctcaaatgtaacccaaaggcagtagctctcagccccagccagcctgccacatagacatcgtttgtgattgtgggggttgccaactaagaacaccaaatcacaatccctttctgccccctggtagcccacagtccagtgtttcacatgtctgaatgttctctggtatctcaagcaacgtgtgagcctaagagtaagaactccctagattcaaattgtgactcccccatctactgtgtgaccttgggcaagttacataacctctctgtgcctcagttaccttatctgtaaaataaataccttctttgccacattgttgagagaattaagtgagccaatactgcaaagcattgaggagagtgtctgacacatagtaagcgcttaataaatgttagctacttttataccaaagtcctctatttaggaagtccttattgtttcttatcagccaataccttcacaggaatgagcaagaagttgtataggctgaagagggtggaggtggagacaagtggagtgaggagttaaaagcatggcagaaaacaaaaagctctctgtttctcaatgctgctgggtatctgtcaccatggtgatttggggctgggactaggggaaggtgcacaatgaaagcagctgcctgggcgcctctcagccccaccctggttctggctcatcttggcactcatactggtttcctcctagggcctttctttgggttttcctggcatcctctttgatgacataggaaagaacatggacaaatatatgagagaaataaagaaaagttagaaaactagttactcaccaaacattccgtaaaactacagtcaatgtgggagcccaagagtgatgcccactttcaaacaccgctgcccccaccagtgactcagtctagaacaagtagagtctgaatagagagcaccccccatcagctcccactcccgccccacaccgcgctgagagagctgcccagggtgggtaagagttaggagggactgtctggtcagccgcggggagcgtgtcaacctcatttaaccctgcagaagcatttcccccttgtttgtacttagaacaaaccaggaatccattctttcacagagcactgctcctgtcctgagctggccgcttgcctggtagccaatcgaaatgtctagccgccccctagtggtaaaggtttgtgccatggctgtagagaaggcacctaagatcctgaaaggtgatgggaagggtgtttgagaatgcgccttcttccccctcctgtgcaaatggatgtgccaaacatttgctgcgccaggggccaccttggctcacttctctgccagacgctatggtgggaggtgagatgcttgctgggcagagaccagatttaattttctgcttgtttccataagtaaactgtctatcccttgtcagagcttctccttaagctctttctgcatcagggtggtagacacaacatctgtggatgcttttgatttcttgtttgcctaggaactaactggaacctctgtgaagatggaatgtggttttctttccctttcttttggtccacctgtcagtaaggggacaggagggaaaccctcagggctggctcatatctttaaggcagcccctgagtggtattccatgtggattggctcattggtctttaatttccaggcttagcttgatcgtagattttagacaatttatacttaatggtaattaacaaacaccgatcatttgaaggagtgttgcttggtgactaagagcataggctctggcgcccagactactcagaatcaaccctcatctttatcacttacaagctgtgtgaccttgggaaaactccttaacttctctgtgcctcaggtttctaatctgtaaacaggggtaataagagaaattacctgataggcttacccagaggactaaatgagttaaatttgtaaaacccctggagtagaacctgatacattgtgaatgttgtgttagttattaggaaagttgttgttatatgtcatggatatcagtaattattatgtttattattattatgcattattagacatatcacttcctttatctcctccacaatccttttgttatccccatttcacagatgaagaaactaaggcaggaagttgttaagtgtctttccaaaagactgtgtcaaacgggcccagcactgaggagttcacgcaatccatcataggagttcagagagtcacagggtaagctcatgatctaaacaaatatctgtgaggaagtgttatcagtcctcagacagaaatctgaagagggtattgtgtggtggataaaatagggaggccaagaggggaaggaagagtcaggaaatccatggatagaaaggggaagagaagggtgaacagaagaaatattgtgaacaaaggcaaagatgtgggaggcagcaagggatgctctgcaagcacggtgagtgttggttgcagtgagaaacaggatgagctgtgtacagtgactcacgcctagaatcccagcactttgggaggctaaggcaggaggatcgctgaagcccaggagttcaagactaacctggccaatgtagcgagatccccgtctccaaaatatttttttttaattagctggtcatgttggctcacatttgtagtcccagctgcttggagggtgaggtgggaggattgcttgaggctgggagttcgaggctacagtaagctatgattgtgccactgtactccagcctgagggacagagaaagtccttgtttcaaaaaaaaaaaaaaaaagaaaaaagagagaaagagagagagaagcaggatgagatgggattgagaggagaggaggagtcagatcagccctttcaggctgggctgcactgttggactagaagcccatgagcaaaggctctcaaatagggaagtgacatgagagagccagaaaatccactcgtctgccctcttttacaataactgataaaattcctgatgtggagtaatagttttgaattttattttaattttattgagacggagtctcgctctatcacctaggctgaagagcagtggggcaatctgggctcactgcaacctctgcctcctgggttcaagccattctcttgcctctgcctcccgagtagccaggattacaggtgcccaccaccacacctggctaatatttgtattttagtagagacagggtttcaccatgttggtcaggctagtcttcaactcctgacctgaaatgatccaaataccttggcctccgaaagtgctgggattagaggtgtgagccaccacacccagcctgaatttttttagaacacactggcccttagatttagaagtattggtggtcagcatctctcctccactggccatttttctagttggttcttaccaattctaacctgactgtagatgaaaatggaaacaaaattaaaaaagaacaaccaggctg

SEQ ID NO: 1884041 - DNA, 4001 bp, Homo sapiens
cagatcctgcccatttgcatcctcattgttcctatagacaggatatctaacattagaatcataatgcttttggttaaggattgcttaagatgtttttcagaccccgaattctagcagccagtttgaagacccccacagaggaacagggtcagcctgagaacacagcttcttcctctccctgtctcgtgacttcacccttcactcttctaccagtcaacaatctcaacacttcagcccactccaaaacctttaaaaaccctaacttccaaactccttggggaaacggacttgagatttcctcccgtctcctcgttcagtgaccctaggattgaacccctttctctgctgcaacctggagacatgctgtgtgcatggggcaatgaacttatcagtgttacaacttctctccagccacaccagcctccttgctcttccaacacattcaggacaccccaatttagggctttcatacttgccattccctctgagtgccacccctattccacctgtgaatacatgggcttctccagatcttccaggtctctgctcaggattcctctgctagtgaggtccttccccatcatcctactgaaaataacgaccccactagcacacaccagccttcccgagctgctctcaacttcatgttctccatgccactcagcattgccagttaagtgtttgtttgccacccatctcatccatacagggcaggaaaaataattttctcctccacccttcctgagttcttagctgagcttctctgtaacaaaagacagattaacaagagaaaaacaaacagtagtttaatagcatatattcctcttgtatccatgggagataaatcagagagatgagtaatctctagaatagatctcaaaggtgtaatttaaactacaaagaaagaaagtgtagggaaagacccagttaagatgagatggccagaaaaatcatcataaaacgaaggtatattctcttcagtctgaagactgaagtccgtgctttctctgacaagagacttctctgatttagtcatccttctcttcctagtgcagaagaagacacacttacaaatggagatttcctttgtagatgtaaatttctcttccagaagactaacttttcagggcttctcctgtgtctgcagtttctcaaaataatcaaatcaacataatcctttaagccaaagggcatattttgggatggcatatgctaatctcctacagtcacagtttgggatggcatatcctgagccccctcatgcaagacactgtaaactctggctggctaggatcctccctcagctgatttattcaccactctgagcatctagaacagtgctcagcgcagagtacatgctcaataaatattcagtgaatgaacgattctacatgcctctgaaggacaaatgaggaactagctgccgtatggggtgaggaaacagctcctccaggagttgcccttgtctctgttggacattaatgagataaaatccattttaagtgctaaagaaagaagtactgtaagttgattttatacttacttcctggtggagattgcctgtctttggagcctggaagtctctggttcccggtggattttgttcttttcttttctccttcatttacctgctggtgattttccagggaattataaatgatgccagtgtttgagagccgggagaactgggctggaggatctgtcaggtcctgaccagttctaaaagtccagatccaagcgtacaaacaattcctcttgtagttttcccacctctcactgtcactctgctttcttcctcccttcccggtccctgctgccctctgacatctcccctgaagcagtccctggagccctgtctaaggcatgggagaaaggggccggtctcacacctgcttctttgtgtcagatttcccttcgaggactctggactccgaggacctctaagagggaggcacagctgataaccactatgcactgtggaagccacctttgtggtcccacaggaaaattatgaggtcacagagctctgaggccccttgccatccactgtcctcactgcctgctaggtctctcccagatcctcaggcagctgctgactgccaccacaacagacccctcacctccactctgatggcaaaactgccccctgccaatccctctccaccccccttaaaacctcacctatcgcagcagctgacatcagccagtgtgaggcaaagatgagctgagcaacaaagtcatggctgggcaccatggctcacacctgtaatcccagcactttgggaggctgaggtggtaggatcacttgagaccaggagtttgagaccagcctggacttgtgagacccccatctctattttaattattttaaaaagaaaaaaaaaagtcagaaggcctgcatcacagccaagtgccaaacctccccagaaggcttatgctcttaccctccacaggttatttgaggtataattaacaaataagcacgcatgcagtggctcacatctgtaatcccaatatttcggggaaccaaggtgggaggatcactggaggtcaagagtttgagaccagcctgaggaatatagtgagacctcatctctacataaaatacaaaaattagctggctctggcaatgcacaccttagccatttaggagcctggggagaaggatcacttgagcccagggactcaaggctgcagtaagctatgatggcaccactgcacttcagcctgggcaacagaatgggatccatgtctccaaaaaaacaacaaaaaaagtatatacttaagatacacaacataatgttttgatatatgtatgcattgtgaaatgattatcacaattaagctaattagcatatccgtcgcttcacagttacctttgtgtagtgtggggggtgtgtgtgtgtgtgtgtgtgtgtgtgtgtgtgtgtgtgtgtggtgagacaacttaagatctaacctcttagcaaatttcaaacctagaatacattattattaatcctatagtcaccatgctgtaccttagatctccagaacttattcatcttataacagaaagtttgtaccccttaaccaatagctcctcatttcctctcccctcccgttggtccaacctctggtaacaaccccctactttctgtttctacgagtttgacttttttagattccacatataagtgacatcagcatttgtctctctgtgcctgtcttattttacttcacaaaatgtcctccaggttcaatgttgtcacaaatgacaaaatttctttcttttaaagattaaataataggccaggcatggtggttcacgcctgtaattccagcactttgggaggccaaagccagcagatcatttgaagtcaggagttcgaggccagcctggccaacatggtgaaaccctgtctctactaaaattacaaaaattagccaggcgtggtgttgtgcgcctgtagtctcagctacttgggaggcggaggcaggagaatcacttgaagccgggaggcagaggttgcggtgagctgagatcatgccactgactccagcttgggtgacagagtaagactctgtctcaaaaaataataatagtaataataataattaattaagtaatacttcataatgtgtgtgtgtttatgacattttctttatccactcatccactgatggacacgtaggttgtttttatcatggctattgtgaataatgctgcaatgaacttggaagtgcaaatatctctttgagatagtaattttctttcttttggatatatactgagatttgagattgctggatcatatgggagttctattttgagtgtgttgaggaacctccctgtactaattgacattcccatcaagactgtgcacgtttcccttttccacacattcttgccaatgctgatcttttgtctttttgatgatagtcaccctaacatgtgtgaggtgatagctcactctggttttgatttgcattttcctgatggttagtgatattaattaagt

SEQ ID NO: 1884042 - DNA, 4001 bp, Homo sapiens
cgttaacaggaacaggaaagcatatctattcaagtactaaataattatgcaaatctctaagacatagtaatggaccaattatttttaaagtacaacacactgacaagtactttatttttaactcagtcttggtttgttgttaatgccattgcttgggaaaaagcaaacaaaagcaggaggtggtgaaggagaaacaagaaatagaggcagcagcataagcaaataaagaagaacaagaagatgatgatgagaataaaagactggaagaaaggaaaaacaacacgtgagggaatcggaaggcctattatgataccttttttcccctccttgattcatgaaatttgaaaaagttcaagactttttcacaacaacaacaacaacaacaacaataaagagcaaaaagatacacagtcacccctaaattttgttaagattgcgataatgctccactcacacctggctcaggtgccagcagaaggatgggaccctccagattctgcaggagaagggggaggactcctccttgccctggcggcacctccactgctgccaccgaggccgacggtacagcacccacagcttcctacccacgccaggccaggtggctccgcagtgctcctactcccacttcccaggacccccagacttgctgctgctgccaccactaaggccaatgccaatacaaccactgctgctgtcaccctcgatgcaccggcactccctacaaggcccctactagctggccacagccacagccctgccacaggtggccacagctggctgccctcctacctactgctccaaagtgccacccaccgcagtgacgccagccgccacgtcccaggctccaggctccagcctccaccctccagcgtgtggcaggttgctcctccttctggcacagagcagctgggccagtaaagtcagaaaagcctagaacatgatgcagggagtggtaacgttagagcctcaccttgtcatggtggccactgggtggcagtgacaggtttcagtgaactggagactccaaggtggctggctccccacccacaggaaccgttgggcccactggggctgcggctccttggagagcaggaacagcagaactcagacccagccactactaccccgcccaacccccggcccctcctgcgcccccaccccgagtgccggtttccattcctaacgtctccacccacagggccctgtccccccatgacgcctgtgccccatgtctaccccatgactgtgctcaggaatcccaggttgtctcaacacagagtaagaggacgcagacccaggaaccatgacaggccctgccatgcccatgattcccatggaaacactgtgtgcccgctgagcagtaggaggtctccttctagagtctggagcctggctccttccttggaggccaccgctgtggcggccacctctgccactaccagcagtgcagccccgattgcgcccctaacccgccgctgacagtgtagcccccgatagtgtcccaaacaccaccccccactcccagggagtgtaacccctgatagcgcccccaacccgtccccacctcgaacactgcagcacccaatagagaccccaacccgcccccacactgggagaaataacgcccgtaacagtgccccaagccccactccatccccgggcagtgcagccctggatagcaccccaacccgctcctggctgcaggcagtgatgcccggaatagcgcccccaagccgctccccaccgtgggcagtgcagttgagaatactcacctacctgggctgcctttctaccactccagcagccgtgcagtccctgtcacagccaccagcttcagtgaggcaagccagggtgccacaggctccggcctccagcttgtgtcaggagaaaccaccttcccctccccctgtagcaccgcacggagctgctgcagctgctcgtccgccatcttaccactccagctgcgcttcagtcgctgtcgtcgcagccaatgttctaattggatgagagaaaacctctaggcttattctgattggactttattatcatgttctgattggttagcctaaggcttactctcatccaatcagaacatgtaacccaggaacctcggtatataaagcatgctaagggggagtcaggccattccagactcttctgcttctgtctgctaagctggtgtgtgccaggcttagaaggggggaaggggctgggcatggtgactcacctgtaattctgaggcgggtggatcacgaggtcgagtttgagactagcctgggcaagatggtgaaacccccgtctctgctaaacatgcaaaaattagccaggcgtggtgctcctgtagttccagctacttgagaggctgaggcaggacaatcgcttaaacccaggaggcagaggttgcagtaagccaagatcgtgccactgcactctagcctaggtgacaaagcaagaatccatctaaaaaaaaaaaaaaaaaaaaaaggaagggggaaaggaagagccacctgctgcatgctggaggctgtagcctgcagctccacagctgggcttgctgcagtgagtggcagtgatgcagcatggcaggagcggtaggatctggatgatttccagcttcatccatgtccctgcaaaggacatgaactcattctttattatggctgaatagtagtccatggtgcatatgtgctacattttctttatccaccaagcaataagatttatcatctagggggccagttgcagtggctcaggcctgttaatcccagcactttgggaagccaaggcgggcagatcacgaggtcaggagtttgagaccagcctgaccaacgtgctgaaaccccgtctctactaaaaatacaaaaaaaaattagccaggagtgctggcgcacgcctgtaatcccagctactcaggaggctgaggcaggagaatcacttgaacccagtaggtggaggttgcagtgagcagagatcgagccactgcactccagcccgggcaacagagggagactccgtctcaaaaaaaaaaaaaaagatttatcatctggggtatcaggtgagaggactagctaggttgggtatatggaattagaactcatgagtgaagaaattcaaaattaaagttaagaatattactggtctatatagcatttacagaagagccaaatagacaatattccagactatagaggttagagaaaatcaagttatctatcttaagagcacacttttttttttttttttttgagacagagtctcgctctgtcatcaaggctggagtgcagtggcatgatctaggctcactgcaagctctgcctcccaggttcatgccattctcctgcctcagcctccctagtagctgggactacaggcgcccatcacctcgctcagctaatgttttgtatttttagtagagatggggtttcaccgtgttagccaggatggtctcgatctcctgacctcatgatccacccgtcttggccttccaaagtgctgggattctaggcatgagccacagcaccaagcccagcctgcttttctttaaattttcggataacacagaactcagcaacactttgacagtatggatgattacatactatttacaatattattgtcttcctctatctacttgtttatttactgagaaaaaggtgtcagcataatcacggaagcaacctaatgaataaactacaccttgattataagaaaattaaaattgattcatccttcttgaatacagagttttaaaaattcttaagagaattatggcttattgagtatgccgcaatccttttctgttacaaaaacaaagacaaatgactgctttggggttatttccccaaatagcttccatgtgtttctccatctggtacactgcaaaacttcttttaactcctaaggcctcaggagaatttcacagcccctttataaatcctggaagttcaggaaagtgccaacacgtgctgagcatgctaattcccagtgtccttggaaag

SEQ ID NO: 1884043 - DNA, 4001 bp, Homo sapiens
gcccagtggcatggaatccatgttacacctggaatttcaagaagaacaaactattcacaaataatactcttcattgtttcaaacagggcagactagagcctagagcctgctacagtctttcctggactcatgaagcctatatttgcatgtcatgcaagccaatttacattggacttatgagtgtaatctctctagagagaatgaggtcctttagactcaagtgtattctttgtcctttcctctctagatatatgcatttgaacacatgaacaacgagcaatttgtgtgtatctcaagaaaataatggaaatgtggccaaatatgtcaataattagggaaagctaaaaaagaaaaaaggaaaactccaggaactcaattggtgtagtgttttcccttcaagaatgtacaactactgtcattcgtgacattttgggtaacttgtgcactgaaccacatctttggcagtggcttgtgctgcccgcggctaaatcattctctcaccttgatttgccatgtgcattggccccaataaatcataccccacttaaccccatgccccgaccttttgtttcactctctcaatttctatctttttcagccctttcaggtttaacaaatttttaaattgatataaaattttaagtgattagaccatgtttagtggtctgatgtcctcttttcatgtcctctatgcatctctctctctctgtctctctttctcacacatcctcactttttttctctacacacacacacacacacacagaaacacacacctcttccccctccctctacattcacccttatgcctccccacttatagaggaaaaaaatcagaagtattttcccgcatcaaacctgtcttctggagagaagaatatatctgtctcattagatgagaagcaaggttatctaagttttctaggtttactggagagtgagtcttgcattccccattagatgataagttcacatgcttagcaagcagagaggtagagtcgttgggttttgtaaagaaagcccactaaaagaggctgctgttcaatcccacctggaaggaggaaataggaaattactagaccaacatccttaatggctaccacactaggagtgtggtcttgggcaagctacctaattttttccctgaatttacaaattgagatgataatcatattttctacacaataggaccactatagaatgaaatgaaaaaagaaaaccacccagcccttgcacagtgcttggaatatagcaaatgttcctaaatgttagatattatgacttttgtttcctagcttgataaaaaattataaagtttacagtcgcaggaaaaatagaattttaacatatgtttcgcaatttacactgcagatctgctgttcttttgacatttctataatatttccaagtgtagctatgtttgcccctctgggacactgaggtatgaggttggcatggtaagggggaaacattatctcggtttcccgttttcccaatactccacgaatggcccagagatcatgtttggtttaatgtttcatgcaacctgcttttgtgttttactttttcacaaaatgaagtgttaatgcatgaaagatcatttacatatggcctactagttatttaagaaaacagcaattaaacatgttgagataattaacagtgttcatacgattaacaatgctttttagatgctagacattaatggagtagatgccaaataaatgtaatcctacacttcagttaggatttctttgttaattatattaatttacaaattaaaaacaacaatcaaacaatcacattcattcaaacacaatgagtattttaaaagttgaaataatcaaggggagtttctgctctgaggacagaatgggatggattaactgtattttctgttcccaccagaggacagagtaattaaggacaagaaatatcctgctacactgcaggctacccaaaatggactcatccaaccctttcataagcgtagtttttttcaagctaacttgcctactggtatccaacaaaatggaattgttctgcagctgtgattcatatgcccttctgtggatctcattcctgtgtgacctcacaatacagtacggattttaactgagacacatggaaacatcaggtgagcccccctctcagagcagcatctcagctacctgggcctgtggtcacagaccttataagttggggtgattcatatccactcatattcacagcaacattcacaatcccaggactgctcccagatcatcacagtctatttctgaaggtggtgaccccaatgccattgctatggggcatccgggaacgtatgtccctccagtgtctgctgagccactggtacatgcaacagttccattgttaggcagcggaatccagggtaaataaatttagacacaccagctccaccactgactggctgagtggtcttgggcaagattacttgcctcaatatttctaaaagtgtaaaatgtggataggatattattatctagtttatggagttattttgaggattgaaatgagataatcccttgaatgttaatttcttccacttgttctggatgtgtttaagcccttagtattcaggcagttgcagcagggttcatttaatttggaagagagggagggagaaagaagggaagaaagaaaacaaatcagaaaagaagaaagaaggaagggaggaagaaggaaggaggagggagggagagaggaagaaaagaaggaagaaagtgagagagggaaggaggaaggataaaggaaaggaggaagagagaggaagggaggtagagatgggaaatttaaattctttagttggctgtctcatggatctacagtcaggagtggctctggctgtacagataaagactgtaaatttaaggggcaataaaagggaggtgaatagtataagtgataattggaacctgggtttgattcccagattatggcagggaaggtaattggcattgattgatcatctatatcaaatttgaccctgtgtttgacattttacccacactcttttcatacagttggtgagtttctaggctctgatttgaacgcaagtttctatctacatctctgatttcacagaggtcaagacctaagttactttcctagtctcctttggcctattgggtctgtttgtgtcctgagcgatggactgtccacttgtctggttgtcagcttcctccccaacaagttcttgggtacccccatgtcacaaggctccagagaggagctgtcagatttcccaccctgggtgagaagatggagaaagaccctaaacatatcttcatgtgccaggacccacaggctcaaagaagtgcagtcatttctttgttaaaagcatagctgagtttggggtctctgtctgctttgaaagtacttctggcttcatgcgcaaaactaatcatatatccctctcctgatcttccacaaaagataataatttgagcttctataggcaaagcaatttttgtttacaaaccctggatctaaaaaagcatcaggatttcaagtattttaatgtttatgggcctttgtcctacttattccctctgcctgcttagttttctcttgtactttcacatcccatcccgctaacctggtaaattattgtggattttttcaacattatcctaataatcaccttctccagggagcctcccctgattatactcttccatccaaatgtgggtttgggtctgtctttctgggacttccattatcattatcatcactctgagcattaagtacctctttgagcttctgtcctccttagtacaccaagttcctccagacatactctatggcttgatttctattccctaatacctacctattcatgctgagatctaaggaggttcaccctcccaaaaatggtcatactcaagtggattaattaatctgatcaagatgttgaggtcccatggaatccaaacagctctagcaattcaagcaattgttgttagaggactcccagc

SEQ ID NO: 1884044 - DNA, 4001 bp, Homo sapiens
atttcaagaagaacaaactattcacaaataatactcttcattgtttcaaacagggcagactagagcctagagcctgctacagtctttcctggactcatgaagcctatatttgcatgtcatgcaagccaatttacattggacttatgagtgtaatctctctagagagaatgaggtcctttagactcaagtgtattctttgtcctttcctctctagatatatgcatttgaacacatgaacaacgagcaatttgtgtgtatctcaagaaaataatggaaatgtggccaaatatgtcaataattagggaaagctaaaaaagaaaaaaggaaaactccaggaactcaattggtgtagtgttttcccttcaagaatgtacaactactgtcattcgtgacattttgggtaacttgtgcactgaaccacatctttggcagtggcttgtgctgcccgcggctaaatcattctctcaccttgatttgccatgtgcattggccccaataaatcataccccacttaaccccatgccccgaccttttgtttcactctctcaatttctatctttttcagccctttcaggtttaacaaatttttaaattgatataaaattttaagtgattagaccatgtttagtggtctgatgtcctcttttcatgtcctctatgcatctctctctctctgtctctctttctcacacatcctcactttttttctctacacacacacacacacacacagaaacacacacctcttccccctccctctacattcacccttatgcctccccacttatagaggaaaaaaatcagaagtattttcccgcatcaaacctgtcttctggagagaagaatatatctgtctcattagatgagaagcaaggttatctaagttttctaggtttactggagagtgagtcttgcattccccattagatgataagttcacatgcttagcaagcagagaggtagagtcgttgggttttgtaaagaaagcccactaaaagaggctgctgttcaatcccacctggaaggaggaaataggaaattactagaccaacatccttaatggctaccacactaggagtgtggtcttgggcaagctacctaattttttccctgaatttacaaattgagatgataatcatattttctacacaataggaccactatagaatgaaatgaaaaaagaaaaccacccagcccttgcacagtgcttggaatatagcaaatgttcctaaatgttagatattatgacttttgtttcctagcttgataaaaaattataaagtttacagtcgcaggaaaaatagaattttaacatatgtttcgcaatttacactgcagatctgctgttcttttgacatttctataatatttccaagtgtagctatgtttgcccctctgggacactgaggtatgaggttggcatggtaagggggaaacattatctcggtttcccgttttcccaatactccacgaatggcccagagatcatgtttggtttaatgtttcatgcaacctgcttttgtgttttactttttcacaaaatgaagtgttaatgcatgaaagatcatttacatatggcctactagttatttaagaaaacagcaattaaacatgttgagataattaacagtgttcatacgattaacaatgctttttagatgctagacattaatggagtagatgccaaataaatgtaatcctacacttcagttaggatttctttgttaattatattaatttacaaattaaaaacaacaatcaaacaatcacattcattcaaacacaatgagtattttaaaagttgaaataatcaaggggagtttctgctctgaggacagaatgggatggattaactgtattttctgttcccaccagaggacagagtaattaaggacaagaaatatcctgctacactgcaggctacccaaaatggactcatccaaccctttcataagcgtagtttttttcaagctaacttgcctactggtatccaacaaaatggaattgttctgcagctgtgattcatatgcccttctgtggatctcattcctgtgtgacctcacaatacagtacggattttaactgagacacatggaaacatcaggtgagcccccctctcagagcagcatctcagctacctgggcctgtggtcacagaccttataagttggggtgattcatatccactcatattcacagcaacattcacaatcccaggactgctcccagatcatcacagtctatttctgaaggtggtgaccccaatgccattgctatggggcatccgggaacgtatgtccctccagtgtctgctgagccactggtacatgcaacagttccattgttaggcagcggaatccagggtaaataaatttagacacaccagctccaccactgactggctgagtggtcttgggcaagattacttgcctcaatatttctaaaagtgtaaaatgtggataggatattattatctagtttatggagttattttgaggattgaaatgagataatcccttgaatgttaatttcttccacttgttctggatgtgtttaagcccttagtattcaggcagttgcagcagggttcatttaatttggaagagagggagggagaaagaagggaagaaagaaaacaaatcagaaaagaagaaagaaggaagggaggaagaaggaaggaggagggagggagagaggaagaaaagaaggaagaaagtgagagagggaaggaggaaggataaaggaaaggaggaagagagaggaagggaggtagagatgggaaatttaaattctttagttggctgtctcatggatctacagtcaggagtggctctggctgtacagataaagactgtaaatttaaggggcaataaaagggaggtgaatagtataagtgataattggaacctgggtttgattcccagattatggcagggaaggtaattggcattgattgatcatctatatcaaatttgaccctgtgtttgacattttacccacactcttttcatacagttggtgagtttctaggctctgatttgaacgcaagtttctatctacatctctgatttcacagaggtcaagacctaagttactttcctagtctcctttggcctattgggtctgtttgtgtcctgagcgatggactgtccacttgtctggttgtcagcttcctccccaacaagttcttgggtacccccatgtcacaaggctccagagaggagctgtcagatttcccaccctgggtgagaagatggagaaagaccctaaacatatcttcatgtgccaggacccacaggctcaaagaagtgcagtcatttctttgttaaaagcatagctgagtttggggtctctgtctgctttgaaagtacttctggcttcatgcgcaaaactaatcatatatccctctcctgatcttccacaaaagataataatttgagcttctataggcaaagcaatttttgtttacaaaccctggatctaaaaaagcatcaggatttcaagtattttaatgtttatgggcctttgtcctacttattccctctgcctgcttagttttctcttgtactttcacatcccatcccgctaacctggtaaattattgtggattttttcaacattatcctaataatcaccttctccagggagcctcccctgattatactcttccatccaaatgtgggtttgggtctgtctttctgggacttccattatcattatcatcactctgagcattaagtacctctttgagcttctgtcctccttagtacaccaagttcctccagacatactctatggcttgatttctattccctaatacctacctattcatgctgagatctaaggaggttcaccctcccaaaaatggtcatactcaagtggattaattaatctgatcaagatgttgaggtcccatggaatccaaacagctctagcaattcaagcaattgttgttagaggactcccagcatgttcttattaggatgagcacagttgaaactc

SEQ ID NO: 1884045 - DNA, 4001 bp, Homo sapiens
agaggcaggaggatgacagacttgtcaaatggctgctgaaacatttgactgcttccccaagaatctgaagcctttctggcagccatctgggaaggtttcaccgagagaggtgggagacaggcggggtgggtcttccttgcttccgtgcatttgagctcaggcgctggcccatttatctgctgcagtgaagctctactaatgcaaaagacgtacatttggcacagagttccccagagagcagtgaggataataatgccactattcattattttaaaacaaacacaatttggagtgtggatctatctggaagtgcgaaattggttcctcttaaagagcaactggcaagggaagagcacgtgaccagcccaagggcaaggaattccacttggggccagcagtgcagtgtcacaaactataagctggccctgccggctgagctgcagtcacaattgatgttggaatattataagagatacctaacatccattgaggacctattaagtgctctgtgtgcttgatctcattgtctccttacaactaccctatatcatagacattgttttttcccattaccataggaagagactgagggtcggatcagtggacagccttggcagagaaaacttcattccagactgttgggacttccaggccatgctctttccacagtactttgttgtaagtgcagagataacactgaactgtgaaacaagacactctagctttccctcagagccaggaaatggtatgagaaagtaaggcatgcaaaaaggaagaagtccttcccactgaacaagtcaaagctagatctgacttccagcttggccaactccaggcaccaaaaacggtacaacattggataggttgtttgccagttctgccccagttctcctatctgtgaaaatgggatttgaatgagataaaagctatactcttaaaggtcttaattttgctagaatcttatgccagcaggaatgttattcactgacccacccaggcacttacatgtttaaaaaacccccacactggccaggtgtggtggctcacgcctgtaatcccagcactttgggaggccaaggcgggcagattatgaggtcaggagatcaagaccatcctggctaacatggtgaaaccctgtctccactaaaaatacaaaaattagccgagcattgtggcgggcacctgtagtcccagttactcaggaggctgagacaggagactagcatgaacctgggaggcggagcttgcagtgagccaagttcgcgccactgcactccagcctgggcgacagggtgagattccatctcaaaaaaaaaaaaaaaaaaaaaaaaaaaaatccccacactgagtcggaacccaatctagaaccacagggctggaagttacctttaaggagagggcagctcaaagccccacctgattatgagattttattcacagaaacttcaaaagaagaatctgctctggaattctgtgtttcctgggagctcttgtcttgcagtcatttggagttttccgtccttgcttgatggaagagtgtcgagttgaattcacagtgctgttcttgaaaattgtttcagagatcatgtgaacggtgtggggttggcctctctggacttgatatcttgatgtgatcttaccctgaagtcccagtccactctgctggtgatcttaaagatcactgtgatgcaatggagaaagcatggtttggaatcacaccactctgggttgttctatcttctacgtatgcatccatcctgggcaacctgcccaactacttggagctttggccctctcatctgttaattggagaaactaaggtagcgttacagcttgagcattagatggggcaactgcattagatgctggatgtgaagcagctgatacaatgctggacccagggccagtgttctttcccctcttcatgccccttcagtaaaaagattcctcccctgagacatggtttctggacttgggatgacatctggcacagtaaagtcgtaagagctctgtctctgaaggtttttgggggccatcggtccttttgagagcaaaatgaaatttgtgaacattttcctgagaagagaatcacactgagctattaatgctgacactcacttttaagaatctcctcccagaatctcagtcaggcatttcaggggtctccctgcctttagagctgcctgtgattcagttcacaggaaacaggcaaacctttcccagaccctgggaagacaccgagagaagaggctgaaggccaggtggatcgcctgctggcctttcctaattgcttttcttgtgcttgtgtgcgaatgtgctctagttaacctgtgcttcctgtaccccatgtccctggcacctcttctctgatctgtgacaccagcaggagcacaattagtcaggaagaacaaaagctctgaggtgcatggactcagctctgacctcaccagatgttctggcctggtcgttttcatgtaggtttctggagcaccctggaggctgctggctactcctctctagagcactccctggtacactgaggtggtcgcattcctctatgttcagttatcctgtgcagctacaatcatctgtcctcaggcacttcacttacaacaaagccagagatgcccattttatgagatcaaggctcctttatttatgacatgacaggagaacagaacagactgctacgctttaacgtgagaagaagggcctcttgattcccagccagccctttgcatttgaaacctggcagctcaggcagcagcatctctgaatgtaggggacagtcactggcagcttgctcaaaagggccgtctcctgggaaggggtgcctccaatttgtctaattgtctggctctttttccccccgagtccagaggatctgtacctgggtcacccttgatgacacccagtagattctaacataacacccatcatttctggagctccttcttggtgccagcacatgtcactttgtcctttctccatactaccctgtttgtgtgtccttgttccatgcacaacagacctggttacaaatgtttacatcttcccagtggccacatgcagccccttccatcttcccagcaatcctccctttctctaaccttctctagctcattaccctgttatatttttatctgtagatcttaccatcctccgaaggtctattatttatttatgtctttacctgtttattatctctcttgctaaaggataagaccatgagagcaggcccctttctctcttgttcatgttctatccccagggcaaggactaagcgcacaaaatcagttctgttgaatcaagagttcgtgacaaatgcagtgatatattattatatggattcaaaactttcccctgggtcttgttttgccaggaaatttattcatcctggaaagaaggattcaggaaacttggcagataaagagactgagattagttgtatctctgagataaaatgtagtgccacaaaagtggactacacattacagacactgtggaggtttgtgggttcatgcaattgttttgcctgccctgtttctgagcacctagatttcatcattgatacctgcttgctcttcccacatctcaaaatcaccttcaatcatggacatggggtttcagactccctagaggtggctctctgtgccatattgtgcaatccaatggccaattgttgttatgcaactatgatggtgcccacaatgatgatcacagtctcactgacatgccagtgtgggtcttgtgggcaggatcttggagcaataatatttcctttttcgaagtgtggtgcaagaagccatggtggttcatgctgttctctgtccagttgccaggagaagctgggccaattctaagcacatggggtctgcaatggtaatgatgttgaagatgatgataatgataggtaaaatatatggagcacttgcactgtggtagcaactttgctgagtaccctgcacattgttgcatttagcaatcacaaccattgaaca

SEQ ID NO: 1884046 - DNA, 4001 bp, Homo sapiens
attgtctgcaaagggacatgagggagcttgcagggatgatggaaatgctcaatgccttgacttagatgatggttacaaagcaaaactcttcaaatggcacacttactacttgtgcatttaaccatatgtaaaatataccccaatagtattatcatagcaaactttttctttcatagcatttatccaaatttataatttaaattctggtgtttccctattaatgcctatctttttcacactgtagatcaggcactattctaagctctgcaagtaaaatagtttataagatggaccagtctgtcacctcatggaatttacagtctgtgaagcaaagagccatttttgtcttgttcactatgttacactcagcatgtagcttggtgcttggtacgtatgtgtactcaacaaatatttgtacggtggatgaatgactagagagagggaaccaagggacagtgttagtggatctaaactcacacattcacttgcttactctttctctccccttccccatcagtttttcttcagtatttgaaaatctgtatacactctgatgagtatctcatgtgtcaacatactgtgtggacgtatagatgaagattcataaactttgaatccaggaaacagtggcatatggatggattctagaccagatggagctccattagcctccatgggaaggtgaattgcatggccacttgagggcagggccaagactgtactcaggaaaaatactggatctactcctgtgcttgaattggtataattttgagatttagaagcctgtttcacaaagcctggataattcaaatttggactagaaaaggttaccagctaataatcataaaaaagcctgattttgagtgacaccatattctcctggatcctccaacgttttatttgccgaactgattaaatttctaaaatgagaattactccaactaaaattataacctgcagggtgagatgaggaaaaaccaagaggggaaaaaagacactatatatattcctatctatgtagatcagtttgggaacatttcagagaaatcaagtattaaaatcctcagcaaggttactatataaacttagttataaacaggaattaatttaatattatcctgcaagtgtacttaagttctttgatctcctgcagcaacttaaatttagaaaatggtcttaaagtgacaaatgttgaaaaaaaatttcagaaagaagatgattttagattgtatgcctctcgaagcaaaaaaaaagagcatatatttatatgtttcttaggcccttccccacaaacccgacttgtcctcagagcacttagcatcacagcaggttctcaacaaagtttgtctcattttggtttacttattaattgaaatttactggatatatttctataccaggtatcaattaccttaacatttagaacccccagatgaaaacagtaagtcaaataggctaaataatagcataatttagaattgggctttatctattacacgaattctaatgtgaaattgaatggcttggcactaggaacagattctcctatcttctttttttcctttggatgtgactggaagcttagactccaagctttgatatttcccaatattacatccgtggccacaaatgggcagactgacagatatgctccaggcagaatgagtgcccgctcctctgaaatttatacttgccccattgtagctcaaccatattgcgctgtagcaatttgtttacacatctacctctcacactggactgagctctttgggttcaggcactttgtcttaacaccctcagcatctagcagtgactgccttgtactatctctagagcctgtaatgacaggggcttgataaaccttaaacgagaacagaaagaaacagacaggtatattcaaagagacaaacagcatctaaacattacatgcacttacaatataattgaaggatgtgtcagcaagcactgcaaactgacgaaacagtgtgtgccttgtaaacatctcattcttaaggacatgaaagctgaaattttaaaaatgatgaaacttaaaatgtatgtaaatcatagcataaagcaaataagcattatgttaatgaggtaggaaactacattaaaattttaaaatattaccaaataaaaatataaaaatattagcatgaacatactacctctttcatttttaaaactacatgttgcctgggcaaaatggtgaaaccccatctttacaaacaataaaaaaaaaataaccaggcatgcgtggtggtacatgcctgtagtcccagcaattcagaaggctgaggtgggaggttcacctgagtctgggaggtcaaggctgcagtgagccgtgattgcaccactgcactccagcctggacgacagagtgagaccctgtctgacaaaaaaccaaaaaccacacacacacacacaaaccacacaaacttacatgtttttcagctcagaaaaggcatagaagtaatggcaatgatcacccctactgcccagactctgattttaaaaagcatttctcaccaaaataattcagggcatttttcagaaatgactgtttctagatctaaggcaataaatgcacagaatgaacctgggacatcttattctaccagaattcaacaaagtcatcaaaggttatgtcaaaagaacacagtaatcaacttgaaagagttcctgttgacttaagattggagaaatcacacaccaaagataataagaactacagtgtgttgaaacatcacacatatattagctatttgggaaattctcagcctatcttgattgcaagcgatgcgaaaattaggagatttgctgtcaggaagacgtactctgtagagaaggcaagagaatggctggacagccttcagagtgtaggaagaaacaaaaatgacagcatttactcacacaaaagactctttgaagagattaaatgtgtgacatcccttcagccatctcagcagagtccaaaatagagatgagattatctaggaaagacctgagaaggagcctcccatctaatgaagtgacttcccatgacaaacatgggagacgtacaagattttgagaatgttatatcagcaacaacactgccagattgcactgaaaaggacagagaaaggaaataaatgaaataaggttattggattcccaaaattctatgggcaggaaacagattgataaaactactcagggtcaaacgtgctacctttcatgaaagaagatatttgactcagtagtagtgctttgggcccagaaggtggaaccttgagtcacagagaattagcccaggccttgaaacctaatggcgttatgctgaaacaatttcaaaattgtttggactagtgactcaattttccccttctactttctcccctttcaaacaagaatgtctatagctattattgacatttatgtcaatacaatgcctttcgcactattgtatttgggagcaagtaatctataatttcacaagtctacatatggagagaaattttgtcccaggatgaattataaccagagtctcaccatacctaatttagatgatgcaaactaggacttctgaagctgataacacttagatgaaagtttggacttgagttggtgctgtaatgggttgagactttgggggatattgggatgtggtaaatgcattttgcatgcaggataggcatgattatttgggggccagaaggttgactgtagtagagtgaacattgccccccatgaagatatctactttctaatttctggaaattttgagtatgctacctaacaaagtaaaaagaactttgcagatgtggtaagttacatatcttgagatagagtaattattctagattatttagtgggcccaatgtaatcacaagggttttttttaaagaaggaagcaggaggatcagagtagataagaatgaagcagaaataatacatggaaagataatagctaagaatgttccaaaattcagaaatgacattgacccatagattca

SEQ ID NO: 1884047 - DNA, 4001 bp, Homo sapiens
ttcttatcttcctttcccttcccccttctctctttcttcttcctcctccttttttcctctccctttcccttccttcctcctttgtttccatctgtgtggtggcttcactcctgtaggtgctgttcctccgagatagataatttggccatgacagtactaggtttccaaaatggcgtccccaggggtaactggaagtccttcctgatagttccagaggaaaatttctggagcaaaggttctgactgaggccagggggatggaatactgtggttggctaaccctgtagtgctgaagaagggcttgtctgttatcagaagtgtggtgggcgatcgtccctagtcaaaaggccacattgaattcatctgtttctccagagctctgttgagttattggcaaacagtaggagcttcctaaatgtttattgaagaaaatgaatgaatgagtagaaataaaagaatgaatctatgacttgaaatgttttccttttcgcaaagaggcttttgaccatatgacacactctcggatgtttctcactgactacagaagtcagggattttgctattaaccatttcatggccacctctgtgtgagcttaccttaaaggtactaaggcatgaaagaacatgactaaaataccaaatcccttggctacctttggggtttcatcttcactataggtctgttaggtcaagggtttagttaagtgtggtgtgtcctcatgaaagttccgtctggaaatcaaagagcttcgtggtgagtctgtgctggggttggggctaaaacatagctttgagtctcagcagcttgtcattatcagcatgtgcttgccttgagagctatggcagtttctggtgactttattgcagacagcagtcaatccacaactcctcgcaaaggctggtgattgagcaataagctttttgaaaactcttcctgagatctttcattcacattcactgtgttcagagagtagagaatttcaaagacccttcatcatttcattctcactagaggttattccttttgtcattagtgagaaaaatcacagtcagcgtcttagagaaaaagagaaagacagggtaaatgatttctgcagctctcacaccttcccagaataactcttaaccgcaccagccagggcctggtacattctttgtttgtttgtttgtttgtttgtttgtttccccctcttggttttatttagttctcatgtactgtacaatagtaagggaaaatagtgaaaaatcaacccacagcctcatttcctttaaaaaggttttcatgttttgatttattttgatacctctcatttgtatgcatttcagtatgaagatgaaaataccaattaagtttttcactcaactttatttcagacctttcacctcactgttttattttgctcttaatgaatgtctgtattgtcttcatagatttatttaaaggaacaacgttattgatacagcttagttgctgtagccattataatgttccttaatgtcataagaagcaaagcagtcattatgtccacagtagcaaaaggacagaatcatatttgttatttttaaaagctgttctttttaaactcttctggtttgagaagcatgtaaccatgaagagtttgtttatattgtatggatcattcagttgaaaactgcaagtaatctttgcatttaagcatccctatttttcttttttaggaattttaactgacacataataattacacatagtcatggggtacaatgtgatgtttctatagatatatacattgtgtaatgatcaaatcagggtaatgagcacatttgtcacttcaaacatttatcatttctttgtagtgttaacattcaaaattcttctaggttttttgaaatatatatcacactactgtgcaatagcacaccagaacctattcctcatagctaattataaatttgtacctgttgaccaatctttctccattctcccatctgccttcctctccccagtctttggtaatcactgttctattctctacttctatgacatcagctgcttagattccacatatgagtgagatcatgtggtatttgtctttctgtgtctggcttatttcacttaccatgatgtcttccagttccaaccctgttgttgcaaatgacaggattccattcttttttaaggctaaatagtattcagttgtgtatctacatcacattttctttatctgttgatctgttggtggacaattaggctgattttgtatcttggctattgtgatacacatagaagcacagatatctcttgcacatacttatttcatttcttttggatatataccaagtagtggaattgctaaattatacggtagttctatttttaatttttttaaggatcctccatactgctttccataatggctgtagtaatttacactctcaccaattctctctctacattttccaatatttgttatcttttgtctttttcatagtagccattctaactggagtaaggtgatatctcattatgcttttgatttgcatttccctaatgattaatgatatttagcattttttcataagactgttgactatttgtatgtcttttgagaaatgtctattaaggtcttttgcctattttaaaattgtttttttaactattgagttgtttgaattccttatatgttctggattcttttttagaacacattgcctgtcctctgtaaatgctgtcatagaaaaaaacaacatattgataacttagactaggtgctttgacagtagagttggtgagaagtgcttgtactcagggtaggttttcagataaagcaagacatttgcttatgaattggatatggggaaatgaaggaaagagataaattaattatgtttgaaggcctactttggtgtagagagaaagattagaaatgtttgccaaaaaaaaaaaaaatggatctcttttggctcaatgggatagaactcatctttgaactgtaagagagcaagaacctttaaaactcactgagatacatatatgactaaaaaaaatacctgcaggaatgggttcggaaatggtggattttggaacttgttaatacttgtgattgacaggtcagtgggatccattgccaaagtggtaggaatcattcttaggaaattttgatcactactgagtcaggtacatggataccctgtaaatctcacttctgattacaaagagaagatctcttttccaagtctctaccaagtaaattattttccttgacaattaaaacaaaaattgcaggcagggcactgtggatcacatctataatcctagcactttgggaggctgaggtgggaggattgcttgaggccagaagcttgagaccagcctgggcagaaaaatgagactccatctctacaaaaaatacataaattggctggatgtggtggcatgtatctacagtcctaggtacttgggaggctgaagtgggaggattgcttgagcccaggaattcaaggctgcagtgagttgagattgtgtcatttatactccagcttaggcaacagagtgagaacttgtctcaaaataataataataattgctttacttacttttctcaagttgacaagtttaactctacattgtaggtactgaatgaaggtcattatcaggaaagacttaggtacggggaggctgattaagcactttgatgggaaattagtaatttggaaactataagcaaatattgcactgtggctcattgtttctgttcatgaagggatttatttttgtagaatagggctgcccaggagaggaatttataaaagcaaattgtaaatgcttacttgatttcttaaagactatgtgatgtcaggcaaagcatttaccatctctggccttttatttccccacctatgaaatgagattagaaattcctgctctgtctgccttatagaaatcttatgagctttaaattaaatgaagataataatgataacgccattacatttgacatttagtaagtacttactgtgtgc

SEQ ID NO: 1884048 - DNA, 4001 bp, Homo sapiens
atagccactgcagagattcacagcaggctgaacacgtgtttatctccactcctcttgcatccactaaaatgatagtaaagttgtagaccacccataaggacaaaggaaatcggagacggtagaagagagattgatttcagcaatgttttgaagataaaaatctagatggacaacaacttcagccatctttctctgctctgacaagggcctgcacggggagcacgcagctttgggctgcagaagtccatctggaaaggcttggaaactgaccaccccaggcaggaagaacaaccaaattcactgcaggccagaactgtgtgtggtattaaatgcgcaggctctgcagagagattgcaggattcaaattccggtcgtctgctcactggctgtgtgatataggtcaaggttctaaacctctctgtccctctttgtcctcatctgtacacaaggggcagcaaaagtgcctttctcacagtgctgttctaagtgcgcctgagaacccgctgcaagcactcggtgtagccccggacacagagtgagcactcagtaaggggcagctattagcatagctatttcttctctctcagctcagagcgtctcccagagcagccagtcctcacaccctgcccccagaatggaagaacaggtggaagctaataccatcactgcacagtatcgttgggaagttgtatggcatccctttgtttgagttaataaagctctttccctcctttagattaaaaaaagaaagaaatggaatgaacagcgctctgcctggcttctcctccacatctctgaggcgggtttccccatagacctgcaaatcactcagcctcatgcgaccatcatgccaggaggggcatgaggtggcagcagtccagcctctgcatgtcactgcacaaagttgactccacagaggggagtgacacccacaaggccacacgctggtgacttttggggatgggaatgcagagccctgaggcctcacctgcagtctccctgtccctcgacgttgcttcccatgtgaaactggccacaattcaaggagacaggcagagcaaagggggttttataacacgtgagcctcaggccctattttgtcccaaaccacacttgtgtctcccactcctacccctccccctcttgtcacatggctccttgtctcgtggcaccaggctctccagaaccccagtgtcggaaggtgtccctctgagcatggaagattttccaccacgatggagcagccggattctcaatggccagaggtgcagggagagcagtcaggcttgtcctgaggagcagtgacaaggcagatggcaccaccttgtgagagaggagagcagcaggatgccccagtcacagcggcatgcaggtggccccagccagatggcttttcccaagtccagattttcaggctgatctggacactcaagattcccagcttctgtgctgaggagtcctggcctgctcctgagctggtgagaccccagttcccctgagagcctgcttcccagctgctgtctggtttagggcccacagttgacccctctgggagtctgtttggcaactcagaggatgctctgagcacctgggggaagaaagtacttgctggcctcacccctgggactctccaggccatctgtgctttctctgctcctcctggaatctgaggggttctggtcccaggagctcagcctgtcctcctgacattgacacaggagacagcaaagctacaccacagatataccacaatacaagcttccgcagagccaaagaagcaatggctctgctattacataggcctcgatgctgttgtcttgctctcacaagctgtgtgaccttggggaggtggcttgccttctctgatccccagttcatctgtaaagtggtggaaattggatgaacgaacccattgcacagaatatccagtgctactcaaaatcctggcactgagttcttaggaagaagcctctggacaaggaaggccagggagtgtagaattcatctatcaaatattttaaacaaaatggtcagcatgtgagagaggctcaagacacgactcttctgggaaatgcattcatgtagaacagcccgtgcctcacaacacagtgacagctcacattgaccaatcacaagagctaacatttattgagcacttaccgtgtaccaagccctgtactaagcactttctatacatgctttcttcatttaatcctcacaaaaaaacccatcttacacatgaggacactgaatctttgaaaggttcgtaatttgctcaagaaagtatctgagctggatttgatcccaagcatggctgagtttgctcttgtccattatgagggtggaaaatcactctattttgatgatattcatcagatcaaccccaaaaggcagcccctgctttgccttgggggttcaccctcaagttatcagcagtgagtgtgacttcaaagatcattcttttctatttgtttttagagacagggtccctctctgtcgcctagggctcaagtgtggtgacatgatcatagctcactgcagcctcaagcttctgatctcaagtgatcctcagaggtagctgggattacaggtgtgcaccaccatgctcagctattttttttttaaatttgttgtagagatggggcctcactatgttgtccaggctggtcttgaactcctggcctcaagtgatcctcgtgcctccacctcctaaagtgctaggattacaatgtgaaccactgtgccaggaagggatctttctagagctccagggtgtagatatggggctgactgggagtccaggataaccagctgaagattggaatgttctgcaaagtctgcttcagtcaatggcaagtccaagtgaaacacagtttatatgatccagggagagctatataaactacccacctttagacaatctctattgtgtgtgtgtctgcatgtgtgtacacacatgtgtgcacatgcgtgcaaggaggtatctgactcctctttttaaggaaggctgggtccatcatttcctgaaactcccctttcactgaagctctctttgcatacacactatccttgctggctcctggaatacaggtatgagcactttttgtgcaattggtttccatgtgaacgaaaacattctgcaatccctaagaggctcacaagcctctgggtcttttcatgggtttttctaatttcacacttttctccaataattcaagtatccatcagcttagctcacccccttccttggatagatgcaggttctccctgcccctctcctgctccccttctttcaggaggcctcctaaggagtgagccctggtgtatggaggcttctcactccttagcacccctaaagctgcttgtcttgtcctggctttggctcagatgggcctttttctcccaaatagctggtgcctggagcaacatctgacttaggttgaatacccctcagacatattaatgtttctaaaaatcaacatagtgaattttgctgtattattaattcaaccttcttatagggggaatctggttccctaagaggataaattgtatcattacctactggtggcagcagcgattagagggattataattcaattagggttttaatacctgattaccataacagtgttgccagtgaaattctcctgcttgtatcagaattgctatttactcttcagagatgctacagactgagtgtttatgtctcctcccaaattcatatgtcaaaatcccaacttccaatgttatggtattaagaggtgggggcctttgggagggcattaggtcataagggtaggactctaattaatgggattagtattcgtatatgagggaccccaaagagttcccttgcccctgccaccatgtgaggacacagtaaaaagacaggggtctatgaaccctgaagcacaccctcaccagacactaaatcagcaggtgccttggttttggacttcccagtctccagaaatgtaagaaataagtttttgttgttt

SEQ ID NO: 1884049 - DNA, 4001 bp, Homo sapiens
gaggccagcatgagtaacatagtgagaccctcctttatttaaaaaaaaaaaaaaaggcaaatttgcctttaagttgtgtaaaatcaacttcatagaataaaacaagagagcagtatgttttaaaagacaggtctattttattggcaaaatataagatgtattctggagtgtttaaaatttttaaaaagtaaattcagcatatctatctcttccatgtcattctgagtacatagaaccttagttctgttgagtagctgtcttccatagtcagatgaaatctctaagtcttcatttcttcattagcaaaacatagggagaacatacatataggccttatttgtattgcaaagggccaaatgagacatacgtaaactgtgctgtaatcctaaagaatgacaataaagagccttttttgggctctcatccaacactacccatctattaactggtgtgtaaaatcactcagaggctttccttacaccaccaagtggagtatgtttacacaaatagttacatgctttgtgtataaaggtataatgaattcattcacatatttgtttattctaaattcttaaatatcttgaaaaagtcacactcatcatgagtcttaattattctacctcagaaaaaatgagcccaaccaaagttttttttttcactttaagttctgagatacatgtgcagaatgtgtaggtttgttacataagtatacaagtcccatggttgtttgctgcccatatcaacccatcattgaggttttaagcctcacatacatgaggtatttgtcctaatgctctccctccctttgcccctctacacccgatgggccccagtgtgtgatgttcctttccctgtgtccatgtgttctcattctttttgcttaggattgtcttggctatacagagcccaatcaaagtttaaatagaagagctataacacatttcctctacagtaataatatctctggcatttaaatgaaaccaaagagccaaaggatttaatatctttgtgatacaatgttttctattttgaaaaatttagtttttattcaagaactgtattgttacccagaattctttttacttagattcatccctttgcaaaattttagaggcaaaccaactaattgttttctcttttctaccacctcccatccctctgcctctcccagcagtgtagacattgaaaaactccaactttcttatctttgaacaggacgctattgtcaggaggggtaaggacaaagggggagccatggcaacaaacactcttacacaggcaaggtctgacattttaaccttaaatctttatattacacattcaaagtctatatttacattttatgtcttttaaaagttttgaccacaaaccatccccacctctcttttagaacaaggaggtaaataatgtctgttaagtcaccagaataaatctgcagacacactttgtgttaaagtaagaattttaaagtaatcagagcctctgcggtgtacatggaggccctcatcagcttcacaagtcacctcaccaggctttacagcagcagccacaggcactcctgctatcatgtccccagctgctgcctcataggtctcagactcacagggacacactgacccctggttctggtccaaatcagggctggccctggggcacacacaacaggtcagtatgttacccatggggcacttctactcctgtctgccactacctatgcctctgctcacagctttggcctcacactcccgttgccctaggctgaggctgtgctgcacttgcagagatggtcttgtctgctgcttgcctgccgacaccacagcctggccccagccacagcttgggccaatgcctgtaccctgccacctcccatgagttgacttctcttggagggtgaagaccagccagcttatttaataggtgtgaacccaacaagcactgagagacacaactgcctgaagagagtacagatggagctcctcctccttctgcagtcacctacagactgaagcacactagcccaggtggaagcccaggcttgtggctcacaatgccccaccccacacttcacaatgccctccctgacagctcacaatgccccaccctggctgccccacctcccctacagctcagaatgcccctgcctgggctgcctcaccctgaggcttatgatgctgctgctctcctggccccttgcacagtgccagtgggactaagattttcattcatcaccggcttcctgagctttttagtcccaagaaaagcacaaggtggttccttacttgaagccatcttcctctatgagttctatacaaatcctcagttagtagagtgggtcccattagcaaccaagttgagcaacttttatttgctgactgaatgtagatacacctgaattgttgactgcttttgtaactaaatattcctctcctgtcttccaatgagtggtagtttttgtctgcaacttgaccatagcagtccctggggctctagctctactctcaataaagagttatggctgtgtgtcttgaatgacaccttaggacccatcctgcctccacctctttctccaaaaaatagaaacctgacttgtccctccaagttctgaaatgctgaaacttaccaactcccttttctcccctctgtttcttccttccacaggaaaaactttcagattattctctcttttactaacaaagcactaagcatgattttgtcatacaaaatagagagccataaagtggggtaccacagtcctaattcaataaagatgaatactcaacatctggcaatcagtatgtgcctgacagtattctaactgtgctatgctcatttaaccctcagaaacaatctcattttacaggttttacagaagacactgaaatggagaaagtaagttatctccccaaggtcacacgactgctcaggctggggccacaatttgatcccaggtagtatgaattcccccaatttctcaagcaggattatcagaaagtgtattggtccattttcacactgctataaagaaatacctgaggttgacaggtaatttataaaggttgagtaatttataaaggaaagaggttgaattgactcatgttccacatgactggggaggccttaggaaacctacaatcatagtggaaaaggaagcaggcacttcttacatggcagcaggccagagagtgtgagcatgtgaaggagcaactatcaaacatgtataaaaccatcagttctcatgagaactcactcactatcataagaacagcatgggcgaaactgtccccatgatccagttatctcccactgggtccctccctcaacacgtggggattatgagattacaattcaagatgagatttgggtggggacatgcccaaaccatatcagaaagtaaaggtagaagtcaagcttggagggaaagtgacattgtagattagtatatttttaaaagaaaaacatttcttgatgtggattttaaaatgcctccccttcattcaacattaagtcccttctacataccaggcactgtatgtgtgaaacagtcctaactctcaattagtgtaggcagatacacaaacaaaggcttaaggagttcagttttctgagactacactgctggacagggtatgaacctaggatacagacccacccatatttgatcccaaatttgttgctgggatggttttaattttattctgaaaatttgagtcattgaatcatacaaaggtgaggcatctctgtcagatgtgtgtatagtggtctgtataataatgaaggactaaaggaagcaacaagaccaattaagagactttatctaaaagaagagtaatgataaaggcagtggcagtgacaaaagttgaggaaaaagttttctgatcatttgggagatggaataggaagtgcttggtcatgagatgtgaaagaagaggggaagcagagggaaaacagagcgctcaggctctgctggggaagactgagtatgtagcggtgccttcctcctg

SEQ ID NO: 1884050 - DNA, 4001 bp, Homo sapiens
aagactaacgtttgagcttagccgttgaactttctcttaggggaaacagtttaatccccaagtactatgagataggcgttttaaggcaactttttaaaaaggaaaataaatctgctttttgccgtctaggaaagatacatttttccttgtggaaatctgcagtctgaaaagacagatatgaaaagcatgaactgttgaaaataacctaaatgttctttgaaaatttaaaggccagcttatcctgcaatggtgatagaatagtcggcttacaacacgcaaagccgagccgcgggtgggcaggcgccgcccgtggctcgcggagtggatgcactcgagggcgcggccgctgcgcttggggaactttcagggcgccaagtacgggtagcgcttctgatggattcccgggtctgggaggatccgattatcccggggccgggtgacacgcacaaagctgaggttagagttggccaggaagggaggacctggtgagccggtggaacaaaagcgggaaggcctttccttctaggagcaaaaccagcgacgcgtcccggacgcccggggacccctgtgggtctcggtttccttcgctgtgaccctgacatgtttccctccaccggcccgaggaaaccgtcgcttccagcctccaggtaccgtcacctctgcggggctgcgagcggaggaccgggacagagaaggagccggcggtcctggccagccgcgcggctcaaaacccgacggcgcggggactccgggcctggggcctccatggctgtggcctccttatctcccgggccggctgctccctacgctgcggggctgagggcactggggacccaggggcttctctggcactagcgaggacctaaccttgagtgaagaacgatgtcaagtgaaagtgaagaataacgggggtgggcgcgaagagaatggtcttggggcgcgcttgcgcctctacccgaggaccgaggtggggattcgacagacgccagcggtggggatccggggcgagaagccccgactttctgagtcgtgagccgcctccagtcgccccaggacgtaaccccgaggagctttcagacactggccgcgcctaatatcgctgagaaccgcgaaaaccggagttccggccgcctcccggactggcgtcccgaggccaggggacccgcttggggctcccggccgagccccgacctcggacgtttttccgggagccgcgagaggcctgggggcctgggccaggcgccgcggcgggcatcgatcgccggctcccagagagtggccccgcgcaggtggaggtgaccccgtcacctccaggagcgcccccaagccccggtacccgcagcgtgcgccctctcctcctccccgaaggttaagttcgtctttttcggttctcggttacgcatccccttggcacgcatgcccagccacaccgtgggcgaaactagagggcccgcgtcccctgggggctgccgcggggccccgagtgaggtgtcccctccgggccgggcccgagtcggaggccccctttgcagcctagaggagcgcggggctggcgctgcgcaggaaccgccaggccggggagggggccgcgcccgggcctgggccaagagcgcgcgtcccccgcccgggccctgcggccctccccaggtgtctgagcagagctgctgaagctgcagaaatgtgctggcgcctgtccaccgccgcacacaaaacccagccaaaagcggcgagaggaaaagcgaatatggcgctgctgaaaatggagactccgcatctagaaagtctttctttcctttcctcttttcgctcttacttcgtcgatcttttcccccttgccctctcacgagggcctcctgcgctttccttcgggtgttctctacccctcggcccctttcctgttcttatgaataacctcctttactcggttttccttcttcctttccactcccggttcctctttctccattttgtgtcacaggcgccttgcttcttgttccctttcagggcgcgcactcccccgcccggctcactttattttgtgtgtgggtggcggagcagggagggggtggcaaggatcgtgaggctaagtatcgagtttgtttgtttgtttttctttctttcttcttcttctttttaaaggtgttatcttaggagccaagcatctcctttggtcctgcgctccttcgcctagcgcctggtgccccccacccggctgcatccgaggcttgcgcggcccggtcccatcagccgagcgtcgcccgcccaggaggaggctcgggttctccgcagaagcgaatactttctctttttgttttaagttagaaccttgcttttgcagtgattcgttgctgtggcgtgattttaaacaggtgagaaatcggagtctcattttcccaggggggcttccaatgaggattttaagagaagcgtgcaaagaagacagcaatgtccatcttttttttttcttgttttcttttgaacagagggaacccccacgcgctgagatagttatgtttttaaggctaaacttttttaaaattagtttttcttttacacttatggctgacttttgatccttttaaagaaaggatgaagtcaaaacagattaatgcttttgaatacacaacgtccccacgtccccaaattgtggtgctgggatagttcctctaagatgcattctgattttgaagttcaaggtctctaagcgctgttaagcggaaccatgaaaaatacgttgctacattaaagataaaacagacggtgatactgactgcagaatcgtagtagaaactttttttttttttttgaggctgtgcaggatttgccttggttttattagggaacctgctaatagaagcaatttcaagtgacgggcttccctcagtaaaaagctggaagcaatgacatcttttctatctgagtgactctccttagtcgtggtaaataaataaataaataaataaatagatagatagatagataaataaataaataaataaaaattagtttacatgcagtgtttgaaaagaaaatgattttgcttcccaagtttttatgtgttttcttttttaccaactatatttcactttatttacaattgtcagtttattctcacaccttctggttagttttatcttctcaccatggtctgttagaaccccatcctcgagcaaaaaaacaaaaacaaaaaccacccccccaaaacaaacaaacaaacaaacaaaacaggtgttcatccctgtgagatgctaatgcccctggaactgtttgaaaagagcaaaattttgtaaggagattcttttcaaaaagtgttagagaagtattcttcaaaaacatcttagaatgtttccttaaaaaatttcctttcttggttttcattaattgcctttgattaaaattaggttacaaacatatcttaatttcagactgtttctttataaaagaaaggagaaagtaaataggtgttggcaaggactaaaccaatgcaactaggccctgttgagagcctaaatctgtaaactggtacccttaaaaaacatcaatcaacttgaggttcgtacaggtagttctttgactcaaacagttgatttttaaaagtcttataaaataggttaaaatgtgtttttagtccaggttcctacttctttgttatgcatttctcctcgtagataaataaatgaatctaacttgatgagtaggtagatttttctccagaagaactttctaaaaatgggcaaagttagggaagtgattaatacccttcagtttaattggaattattcagtgcttataccaagttaatcctattaagatgctatttcctgctcagggggataaattaagcacaacttagattattttaggtggacaactggtatatagtctaagcaatgggggctggaaaaaagtatctcttctccaaaaaatatagattatgtaccagtaatgttcaaagtactttgaggaagtgtattgatgggatgaatataaatcatagtgac

SEQ ID NO: 1884051 - DNA, 4001 bp, Homo sapiens
tgcatctccatgtcctttggagctggactagacttgtgaatccaaatgtcacctgtgagaggctcctactatttaaaaagaatcaatgaaagaagcatcagactgtagctaaacatacctgtgaaaggatcgagccatccacacagcagactgaactgcaaaagctttgggatttctcttctgggcatcttcttcgtctcctagctggagatcctgcagatgccgcttctttttcttttcatctttgggtccactgtttttctttctttgtttcttctggtccttagtctccatagtggctatttaccaataacaagtaactctaacctacaaggaagaaggttggggtaaggaggtgggagaagcattttacaatccaggcaatacccagggaaaaacattaaatttcatttatttctttatgaagacatgatgtatttgttcactgaacaagggtagaaactgcttaaccctccccaatttcatttatctctgttatgctataaattagatgagttacttctgctaagattacactttatgattaagttactttttattcgtcttaagtgtcaacatcatcagtatctatttctgcaaggatagaaatattctgtatctgtacttttccaccatttagccattagccacatgtggttactgaaaatgtacttagagaaactgaaaaaaacgaatttttaattaatttcattccaactctaaatagtcacatgtggctaccatactagacagctcagacctagatattgactggactaatgaagtggtttcctaacttaaaccaaaacttaaattttaataaaaaatttaaaatgcttttatgaacttccaacatgatcacagtattacttttagtacctgttgactctgcaaaactcctaaattacaactcatctacatacatttgaaaaatagcaatatctgcatgtgtgagatatgactggttctaaatgatgcctggagaccctatggacttacagagacccttccagtgatttctgaggtacctgggaatctgtggccaataaattggtaatcactgaattagtgagttttttttttagaatatcgggctgcataaaatctgacagcttgattgaaaaacagcggggcagggtgccacttcattcaattaaggtcctgtattaattccgtttaataaatgtttgtgtctgtctatgatgtgctagccactgtgccagtaaatggatatacctatgatctgacttgcagagaatccaaactagtatctttcgtgccatgcaataagggctacattgcaaggctgcacagggtgctactggggcacagaggtgagtcagaggcttcccacagacacacacacgagcggaaatagaaagtctttatatatcaccataatgtcaaggaacaccagccgggagttaggagagctgggcactaggaactctttgaaaccgaatagctgtgtgatttcagagattatgttgcttctctactatattttagttccgaacttgtcctaatgtttctctcccttttcttcttgggaaaagcacaatttggggtcaacacattcggctcaggtctaagtcgcctgccgggaccacgtcgccaggaaaccacgtctccccgacaccttccctccccgtcccggctctctgcagggattcaccccgtccctctcccaacgacccccgggcacacctctggcagatgcgaaatatgctgctcctggggagcaaagatgagccggaggaccttcccacgcgcacgactcgcgatcttcccagtgccccagagccagggaccccaccgccgcctaccccagcccgcggcaccaccgaacctgctcacagctgcaactcctcaggtccgcttggacaccgcgggaaacggaaattcactgtcgcgccgactcgccgggagggaaacaaaaggcagaaaaaaaagaccggtgcctggaggactttcagggtagagctggaagaaagactcgtcaacagctgagtgcaggcgccggcgccgtctgcgcagtgcgttccaccgggtccgcgtgcctccggattccgccccaccccgccctcggaactcgctgcctcaactcctgcggagggactccggagcagtgtacaccgcgctccaggagtcctccccgaaggccagagcagctgtgcggcctggcgcggattagttggtgcggtgcaaaagccagaaggaggcacatttggtcctggccaccccggagtgaccgtgctccggacgaatggactatggctggactgggagtccacttcctcctctttaaagatgacagatgagggagatctcgcgttctgggggtgccctaaagccctcttttggccggaagcggtggctcatgcctgtaatcccatccctttgggaggccgaggcgggaggatcgctcgagcccaggagttcaagaccagcctgggcaacatagggaggctacggctctctctcaataaataaataaataaataaaagcaagcccgcgtcctggcgggcgcctgtggtccctgtggtcccagctactctggaggctaaggcagaacgatcgcttgagccttggaggcggaggttgcagtgagctgagatcgagccactgcactctagcctgggcgacagagcaagacactgtctcaaagaaaaataaataaataaaataaggccttctttttccaggaccaacagactctgagggcagggacaaactgacccagcctaaactacctcgccttccctgctcccggtaaaggggctttccctgagggaatgtagcatcttgccattttcttcctgcacagctttgccttcccagggatcctcccattgccacctgaggaaatgccttggagtccatctaacccccagcccaggtacttgggacgcctacagagcctacattgtcaggatgcatcttcctctagtcttggaggggatcctttcaataagatcccaccagtgcacgcaaggctcaattctacacctaaaaactaggcccactcctgtcaccgagacccccaggcttcaagtcctgtcacagggaccttgttttcgcccccagcagccctcaggtattcattctgcataggctatatactgggtgctagactggggaggctacccacgtggcacatgattcccttatccctgaagagcttaggatgttgtaacttcttcacactaggcctcttacttcatggagatgtcagtatctgggtagataatccttctgacatccttttgatctcatgaagcccactcctgtcctctgccctacctcagcttccccctccctccatgatcagaccttagaccttgtcaggtccaaggactgcaaaccccacagtagcccactctgaccaccacctcctagctatccaggttactccctatactgccctgaaacaaaactcctgcaaccttaccagcacctccaatcaagatcttactacctgttcactgtttcttccttcctttatgacttttccctctctagtgagccagcttaaactccatggccaaccattctcattggtcccttgcacacctcctcaactcacccgcctccctgtcacctcctatctgcttagtaagatgggagccctggataaacccagctctccatctattccatgccacaacgatgcaactaaacatggctggaggaaaacagggccatgccagcagtcctcactttaatcattctttgtccggtctattcaatctcccattgttccaaatgagtattttgcacgtcttcctctctgttcagtccttcctactgcctcccccttccttgcctcctgaaaaaagaagggaaaaaagaccttttgaaaaaagaagggataggtgttcacaactcagtgtgaagtgtttaaaagagagccacacaagcacgaagaaagccaggagtgagtaacctgcagaaaagtaggtaaaggttctgatctggatccagatgagaaatggaatgg

SEQ ID NO: 1884052 - DNA, 4001 bp, Homo sapiens
agcacatcaaccgggtctggtagggcatagccttcttggacctgagccattcctactgctgatgtccactgcttctcaatcgagaaacagcacggattcagctctcagattttgtaaactgtgattttctcccttattcctcaacaaccacctagccacgaccttctttaactcttcccccaaccccgaaacttttgaggaaatgacttttcttataatttgaatgttaataaaccgtacccatttagaaactacagtttgatgatttggggcgactgtatacgtcatgttgccgccgctcctattaagatatgaaattgtcccaccactgccccaaagttcccccgctcctgtgcattccattctgtcctgttccactcctttcccaggcaactgctttgcatcgccactgttgcttcttctagaatgtcctataaatggacatcagaccgactatggctttttgggttcttccccccacagcatcgtgtttttcagctccacccacgtggttttgggtattaatcctatggtagaactagctagatgctggagaactcattatgcgccggtaggtaattttaacctgcatcgtctcatctctattctgtcacaatagaggaaactgaggcacgcccggcgtgtgggcgtgtgagggggcaccgggccgacttccgcccgtcagtaggcctggacctgctggcacccgctgtcaagatagggcctggcgtcgcggcgaggcatcagctcgggcagaagcacagcccaggaagtgggcgcgtcgcaagctccacacccaaccaaacccgggcagagggctcggtgggcgcgaggccgagggcccaagaggccggggccgctaccccctcgcccctgggacggcctccgggtctccttgctccagcagacaggcccgcggcggctactccgaggcgcaggggcaaggccgcagcgggcagcggaggccgaaacagagaacacacacaacgcggaccgacagcagtcaccgcaggggtcgccggggcgcggctctataaagcctcggctctataaagccgcgctaagccgcatcgcgctgcacgtttccttccgcgcggggccggcgctacttcccgccttaccaggccgccgtgccgggaggagctgagacgtctgcaaggccgcaacatctcgcagcagcttttcgcctgcttcctccgctcgctctagagggcacagcaaggtgcggggctcaacctgccgcttccccaagacggaggtggccgccacgctcccgcccgctgtaaacgtccgagcgggaagagcggcctctggtttctgtggtatcggcttctggtttctgtggtatccggagacttcgtttcccggcgcgagggaaacaaagatgctggcgtggagcggcctgcccgccgctattgtctggctgcctgacagggagcggccgctttcgctttcttctgccgaatggaacgtggtgactcgggagccgcggagcgcctttcgaggcagctttgtctgcggaaagggagcgctgcggacggcctgtcggaatggtcaccgcccgctttccgcgggaggcgcgccgggcaccgctgggcgatttctccgcctcagcgaaagaaaggagaagccggcatttgtggccgcccagtcttcgttccgatttgagccctggcgtcggcgggaggtgacagtgctgtccgcgcgcaccccctccgtcgccgtcagggtcgtgctccttaggtttcctgcggtttttctgctgctctgagacggtctctgggaccaagttctcacagcatcgtcttctcctctcgcaaataatctttttatgatgtttgttctgctgaatccaccggacgcctcagacacgggccctgacggcatcgccggcctgggggaggcgtggagagaggggaggaaggcgggagggctgtggggctgctagctgatttggggatcccatcatcttcgaatttttatgcagagcccatggaagcgcctggtcagagaagcgggaggaaaccgaacctaagaaaggggcttggagtcagcagtgaagaatctattgtttattttagttttgtttttagattcaggaggtagaagtgcagctttgttgcttccaggtattgcagagtggtgaagtctgggctttcagtgctgcccccacccaaatagtgtcctttggacccattaggtaatttctcatccctcagagtgactactatttaaaaggcagctattgttagagctggcaagctgcaagggcaaaacaaaacaaaacaaaaaacaaaacagggttggggggagcatagaatattttttttttttgacagcagcgtagtaaagtttggatttagagctttttgttactgcccatctcccatactcctgttttatttctctttgtagcatttataacctcctggtatgataacgcattttacacgtttattggcttctctgcccacttgatttttatctccttttggagagcagggaattttttgttccctggagcctagcagggtacctagcagtgttctgggggctttgtaaatacttgctgaatcagtggaaaaaaaagaaacagggcacattatctaaagttattgtgagacaaacataaaaccaaaaggcgaatgatgcaaggagaagttatctctgaacctgctctttgtgttttggagcagtaatacattaggaatagctaagaaggggtcacgccagcattccattttccaaataagaaagtgaaacaagtgagctctcacttctaggatgccttccacttcattagagggattggttctctgaggtcagcccatcaaaaatgtatgaagaaaatggaagccatttattactgttcatctgttaccctcagacatattctcatttccagcagcagggagttagggtggcatgcctcgtgagcaaaacatggggcttggggacattcagaacacctacaagatggtggtgtacacagtgcttggaggcatatctggggagtgtttcagctgaaaattggccacatcctcctatttattacacgtttcaaaaatggccccacaggttgcacatttataagtggtggatttgttttgagggaagtgagcgggagtacactttattttggagtgaagaggatcggagtagccacctcctctaagaaactactccagtctcaatctccattcctttggaacttttcgttaggaaaaggccacatcttggcagggaaagtttataacacctgtgtcagtactgctggaaagctctaaataaaaaagttaaaaatttagtgtattcctcaatcacccagtaattatcgcatcctggtacacaaaactggaggtatccttggaggtcatttattcaacaagtacactgtatttgttgagcatttttcatgtgccaggcattgttctagatgctgtagatacagcagtgaacaaaacacaaaagtcccctctttcatattattccactcccagggccctttcatcctttcactacatctttcttcttatttttacatttgccacaaccaccttctttgctagttggttccctttattcaccaattttttaaaaactcatttcttcagtccctcaactcatctgagatatgaacatgtcaaaaatatatgatgaaatacaatttaaaagtcagatccttttaaaaaaaacttttaaccagaatgaatccatttctaaaagtttattttttatgcctgtaatatttaaaaagcctaaaaatgatcttgctggttttcttcagttgagtgttgtgtaagtgaaaattacttcacaaatcctactattagctattataatcaaatcagctttcactcttccatgagactgtttccttcacaagactttggttgaccataaccaattttatagtaatatacaacaaaaaataatgtggagaatagcaaaattaaacatatttttttaaaaaatagaggtgttctttcccaggatttttt

SEQ ID NO: 1884053 - DNA, 4001 bp, Homo sapiens
ttaggaccatgcaactgtatgtgccacacacattcctagtacaaggagccaaatgttgtcttcagtcgaacacagattttttaagaaactctagggtataaactggtctattattctgtttattatattatttttaaaaggaatctgtttaccaactattctgcagtaacaaaaaatagctccaaggagattctaactgaaggcatgctttcacatgaagaatttatgactacagtgtcctgaggtaatttattttttcctgtggaggatttccaggccgatacaataagacaagaatgctgaacacctgctatataaaagacattttaaggttttgtttatgaacttagttcatgttgaagatgtctgcagatttatctcctgcacgagtatcaaatccaatgctcttgtatgcttgcccttgaagggttggtaaatgtttggccgaatagaacatcatttataaacaggttttattactggacttacagttggtcagttaccccaaatgattattctatacaatttacatctaaagtccagatttgttacactaggaggaatgtcaggatttatgttgggattgcaggtcttggtacagaagacgtagcttgaaggtccctgttatgtaacagagagatttccattttagcaggaaaacatgcagttgatctgctattaggaactgaggatcttaagggaacccacaaatagaaaatctggctttggtcaatagcatgcttatactttgggaggggtattgagagagataggcctataactgcctttttgcaactatatttactttaattttcttcatcatatatccacccaaggccagttttatattctgagggtaaaatacatttcagattttttaaaaagccatggttcattagtgcttggtgcttgacagtataaggttgtatactctatacacataaaataaaattataagaattaactatacaaatgtatggcagaaaccacatctaactctgcatccggctactgacagttttcttttttgttccagtttctttaggctacagtcatatcctaatgatgactgtcttattgccctatttttttttagaatttttcaaaatatatgaaccaaatgtaatactatgtcatatcaaattttagatcaaaattattaggatgccaagtaaataaaagaggaggaaaagagtttatccaatatggtgagcagagtaatagccctgaaatatgcccataccctaattccaggaacatgtgaatgagtatatctcacatggcaaatgaaatgtgaagatgtgattaagggtatggatgtgcaatggggaattaccctaaattatacagtggtcccaatctcttcacatgagtccttaaaatccataacctttcccagctgccttggttagaaatatactatattggaagtgctcaatctgccattgctagctttgaagataaaggaaaggagccacaatccaagaaacgcaggcctttccctagaaaatgtaaaaggcaaggaaatggattattctttagaaactccaaaaaggacgtcctgccaacatcttgattttagctgacagaggcgtgtgttggatttctgccctacagaactgcatagtaatgcatttgtattgttaagccactaagtttgtagtaacttgtttcaacagccataaaaaactaatagattcaaaaccttttatctccatgattgttcctggtctcatcagagcagcagaggctaataacttcccaataatagtcaataaagtaatttcacattttaaaggaagtttagctatagaggaaggacatagagtttgaagttgaagacaagactcaatgaacaagtagcaatgtgaccttgagaaaaacctcaagttttctgaggcttaatttcatctaagccttgcttaccttgcagaatagttgaacatgtcatatttataaggggatataaaatcctttgtatattataggttaagtatccctaatccaaacatacaaaatctaaaatgttccaaaatccagaacatgttcagcgctgacatgatgtcacaagcagaagattccacacctgacctcatgtgatgaattgccatcagaatgtagccaaaactttgtttcatgcacaaagttacttaaaacactgtataaaattctcttcaggctatgtgtataaggtgtatatgaaatatgaatgaactttgtggttaggcttgggttccattcccaagatatctcattacatatatgtaactattccaaaatctagaagaatctgaaatctaaaatgcttctggttccaatcatttcagacaagggatactcaacctctattctctataaacaatcatattgcccattaattttttctccaacaaaatatgtatttaagttaaagactggccaaatttttaatttaggatcttcaaggtggaaaatatccctccagtgattaggaaagacacaagaagacaataaagattttatcactcacacatcttgggtggggagtgtggtacacagcacacctgaagactacacatacacaggttaagcagaacaggcagggagaaataggaactgtgggccaaagcctttgttgaggctaggccattatccaaacaggggagttttaattggtgggtttaaagcaagtaggcatgagttccaagaggtcacgctgggacagagaggtagtcactatggcataactgcacagctttagggatgtggaagtcagaaggttactcaagtaggtttatctagctgtcccagaaagaagtagtcatcagaaagtgataaggcagatatctggattggccacatagaggaaatgggaagaggtgtagaactgaaaactgtgtgtcaatggtgactgaaccctgcttttggtatggagaagttcaacttatatttaaaatggatgccaggacaacataaaattataaaaacgtattacacaaactgatggcagacattattcattgtctcccaaatgttctttcttcttttctgctcttatagaaaaatcacccaagttttatcttaaaacatggcaatccagccacagactccatcttccagggtcatttgcagccagggattattaagttctaaccaatgggacatgagtggcaactgaagtgtgcaaatcccagatgatggcttcaagaagatgttactttctacttcttcttgtcctgttcccacaggctagagtggctgtagtggcagagtcagccctctctaagggagatcactgggctggggcagggctagcaatgacacctattcatttacttattgtctatagcaaaatcagcattgagttattgggacaaaaatcatatgacctgccaagactaagatatttactcttagccctttacaaataaagtttatttgtacctcccttaggcaactggagatcaagaaaagaaataaaatctgggtctctggacaacctcctggagcagagatattcttccctgctaactacctaccagcttggactttcaagtgagctagagataaactttatacattgtttattcatctattacattgggcattataaaatagaaacattaatagaaacaatgatgatgataacagctagcgcttttatggtgcttattatgttatagggctctcctatgggtatgtaagatttgtacacacacaaatttaattccctgataactctatgaggtaagtactattttttattcccacttggcagatgacaaaactgaggccaagcaattaagtaacttttccaaaggcataccaaataggagatagagccagggtttggaccctagccatttggcacctacatctctgcccttaaccatatattatattgcctcttagtagactacatgttttattttgactctgaacaaattagtcaacactcctcaaattcattttaccaggagacctattagaaacaatagcttaaccccaaaatattgacagat

SEQ ID NO: 1884054 - DNA, 4001 bp, Homo sapiens
ggatattttgtttctttgttctgtgatgtcgcctggagccatttaaaaaatgacttaatgacaaagaaaaaataattgctctttgtaactaatgactgtgtcagaacttggaaatcaccaaagcctcggaaagtagaaaccgagtagggggtgggggttccactctccaaggaatcagatcagcagtcgtaaagtggcccgggatctgcttgcacctggatggcccccttcccttccctggagccagcagccagcacctgcaggctcagcctgggggcttcaggcctagggtgccttaggtacctttgcccctgggctgagaggaatggtcagaatgccctaggccagcctagactgcaccagctcagcctcaccttggagttgctccttccttcataaaatccccctgtaaggagacttctccccctctggtggaggagcaaggggtagttctgtcctcacttctccactcctgcagcttcctatagagctccggagttgccctgggattctggattcttctgggtctttactttttttttttttttagtacttaattgtcaaataaagattgagcatattcacagggtacaatgtgaggatatgatacactcacccgaatctttatggctcctgtgtccctacctagactgagctctccctgggggacagaaaaaatgccctctccctcctgatgcttcagcccctcctcccctcatgtacgctaacctaccttgggctggggccctgcagagctctggaccacttgaggcagggatctggcagggcccaagccccaaggactcagggcagcccaccgcctgctgtcacccccagccgcctcccgcagcctctggggactgggccgggagatggggaattgctcacacagcagattccactcctgttcccttcccaggccctcgctccgatctctcccagggggaaatgctggggggagaaaaccgttaacttgtgccttctatttggttttcctctggttattgtttaaaatgcagagattatgaggtcaaagtctcccagccaatatttttctaatgaaaaatgtagtaaggcacgactgagtaatctaatctataagttaagcgttccacacagcagcgattttcaccgacagaacttcaataaatcttgttttgagaaaaatgatatgaggctgatgttctatttttgtcaatttgaatggactcccctgcccccccagtccccagaaacactgcactgcacccagccaatctccttcttccctcccccagagcaggctggatgaaagtgggggacaagaatgatagggtgggaggcctgagttctgacccagcttggctcagagggtctggggccacaggcctctgcttcagcccacctggtctctggggctctcctcctggtgaggggcttggcaaagggattgggggtcttgaaggaaaaggcagccagtggtctaggagaatggtgtcgactttcctagccgtggggtcaggactgcccaggcaagcctgtttccccgagctgtcccaagactgagcaaagaacaaacagcagccctcgaaccttcccttgacccccaacaagccattgatagatctggcaagaaaggcctcacctcaggaagaactggttaaattcatcttcaaagctgctgttccccttcgcctgactcgaacgtgggagacaggccagaatgtagtagtaaactcactcctaacaaaggatgcgtgtgtgtatatgtgtgtgtgtgtgtgcgcgtgcatgtgtgtacatgtgtgtgcatatgtgtgtgcatgtgtgtgtgcatgtatgtgtacccatgtacacccgtgtgcagggtgctgggaaggaagcaaggctctctcgatgaatgtgcagacctaaggctgtcatggagggtggctgccaagattaaaatcaagaaagagatttctagcccaaggaatatgtgggaggccagaagaaagaatatggagctgtttcaagaaactggagaagctgtaagggcagccagaaaggattatgtcacctcatcagagagaaatcaattaggagaggcttcacaacgagagctcctcctccctcctcccagccacgatccaccaaggggaacggattaagacagagatgtctggagacagaaaggtttttctgggtggagatttcagcagcatttagatttggaagagccagaggctgtctcactctgaaatctgcaggtatggaaaccacagacagaggtaacttgacctctcagtgtccaggagagctgagtatagaggcaggagggctggggttggggtctgaggatcaggggatccacgttttgacattaccaacagtctgacttcagacttcagacctcagtttctcagctataaaataaggaaaataagaccagttctacttacctgagagcaaggttagcagatcaagtcagaagatacatgtgaacacgcggtttaaaatactgcacaaggctgggcacggtgactcacgcttgtaatcccagcactttgggaggctgaggctggcagatcacctgaggtcaggagttcgagatcagcctggccaatatggcaaaaccccttctctactgaaaatacaaaaattagctgggcatggtggcgggcgcctataatcccagctacttgggaggctgaggcaggagaatcacttgaacccaggaggtggaggttggcaatgagctgagatcatgccactgcactccagcctggatgacagagtgagaccctgtctcaaaaactaataataataaaataaagtactgcacaagatgagctatggataaaattattactgaattgggtgaaggaaggagctctgggaacaactctcaaagccccattatttctctgggtcaggttaaactggacgacaaggatgggcgactgtcactggcctgcctctggagtctgagcttagagattcctcatggaataagaaagggatttgcacatttctctcagctgccagatgtgcaaaggatccacaatgtggagatgactccaggaaaggctttgggctggtggacatgcacagtaaggacaggggcctgggggctgggaagggggcttgggaggggaggagcttttgaagggaagggccccttgtctctgcttaaccaagtcaaggcaccaaagctgtgccccctttctttccaggtcttaccaattctccctccccatcccaccctgtgtcattgcaggggccattctaaggctcccagcagctccccagaaggggaggggtgagagtttttctttaacctcaaacatcaaacattagccctaagtccccttttgtcttctgacccctacccaccatttccttccatttaactgttcccaccaatggttcccaggaaagtcagctcaagcccagggctgccagagccaaggggaagtggggaggtagtggggaatggctgaggctgctcaaagtggcctggagctactgggcagcctcagaaaccctggagacccaattcccaaggaaaatgggaggtgaaaggagacagggtaatatttcttgcatgactagggtgggaagatgaacccaaagcaaagaatctctccaatttctctgtgcctgggtatggggagtgggtgcagcaggctccagtcagagctaaaaggtctgcccccaccatgagtttgagagtccctgtggcctggctctggtcctcctcttgcccccaaagagatcccaaacccctggaagagtatgcagctacagctccatagaccaggtactaggagcccttgaaagctgggggattgtcgggggagagggaattgcagttggaagagaggggagcttgtgcaccttaatgcccactaaaaattcaaacttttaatcacacaggaacatttttagagaaaattaaaaatatgatacaaagcactaggtatagaatgatcccatttatggagcaaaaataatcctatagtttgctttttttttttttt

SEQ ID NO: 1884055 - DNA, 4001 bp, Homo sapiens
tgctgagtagttgctgatggggtaggagtaaggagagtcctgggttaggggttaccttgaggaacgcttcatggggggttgcagaccagagcccacaggctctgggtggccactaacatattttatttcattttcttttcttttcaagacgaggtctcactgtatcacccaagttggagtgcagtggcgccatttcagctcactgtgacctccgcctcccgggctcaagcaatcctcacacctaagcctcctgagtagctgggaccacaggcatgtgccaccacgcccagctagtttttttatatttttggtagagacggggcttcgccatgttgccaaggctggtctcgaactcctgagctcaggcgatccatctgcctcagccttccaaagtgctgggaattataggtgtgagccactgcacccagtgttgctcacatggtttttaaggaatttttgaaatagcagctaacatttaaaaatggggggattttgacaaagtccagattagtggcttttctttgggaaaaaaaagatcttgtcattctgggtgcacagaatgtgtggcgtggggactcgccccttcagacgaagcatgtgccatccagtcgaccagtgtcccctcctctcagctgtccactgcagccccgctcattttccctgcgggctggccctcccagacacttgattttacaacccgggtcctcgagacaggtgtctggagagaggaagggaaggagcccagtggccacagggtggcaggtctgggggaggtgggttggccaacatgatggtcctgcccagtgggagagggggcagatgactggacggggtcagggctgcaaggacgccgagaagaaaaggaagtgcggcaagcccagagccgcaaacgcaccctttccacctactttctcaatgatctttttgttggtcctcttccttcctctttcctcacttcctttctttgcctgtccctccctcccctttcagggcccagcctccggccccagtctgctcacctgcccctctatattccctctcctgtccccatttggagtgcaagtgaagagggacccagccagagatgccctggtgggagcagctctgagaccttgcacttgctggagcaaagcccttctcctgtcccactgtcctggaaggatgggagccaatcaggctgagcagtgacacattcagagccattgttactgagccatttgtgctgtgtcctctgtcctgagttaggcaacaaggagggagttggtggagacatgtcactccccagctctatctgccaccagccacctcctcccaatgtgcaataagtcaactcctacttacatgttgggagcctgcagtgtgcccagccccgtgcgtggtaccctgggggctgcaggagaacattcagcttcttgaccatgctggaactgtaggtaggaaggcagggaccggtgggtgacacagtaaagagcaggaaggtggcctgacctgcaggagttccaggaagggtgagataggccagatccaggggcaggtgcctggagaagggccctgagctggccttgtgctatgggaagctggtgtcactgcagcatggggcgtgagccctgctagagagaagcatggaattgagggtgagacaagtaggctgggccatgggaggagggtttcacgatggctcagaccgcccgcccatgagttccaaactctaaaaccaagactcagggtagaactcatgctcctttctcaaagtcctgtttttctaaggcctgggaagctcgggagacagccaacctggataattttggtggtcaccactgacaatgatgctgcagaggtacccccaggcaggggaagaggcaggacccactcagttttccatcagtcccttgaggggttggaaggagaccagagggaggggcagactcagcctaggtgctgctcacattcagccatgcactgcagactcaggaatcctagaggccacccagtgaccttcccagaacatcagtcttcttcatctgtaagagagttttaatgcaactacctaaatgaggttgtgacaattaaatgacaaaacatatgcagagtacttagcatcctgcctagtatggggtacctgcttcctaaatggctggtcatgtaaacatcttcacctttcaccacccttcccctgttctgtgctggaatcactgccaggtgctccctgggagggtccacgggatgatacccagcctgcctcttctactccacccaccctccaggcctagcatgtcttctcttgaggcctcggtttctacctctgtaaaataaagaaacctaaattcaactctatattctgactttcttaaatatttggcttgatttccccccaacaactgtgtacctcatcagctggggctgagaaactgcagcacaaggccaggatacagaaggagttcagcccaaactcatggcagtttgggcctcccttggctccttctttcttggaggacccagaacctagtgaaagggacccaagtcacccccaaggcctcggctaaaagtgccctcccctgccctcagccagtcctttattccatttcgtaaaggaaacctatcagctactccttttggctctgaacgtgacgccagggccaggccttcttttgctgttgtaattagcagagctaattgcatctgtcaggctgtgtgctgggcaagcccttggcaatttccaggatgtgggctgctgtgacactgcaggagccccaccctcctacccagaggacgcctggtttgggaagggatggttctcagacataagcgggcattagaatgacctagagggcttgttgagacacagatactgggcccagccctggcatttctgatcagcgggtttcaggttgcctgtgaaaatttgcatttgtaacaagttgccaggtggcactgttgctgctaagcacgttgagaaccactgtcccagagggaataccaggtggccaagaaatgggtcctgggcacccctgctgcttaaggctgtggtcagtcaaccctcagtgggagtagatgggcagtggggcaaaagcggtgtgatgaacaggttgtggggccggacacatgctcctactgttcctggttggttgtagtaattctgtctggaaggagaggaggaggtgaaggtggagccaaggagttgcacactgacatctccccaacaggtgagggcagggagagctccagacagggagaggccttcagagaacaggaaggaagctccctccctcctctgcattttgcagcctgtagctcacgtgccttttatgccccacatctcattctgtctggggactccatacgtagtggctgtctaccttcccgcgtggattgtaatgcttttgctaccaggggtcaggccatactcatcactgcaggccctgaagcatccatcatgttcctcgagctcagtatgtgctccgtacatgtagcacagtggaaaaacttgagctttgctggcaaagacagacagaatgagcttgaatctcagcccagctatggcttttctagtcctgtggctagaaaatgacttagcctcttggactttggttaacccatctgcaaaacagggatggcacccacctcttagaaagttacagtggtcaaaaaaaaaaaaaaaaaagaaaagaaaagaaacttacagtggttagtgtgtgcagtgcccagcacatcctagtgagggctcgagaaatgggagagctatgggtgttaggcaatgctttgtggtgtttattggattaagctatggtggggagtgctgcaggctctgggggacccaggagtgagggaccccagtgaaggaaggaagccttggatttctcccagggtcttggcttccggccagcctcacagtaaaggtctgaataaaccactggtcccagccagccacctgcagccctctgtccgggccacccagaagcttccatcttccctcagcccctgttgccccgtgactccagcgt

SEQ ID NO: 1884056 - DNA, 4001 bp, Homo sapiens
ataaaaagtactgtattatgccaaggccctttgatcctattcaaatatcaagatctaagtttcagctatttcaaaggtctgataatgtccacctttattcccaacacagaaatgactctttatggaactcctgaccctaggtggaacatttctgctgctgctcccaggaaccgcgcatccctttcatactcagtgtgaactgtcactgattatatcaagagcccaccccttcatgtagatgatagaaaatgcactggcttttactcagctgctaatgagtaattgctctgtggtcagccacaaatgtggccagccacagcagggctattgtgagaaggcacacacttttatccttcaggacctcatgatgctgccatcagattgggccaagaagaggctggctgttgagctggcactttgcgagcaggagatatatatatccaagacttgatactcagcatggttgagtagcattattaaaagacatggccactgagtgttctggatggttggcccatctctcttcagtagcaaagttgactttggaaaccaatttaggtcctcaaagggctgcttggtgcatatagaatcaaagtaattagatcaataagtttcgaggattattttttccttttaaaaattatacaagcaggccgggcgcggtggcttatgtctgtaatcccagcactttgggagaccgaggcgggcggatcacgaggtcaggagatcaagaccatcctggctaacacggtgaaaccccgtttctactaaaaatacaaaaaattagccgggtgtgatggcgggcgcctgtagtcccagctactccggaggctgaggcaggagaatggcgtgaacctgggaggcggagcttgcagtgagccgagatcatgccactgcactccagcctaggtgacagagtgagactccgtctcaaaaaaaaaaaaaaaaaaattatacaagcaataaattttcattgcagaaagattagaaaacatgatacatagtaagggtaaaaagtcacacctagcatttaggcataagcattgttaatattttggcacatccttccatacttttccatgcatccttattgagagttgcatattctagggcttgagaataattcattattttaggaacttagggccttgcaagagcaattgttattcagattttattttgagcaggagaaagcagaaaaccctgttcctgtaaaaccaggagtgggtgggcaggggtgggcatgtgacccagtctcagcaaatcagataattacaaccccttggatacaatgattggtctggagtgtctggagtaggcatgtgaaccacacagggctagcaagttttttcctggaattgatgaacagtaggagaaaaagtccctctttatgctgagatagctcaatggggaagagaggcaagaagcctgatgtctgcttgactgccacgtggcagagagcgtgcctgagagaaaggcccagcagggcagagatagacgggaagcgggaaggggagggggcggggggggggtgggagagagagagagagagagagagagagagagagagagagagagagagagagagagagagagagagagagagagagagagagagagagagagagagagaacgagaacagttggcattgtttgagcccttggatccatccatccttaagattcccagttatgttagccaactaaacttcactttcgcttaatctagtttaagttggtttatgccaaatataaccaagagttctggctcaaccacttccctagctccttgggaatagggccctgtctagcctggtctctgagcacactgcctgccccatggcctgcgtgactcaccgagttatcttcttcttggtgctcaggacgtgcttttctccctttcattctgccttaacaatttcagcttccagctctgcattggtgacaatgggctagtctcttcttgggaaaagaagagcccaaaacaccatttggcaaccagcttaagggtgggacctgtgacttccctcacagctgatggggtcagatgggtgggcaggcccagttttgattaatatgcctataaagtggaattctgggactgacctccactcaactcaagcaacacaaagataattgacctttggaaactgcctctggcagtctttttattatttttataggaagtcctgcaaaccaattacatctcacaatgggccttttatggtgctattagtttaatgcagctttccgagaaattagccctcagggagcctgaaattctagaggaaaaaaaagccctccatggacttatttgacttttggattagcaggaaaaatggattggtagtgcagtattccctatagtaacttttggcagtttgagccatctaaccaaggtaccaaattcccattttgggaccctggtgtctgccccaagcaaaaggaaaaaataaatttgaaaaagaataagctgtctctttaaagaattcagtctacaaatcaaagagggtttattcccctcttagtctgaggttaaagaagaatgggagtgagaaaattgaaatagcacttctgtttgaaggtctgggtttttctgaatgtgaaattacaggtgtctgtctcagatcatcacgttggctttggtacctctcacccagccacagttatttgcagagtgatggctctggggcctttgtcacagggtcaggctgtgggtctgggctggagagagaggagatatcatcttagaaatgtcacgctgccctcacctagggagcaagtgcatggggtttcaggcagggcagaatgggggaagagagagaagctagaaggtgacaggaggactaaggaccctgccatttcctggagtctgacgcccaggttggttgtccagctcatccctaggacagggaagggaacacagagcaggtccgtgaggggcatggacatggtatgcccatgggagctgcttcctccttagcccagccctgaccctggaaaccccagccccacctcctctgtgtcatgtggtcatcggccaggtacactggtgagctcacagtccttctgtcccctttgtcaccttgaggattttaaccgttttcttacactctttccctcccagtttctgtttgctctgttctgacctcagcagttcctgggctcagccaacgaggggtttttctgcaagcacccaagactgcctgcctgtgggcttcctctggctgcagggggacccagtttcgcctgagcaggtggggcaggctgaaatgcctggagttatcacatgtggagcatccctcagctattaatgggaaggaggtaggagtaactaccccagctccctgactcctctggtgggacaaccctgaaatatgttctacgtggtctcccacagttccccagtgtgatggagtctcagttgtcccaaatggtgaacttcttatcatacaccctgtatttgcctccttcctttccttgtcttagttccccatctcctactgctgctttgcaggatcacctcccaaaggaaccaccgacccccaaaccttatctcagagcctgcttcgggggccacaagctgagccagacctcacaccttgtttcctggttctgccctgagtgtcccacctggggtctgggcccaatgtggcttgtcttgcactgtcatgggctctttttggctcccttctttaccttggatttgtatgacttcttgggtcatgtctgattcaggctcctccaggaaatgacctggttggactcccaggaccctcccctggcccatgtagctggaattcttgctgatttgggcccagcccttgcatggaaggaatggaatctcatttttaagggagacatgaatagaaagaaaaaaaaaatttccctcttgaggcgaagagaatatggaaagggccacatcttaggcagaatatatagggctgtttctctggaggatactgggactggtgagctaggttctccacttgctggggctg

SEQ ID NO: 1884057 - DNA, 4001 bp, Homo sapiens
agggagtaattgtttcatgctcttcccaaactgggaaacggaaaacagggtctgtcttcaaactcaaacgcatatggggcctagcaagtaacatacttgggttaggtgagatgatggcaacttgataggtcatggtccatttaaggggaagggtgcaattcagcatcaaatgttgctctatgagagtttagcctcacctgctattgccagatctcctgatgtttttacaagagatgcccaataaattcttatttttgtgcatgccctcttgtcttttgaactctggcaattaattatgttttcgaaaacctaatctgagtaccacaaaacctttctgtggattgaacttggacaaaggtaaattgggacctgccccagatgtagaggttccctcaatgccaactggtgagtccagtaagttgtgcaattcaaatgatataacagaagctcacaatgctccttgaagagtaagtagggttaggatttctgggaggaaatgggaacatctcaagtagaacaaacaaccgtgtctgaagacaaacatggggatgtaacagtgagatgtcccaatatttggagtatatggtaccaaccggggaggaaaaggaaatggatattaaataggctgcatgggttgtgatcatggaagatatttcatgccagccagaagaaaaattatgaatagaaataattggaaatagggagacaatcagggtattgaagcagcacaatacctgcagaatttcatagagatatccaaaaagggctgcccaagaggatgatctgagtcattctgaagatggtgtttttgtctttgttgaccacctgctattgatccaatggagaagtttagcctagggaaggctgaagaacaccttggctagttgggagatggagagagataccttttggactcttaagaattacaagtttctttctaattccatttgtttttttcgtcattcatttatgccacaaatattagtaaagcacctattctacatcctgccctatagttagaactacagcatgcaacagaaaataaaatggaagtggaaaaataccagtgatatttgcaataatgggtaaaaaatattagaaagtgatccagggagctgtgggagcacctacaatgagcacctggacctgtctctgcagtgttaggtattcaggaaatatgtcccagaagcaacatttaagctgtaatgtggatgatcagtaggagtcaggccaagcacagaggacaagggggttcctgggataaggcggaaggcagcatgttggtgttgatatgagagctgagaacatttaattatgcctggagtataaaaggagaggaggaagttggtgagaagtgagtggagaaaggtaatcaagaatgacattctgtgggcttagaggacttgttaaggagttctcaaaaacattttaaagggccgggcatggtggctcacacctgtaatcccagcactttgggaggtcgaggtgggtggatcacaaggtcaggagatcgagaccatcctggctaacacggtgaaacccggtccctactaaaaatacaattagtataaaaaaattagcgggcgcctgtaggaagctgaagcaggagaatggcgtgaacctgggaggcggagcctgcagtgagccgagatcgcaccactgcactccaggctgggtgacagcgagacttcgtctcaaaaaaaaaaagttttaaagcaggataacaataacgtccaaattttatttttaaaaacgaattgacaacggtgtacctgggggccaaaaaaaaccagttaaaatcctttacccagagatttgaccttaccaagcaactcagaaagcctttctgatgtttggacacaaagggaaataaatgaaagttcctgagatggtatgtggcagcactgtgccagacaaccaaggaagggtcttggtgtcagggtatcacaacactggactgtccaggatgaaagggattgtagaagccattggccgttgcctggcactctttatactaaggagaaaacggaggcccagagaggacaaacaatgtacctaggatcacacagcaaggcagtggtagaaccaggccggacccagatcccaagaaaattatttttttatttagtacaagggcaaaacacactacttattaaggtaggaaaaaacttacagaatatcagaattatagttgtggaattccctatctctgaagaaaaagaggaactaacccagtcagtacacaaagtggaacacagaacacagacacacaaaacaaataattaacagtgtaaatgttagtcatttttacactctaaatttatgatattttgggctgtgcatcttttctaaagaactatacccaaagaaaaagggcattctgttacagtttgacatccttgtgtttttttttcttcttctttgctaaaatcaggatttaacaatctaaggggaaaatattttcacatctcaaaagaactgtctgaggatacagaaagagaatctgggggtgtcagctcctagtcccttcatccctcatgagtagtataaggggggtgaactgaggatccccaagagttctacttcaaagattcatggaacacagataacaaaaaccagatcttttcaccctttttaatatacttgatttttcaagtaaatgagttatttgcaaaaaataaattttttatatgtaccactgagtaggagtggatattaatcatttcagtaaatagatttcagtttactccccaaacactgaactgaagcagcatgcaaattatttataaacgaaccaagggagacaaggaggtaagactgtggaactgccagttgttaaaacagttcatggagtggatttaaataatgcctgctctgccactacaccagagtacatttctgcatagaagctttacatatggatccttcttctacacgggcaaaataaacaggatgtttttaggtagaggcatcacatactcactgagagtgccaactctcccccagctcaatggttggaacacaataagcactcaataaatgttgctgggtaaactaataaagtcaccacgatgttaatagccgggtttggtctctctagtgacctgtatttttgatgggaaatagcaaatggttaacaaaatgaatctattttaaggtagacttacaagctgctatttggaatgaagtttggggaccacaggtgtattccagtgctgtttgcagaagtcactgatttaaaaacaaaaactatgatttttatatagaaactgaattgctgagacattttatcctcaagattatttccatttatgcagtaaagacaacctggaaggccaaaaatttgagaagaacttggcagaagtttggaagacactggatacacagatgctcaggatgaagagataacaccttctggctcatcttcttcttacttttaatctactgcttttccaaaaataaattttcatttcctgtgaatgctacagaatgatttatgttcattgagtgtaagaactaggcacttaggaagcaaatatattgcttttctgtaagctgagtagtaagagtaaatatctctatcacaatatttctagcatatgttgcatatatttttaaagtgaagtttccaatgctgcctgtatattaagaaatcctaaagggattgacttttgctacacaaaagtaatattctgaattgcaaaggtaggtgcataagtctgaatcatgttaacataaaaagacaattatctacctaacactaaaatgtaattgtttccttcaattgagatagaacagtgcattacacaaagagtcatcactgcagattttaaaatattttatatcacattgaatctggcaaacatctagtgaaactgacattcttccaattttaatacttgagattatacctggagcaactccactgacaataagcaaggtataggaatgtgggaagacagaaaatttctatttttagtcatttcactatcacctggaaa

SEQ ID NO: 1884058 - DNA, 4001 bp, Homo sapiens
atctctgaactatgttcttagactgaggctttgagtgctgaccgctgtcctaagtaccacaaggaacatatggagaatatctcttataagttgtaaatctctctgaggtcagagtccacttctgattcagctttacagcacccaaacctgttagtgcagaaccttgcacactgtaggggccaagtaactatgtggaatctcggtatgccctaggaagcatcaagtttgttaggccgtcacacaatttcatttagtctctggcccctcctattccagggtctcgggtttatctgaggatgtgaaatgaagatggccccagagattctaaggggctctaagccctggaatgggactgagttctcaaacatttcttcttcaacccagtttcaagcaggatggtttggagtcagctatagacatttcattcagttgtcttatttccccttcaaacttcatgttggtcatcttgcatttaacagtttgaagtctgactaatcttgtagagggaaaaatatctataataataaatatcagttattgtatgtttattaggtgtcaggtactttacatgtgttacattatttaatcctcacaatgactcaatcaagtagctattgttattacctccccattttacagatgaaggaattgaggttttgagagattataaaatttgcctgagctaagcttggtaaatggcagatcctgatttctacccaaatctgtctgattctgatcacatccactttgttttactacttctgttattagtccttcaaatattgtaatagacatcacaatcattgatttgctaagaagagagagagaatggcttagacatggcattgaaaggaaatagccttgataagtaacttggaatttccaatacatttagaaacatcttggtaggcatttggtaatgacaaagtgtggaaaacaaggccgctgatactagatgttgttaatttgatattcctagttttttcttcctatttcagtgttgagaaccagaatttcctagacattaccaaagactgaggattttacgtatctttttatgcagcacttttatttatgtgaatttgaaaaaaaattctaaaagattagtagagtgcttagtagttacggagttgagtttgtctagaaatgtgtatatttttgtcattaattttttaaaagatttcaaaactgtgggcttcactatggtgtttcaattcagtcatctgctcttgtctgtactcctgaaaggggaaataagcttataggaccagaagcttaatgtgtctacttaagtacctaacttatcaataggaagtcctttagatccttgaaaagataaatgctcttgatttttaaaatgatctctacttatttctaatatctaggcttgtagattatggtaggaataatagaatattttttttttttatagttgaaaatggccgggcgcagtggctcacacctgtatgtaatcctgtcactttgggaggctgaggtgggtggaacatgaggttaggagtttgagaccagcctggccaatatggtgaaaccccatctctactaaaaatacaaaaattagctgggcatggtggcgcatgcctgtagtcccagctactcgagagactgaggcaggagaatagcttgaacccagggggcagaggttgcagtgagccgagattgtgccagacagagcgagactccatctccaaaaaaaagaaaagaaaagaaaagaaaaaagtagaaaacagccccccttaagggggcacacaatggagacaggggctggggctgcttacctcagtcccatttgcttgacttacttgtccttgtgtctcaggtgtgctctctgcctgcttgtgaggttcccctgttcaagcctttggtgggatcatgtgtttgggggccttgtgggaggtcagctgcactggagtgctgcccatggcctgcgcaggacatttcccagcaagggccagaggagttactgtgttttcagtctgaattgaatgtcagagccagccagcagggcttcatcctcttggggagaacactgcttagcagattaggtcctggataacttgcttgtatttttttaaattaaatgtccctggttggtttaaaaaaaggaaaagaaaacaatgaaatcaattggccgggtgcggtggctcacgcctgtaatcccagcacgttgggaggctgaggcggatggatcacttgaggccaggagtttaagaccagcctggccaacatggtgaaaccccatcactcttaaaaatacaaaaattagccgggcatggtggcacacgcctgtaatcccagctactcgggaggctgaggcatgagaatcgctgatattgcgactttgcactccagcttgggtgacagactgagactctatctcaaaaaaacaaacaaacaaataaatcaatttaatctcataagaaaagcaactttatttttaaaattttaagagaaaagtattaaaatccagttctctattcaagctaacaattaaaagcattctttaattttatgatagagcaagctaagacattcccatcttgtggtattttaggatactctcatcaaagacttgtaacttggtgttgtatttttccactagagaccaaaacggatccattatattttgatttttgaattaccagctagaggaaattataacacttggaatagagtttccatacctggggagaattgtctaggcaaccttttaaaaatatagattcccaggcctcattccagatctaatggtttctaaacactaaagatagagtcccaaaacatgtgaaaagtgattctaaggaccactagattacagtggtgtcccattatggcaggatcataagagtcaactggagtgtttatcaaaggtactgatacaaagcctcttcttcagagctactaaatcagaatattcaggttaggcctgggcatctgcatttttaataagccccagttatttcttatgtacaggcagacttgggagccattgaattagagcttattttctctaatgccgggtctggatcatcctgcaagctttcaaaaaagttatttttaagttataaaagtaatatattaaaatcaggttgggtgcagtggctcatgcctctgatcccagcactttgggaggccaaggcagcatgaggtcaggggttcaagacccacctggccaacatggtgaaaccccgtctctactaaaaaaaaagtacaaaacttaggtgggcatggcgttgtgcacctgtagtcccagctactcgggggctgaggcaggagaattgcttgaacctgggatgtggaggttgcagtgagccaagatcatgtcactgcactccagcctggtcaacagtctcaaaaaaaaatcactatcaatgtattaatacaacaaaactatgttaacatacctatataatacattaaaatattaaattataaattaatacagtatgtttaaattcaaacaggctggaattatacaaagttaaaaatgaaaatctcctattttctcccttcctatcaaaacctcagaattaatggcaaacagtgcatcccataaacccttccagacaattttctatctggttagctttcggtccaattcaataaatagtaaatacatacaccatgcaagacacatgcagaaaacaaacactttacaaagaagcaatcactcagtgaaactgctggcttttcagaagcttgagtcatgaggaaaaaggcccaggtgtgtgtggatagattccattgcactggcagggaaataactcatgtgtgctgtcgaaatcttagaccagttttgctaacgttgttttcggaacttccacaaaactggaagcaacctaactgctcatccattgggggaatgagtgaccagattgtggcgcatacatgtggactattacacagttattggaaagagtgagtgagacccatatgcactggtctggagggatggccatgatacattgttaagtgaaaagagt

SEQ ID NO: 1884059 - DNA, 4001 bp, Homo sapiens
tttccacaggagaacttggactttatcctcctgggcaggcaacggggagccggtgaaggtcgcattgcaggaggatggtgatgaagctttttaaggaaacatgtgctggcactgtgagtaatggactgtagcagagaccaaccgcgacgccactgaatcaaaccaggtgagcagtaacaacggcaaaaccactggggggacggggagaaggaaagagtttttaggtaggattgacagaatttgtaaccacttgacatgggaaatgagggagtgtatctgatcatggtttgagaaatttatactaaagttttaaaaaactgatcttgtctaaggagagatgccatgaaaatgtatttcatgttataacctcacatctcaaggtgaaaatggatgtttcttctgagacacaggtttgaaaaaaagaagatcatgagggaacaaaaagcccagttctgattgttggaaaggattacacaatacgaagagaaagaagagatggaattcttttagttttagtttttttctttttctttttttgagacagggtctcgctctgtcacccaggctggaatgcggtggcacaatcacagctcactgcagcctcaacctcaagcgatcctcccacctcagcctcctgagtagctggaaccacagccatgcaccacatgcccggctacttttgtataattttttaaagaaatggggctttgacatattgcccagactggtcttgaactcttggccttgggcgatctgcctgccttggcctcctaaagtgctgggattacaggcatgagccactgaacccatcccattactttcttttgtaataggtaagacatagatgtctgctggaatgtagacatagacaaaaaagattgaagtttaacctaccagccgggaacggtggctcacgcctgtaatcccagcacttagggaggctgaggcaggcggatcacgaggtcaggagatcaagaccattctggctaacacggtgaaaccccatctctactaaaaatacaaaaaattagctgggcgtggtggcatgcggctgtagtctcagctactccggaggctgaggcaggagaatcacttgaacccgggagactgaggttgcagtgagccgagattatgccacggcactccagccggggtgacagagggagagtcagtctcaaaaaaaaaaaaaagtttaacctaccaattttggggcagaattcctagacttataccacatcaatggccctagcaatgttatgaaccaagagtaagctcctgtaggttatccgtggaggtaaaggaaccaggcacctaagcaaggacactatggcctactggtcagggcaggttgtccaggtaagcaagttttctgaaatatgtacatgcttttaatattaaaggaaatgtgtcttatgtcgttaaatgttctttaaaaacattactatgaatataattatttaacttgcaaattcccttaaagctaggatgcaacaaggtttcacaaagaaggcacccaaccttgatgtcaacagtctacccactatgggaagccggagaggctttcttccaaaatgcagaattgtcagcatttgaacgctgagtacgaaaaattataagcacaggctgggtacaccggctcccatctctaatcccagattttgggggcccgagacagcactctgagctcagagtgcagacctgcatagagcaagaccctgtatcaaaaaacaaaattaaaaaagcagttgtaagcacaggtacacggttaaccatgaatatggtatccctgaaaagccgttttaatgggggaacaaacctaaaatttggaataattgataatatgtgtatatgtagccaatcagagcagaaaccagaaaatcaggcagcaagcttaagggaaacgcaacatactttgtttggtttccttttcttccataaactgatcaggggtaggtagagtatgctgctatagttcggagtcgtcaccatcctcacggaaacggcaggagtgtgaacacctccctgagctaccaagagcatctgactcgttgcaacgtgggcccgaacccagcgcctctaggaaacgtggggccggggccttttggtcccgggtgtgggttgggggtttggggaagggccggggccttgatcccaggtgtggggttggggattccggggctgagccgaggccttggttaggggtgtggggcgggggttcggggcagtgccggggccttggtcccgggtgtggggttgggacttcggggccgggaccttcgtctcaggtgtggggcgggagttcgggacagggctggggcctgggtccctggtggggcgttcggggcagtgccggggccttggtcccgggtgtggggtgggagtttggggcagggccggggcctgggtcccgggtggggcgttcggggcagggccggggccttggtcccgggtgtggggtgggagtttggggcagggccggggcctgggtccccggtggggccttcggggcagggccggggccttggtcccgggtgtggggtgggagttctgggcagggccggggccttggtcccgggtgtggggtgggagttctgggcagggccggggccttggtcccgggggtggggtgaggggttcggggcagggccggggccttggtcccgggtgtggggtgggagttcggggcagggccggggcctgggtcccgggtgtggggtgaggtgttccgggcagggccgggaccttgatcccagctgtggggtgggagttcggggaagggccagggcgtgtcctgggtggccagggtcggggcctgggtcctgggggtgggatgaggggttcggggcagggccggggccttggtccagggtctggggacaggctagggccggggtcgccatccgtcctgggcggcgggcaggggtctttaaggggcgcacgcggtggcggaggaccagggcccagccctccggaagtcagggcccacacggccccccagcgtcaggcgctccggtcgcgccggggacggcgggcggggcgggcggggcgggcggggcggacgtgcggcgtgcgcggggcggggcgatgtgcgcgcacgcgccaatcgcaaggccgcgagcagggtgtacgcgcggagaggccaagaaggcggcggggcgggccgagcgtcgggtgcgcccaatcagcgcgccgcaacaccatgacgtgaggctctcccggggctgagcgccagtccgcgggaccggcgggtgagtgcgcgagttcagggcgcgaggcgcgggtccgcgcgggggcgggacttccgcagggccccggaagtgggagctgtgtgttctcatgcgaacgggaaggagcgttggggatctggagtcccggggttgagacattttcgggcccgaaaggggaagaatccgccgccgccgccgccgccagctcgcgcccgccctctcccctacctccggcccggcccggcccggccgcgccgcctctccctgccgtctctctcctcgccgtccccgcgtgtggcgcggccgccgggccccggggttgaggcgaggagcccgcgggcggccggtcgggcggggcggcggcgctgacaggtgaggcaccctgggccgcggcgggccgtccctcccggcccagctcggacccgcgccgcgccgcctgtcactgcgccgccatcttcccggaggacgcggccgcggcgggcagggccgggcctgggccggggccggggccggggcaggggaaggccggggccgggttgaggaggaccggggctagggcacgggaagggccagggctgaggaggaccggggtcagggccaggaaaaagccggggctgaggaggaccggggccggggcaggggaaaactggggctgaggatggccgaggccggggcaggggaaggccggggccggggcttaggaggacccgttgaggcgaggcgggagtcgacggagctgggtgcccggaagaccgggccggggtcagggtcggg

SEQ ID NO: 1884060 - DNA, 4001 bp, Homo sapiens
aaaaatagcaacctcttatttaactttgcatttgtttaatattttatgaataaagaggttaagtattgtccagtgttatgaagatgagagaaatactttcttttcttctttttcaataagtagatttttatcatctctttttctgaccatgagaataattcatgatcatacaagacggtcagggttcaaataccagctccactggtcactagttttatgaacttgtaaaattgtttcaattctgcatgcctcatttataaaagcacagaatcgcggtgattctgacctgaggcagttttgagacttcagctgtaaatgattgtaaaactttctgtggagcctggcacttgggaaccacaatcacacaaatggtaatcaaaaaaataaaaataatcttataatatcttggttaaatatgtatatatatatatatatatatgtatataatcaatattgaaaaacataaataagtgaaattgccaatgatgtcgccctgggaattagttactgacggcataggttgtgtttctcccgagcaatgcaccgggagcttcttgtcttctcttcccagatccctttcttcgatgtttgtgtttgtgtgtagttttttctaatagaaatgagatgtactacctcacatgtgctaccttcttttatcaaataactatatattatggttattattatattgcaataagtatagatctagaatagatgatcattttaatggttacataatagcccattgtatagttataacatgatttatttgtccaatctcctgttggtaggtttgaatgtttttatttccctttcttctgcttctctgtaatggctattgtcagtttttgtgaacttgactactgatttctgtaggataaattccaagaagtgcgattgtacaatcaaacagcccacgttgctgaagtttttcagctgtacttcccaattgcattccaaaaattttgtaattgctgggcacagtggctcacatttataattccagttacttgggaggctgaggcaggaggatcacttaagcgcaggagctccagaatggcttgggcaacatagcgagaccctgtttaatatatatatatataatttacactcccataaatgatgcataagtgtagccactttttcactttttttttgtaattttggatcattcaatagacaaaaatactttctttgttgcagtaattcatgtagttttgattgccagtataagtgggtgcaaccatgcagcatatgtaacattatgctggcagcttctctatgtggcaggagacagtgtcaccacagcagatattgaatgagactccctaccctgcggccaaggctttcccaccctgaaacacagcgcgatgcagagttctgccgttggctcaggcttgcttgcaaaagcaatgcaaaattttctggaaaagatgagtatcaagaacccatctctggtccagaattcaaaatatgaaagcctattcaaggtagaacagagcatggcaggtgaagggattatgaccaagatttgaaacccacacatcaaagagaaacagagaaccttaccagctggaggaaggtggaagccaaactcaacacaagagctggggaagagtatgtgggaagagctggtgtcgtccaagcacgtggttgaagctggaacatgcttcaaaagcagctgttacagcccagagtcccacctcagggaacagtgccccagcacatgatcctgaactggaagggttatgtccctggagcctgtggggggccaggacccagaacaggatggggactccaaccccaatggacacaccattcaactgagcactacagtgacgaccacaagcgtggtaggagactcctccattgtagccgtccttcctctttgcctgatattcagacaaaaaacccccaagacctctgaatcattgagaggaagtcttgagaccaggacccaccgtgccatcgtttctgttcatgagagcacaccgacatttgagcaatttgctggagaaaaagaaaaaaaaaaaaaaagcaagtgaaacataccagtcataatagcgctgttgaaagaaagttttgcctgtttgttgacattttgaaattcctgttttgaggattttctatttatatcctgtatccatttttcctccctggatcttgctcgttttctcagtgacatggaagagctgtttatatgcgagcgatgccaactgttgttgtgtgttttggaaatattagtgaaggaaaacagctagagagagagaaagtgaaatgggaagtaaaacaactttttgtttttaagacgtccttatttacttgccactctagctaataaattcttgtcaattaagtaataaaaacctcataaaattctttagaaaccttttagaacaccagatccttaaagaagactggtaactcccaagttatttaggacacagaagctcgcgcagataggctgggagctggggaggaaaacgagagcaggaagtaaaaggagggtctggactgacagtgtcgcatgtgatttggcaaagggaaagttagaaacaaatttccatttgcttgtgaacatttgtgtgtggtcaaactattcttgaccattccagaaaactgacccatactcacagttggaactgagacaaggaatacattgttcaaaaaacaatttgacctattttagacagaaaacataaaccttgaaatcacatttcaaaagattaaaagtcaaaaggctgatttcaagttgtagcatgaatgtttattcgtaggaaaccagcagcagattaattattcttatatattcaagtgagcacagattgaaaaccagccttttgccgggatactatgtcaacaccaaaattttaaaatgtgaatgaaacaaatgatctccttcaagaagctcaaattctgtaaaggaagggcagatgtataaacagacaagtgcaagtgagtattagttatagaactgtaatgacaaagacagcatagcaaagtggttaaaatggaagctccgaagacagaataactaggttccagttattagctgtgtgaccacaggcaagttgctcagactctctgtgcctcaatttctcatctacaaaatggaaataatactagaacctacctcgtagtttgaccttgggattacattcattagttgatacccataagcattctgaataatgcctcccatgttataagcactcagtaagtgttagttgttatgatgctcataaagagcttcacatctcagtctcatcatctgtaaaatggggatagcaatccctgcctgctccagtgatgactatgatgcttctgtgagaacatgagaaagtgcaaagacttggagtgtgattaagaccggccaagggaaaaatgtgattttagctcatacaaatccatccaaagtatctccaccaaataaaaataatgtgtaagtttcttattattacgtaataagtaccatttcccttaattttccacaatggttcactttgtgcttttacaaacattgtcagtaatgaggctcaaattgctgtttggcatcaatcggcggtcactacttcacatgtcatgaatttcattaaagagaagcaagtcagaggtagacatccagatggcacaagactctaggtaaagcccccttaactttccaaggatgtggaacagtctatgaacacatgttccaggcaaggcagccacatgcaccatgcgcacccaggatgtgaggattagaaccatggcaatgggtttccctaccacacaaagtcctcccagcccagccaaggattagtaggaatgaagtggtaggactagatttgctgattctcatcaacaaattcatcatttactttactactttactcaagatcagctcagccagcttagctgattctgtagagaagtctgatctggtgcctaaattctgcccccaggaacaaatgccccgctaaggaaactcgatcacagaagacaccgcccattcttcctca

SEQ ID NO: 1884061 - DNA, 4001 bp, Homo sapiens
ttctgtgttaaattttattttatgaaaagtgctgctaataactttgtatgcatttaccatctcttcatggacacaaaggaaccattaagggaaaagttggccttagatcaaaatttctcttcaagagaattcatatttgtaaaatcaagaagcaagttaccatactaaataataaaggattccctgaggggccagtctcttctttacttagggtgtcattaaggtttaatttgtggtcacactactgaaatcttatttttagaggagaaaaagaaaaacattaaaaagaacatggcaaaaattcttccttcatgtcaatcagtagactccatcatattttctcatcatttaaccacccccatgactacattcctcctaattcagtttaggaggatgaatattctacagatccatagtgcaaccactcccattgcccatccttcagatctcttgcccctttcattctaggtcccaccccctggcaaaacactatccattggtaaacctggctgttgcaaaccgacagccatttccacttgtacttgaccatgaaaaattcttggttattttggaagagaaaacagtagtgtggaaagttctatgtgagtgagggttggctactttcctgccacctggttataataaaaccaagtcacagattcaacaccaccacgtatttagacatttttatacgtaatcgtttattagcaggcagatggggagggttctgcaagcttcgtggagactgagctccccgaccttttagagatctgtccacatcttgccagagactctctgggtcatacacaacatcgcagaaagaggactctgtgaccccaacgcctgtcaccaggcaacaaaaaaccgtctgactcattctaaacacaggcccagatagggatgtaatttgctattctaagtgtaagtaatgtctctaaaatattttaggccacccataccgctttactaccactaatctttgtaatctcagcactttgggaggccgaggagggtagatcacgaggtcagcagttcgagaccagcctgattaacatggtgaaaccccgcctctactaaaaatacaaaaattagctaggcatggtggtgcgcgcctgtagtcccagctactcaggaggctgaggcaggagaatcgcttgaacccaggaggcagaggttgcagtgagccaagatcatgccactgaactccagcctgggtgacagagtgagactccatcaaaaaaaaaaaaaaaaaaattcccatttccaacaattgtgttaattaatgagtgtcaaacttcacaaagaaaaatgcactcttaatatttattaagctacttttttaaaaagcctggagttgaccagggatagaaggaatcaaattccttgttgtaaatgcctatggaggatggactttctgacaccctgagagtgaatttctaagacagcaactgaaggccccatgagcagacttcaactttctaatctggagggaagttttaaatgatgttcaggatacaaaaggctaaagatgtgtgacacatagtacatgcaagtggaatttgtttcccttgtttaaaactaatcatatcttttttttttttgagatggagtctcgctctgttgcccaagctggagtgcagtggcatgatctcaactcactgcaacctccgcctcctgggttcaagcgattctcctgcctcagccccccgagtagctgggattacaggcgcccaccaccatgcccagctaatttttgtatttttagtagaggcggggtttcgccatgctagccaggctggtctcaaactcctgacttgaggtgttccgcccgccttggcctcccaaagtgctgggattacagatatgagccactgcccccggcctaatcatatctttttaagcaatcaattgtttcctagagaaaaatataactaacttaccttttgaaattaagctcttcccttttgcttcaggaaaaactcactcaaaccaggcttctcctctgttctcacactagaacaataaacacagaagacttctgtgaccaaaggtgtgggagtttcttctcaccaccaagcagtggacaccagctgggtgtcctccaactgaattccaactctatctacctggagatagtgaccaatcccattggttgtaggctcagtccccaaccccctccttcctcctagttgcaagtccaagcctcctgaactctgaccaactggcatcaagtcagggtttccacgactctccctgggtttgattaatttgcaagagcagcccacaggactcagggaaacacatttactggtttattctaaagaatgttgcaaaggacacagatgaagagatgcatatggtgagatacatgggatggggtacagagctatcatgtcctgggcatgacaccctccagggccctccacgtgttccactaactgcaagccctctgaattctgtcctttttagtttttacgaagccgtgactgattaaaccattggtcattggtgatcaacttgaccttctttaatgtgacacatgtgctgcctaaaaattcaattctgagtcaaacttgaggtacacacagatgtcattgtcaactgaagggctacaactttttcccttgctcttggtgtttattaaataacagaaaatttgttcctatgtgcgggaagttgcaactgcagtgaagtgttcatggtttccctgaggctgacagagcactctcttacccagaaacccaggactcgcctccagagtgatatgtgagtcccatctagagagtctggggttgcatggggtgcaggattcttcctcttctctccagactctgttctcagactgagtcaaagattcaacgaaacgctccctcgcctggtcatgcacttgtgtttaaagagagggtaggtatggttcagtttcattctacagtgctgccaggttctgctcaataagaattgagacttactgatggccccaggcccaagcaacaatggaaacatctcaaggatttcttttgcctcatggttttttccaaaactttagttttcttttaaatccaaaaactcttgacatttttggtgaaaacattttctccagggctgtgcagaggcttattcaactggttgatgttatgaaaaacatctgccaatgtgactagtgttaataagccattctccatcttcaaagcactccaaaaacctggttttgtgtcatcttgaaagtatccctcaagcacagtcatgacatttctgtttggaggagaagatgatgtctctttatctgacttttcacaaaattttaaaaatctcagttgaacttatccctgtttgactgtatttgcaggagcattcaaaccttttgttactttcttttctttattttttttttttgagacagagtctcactctgttgtccaggctggagtgcagtggcgaaatctcaactcaccccaacctccgcctccttggttcaagtgattctagtgcctcagcctcccaagtacctgggactataggtgcccgccaccacacctgtctaatttttgtatttttagtagagatggggtttaaaaaattctgagcaaactattgcaaggacagaaaaccaaacactgcatgttctcactcataggtgggaattgaacaaagagaacacctggacacaggaaggggaacatcacacaccggggcctgtcgcagcgtgagggagggggaagggataacattagaagatatatctaatgtaaatgacgagttaatgggtgcagcacaccaacatggcacatgtatacatatgtaacaaacctgcacattgtgcacatgtaccctagaacttaaagtataatttaaaaaaaaaagagagatggggtttcaccctattggccaggctggtcttgaactccttacctcaagtgatccgcccaccttgacctcccaaagtgcagagattacaggtgtgagccactctgcctggtcattccaagagtttttgaccccaa

SEQ ID NO: 1884062 - DNA, 4001 bp, Homo sapiens
ggagagatgtgagtcaaagggtacaatgttttagttagacaggaggaagaagttcaagagatctattgtacaacatggtgattacagctaataaaaatatattgtatacttgaaaattgctaagagattagattttaaacattctcatcacaaacaaataatacttatgccaggtaaagcatatgttacatggcttgatttagccattccacaatgtatgtatctgttagaacatgttgtacaccatatatacaatttttactttcaattaaaaataaaaaagaaaagaaaatcagtgatataatttaatgatcatacattatttcattgtacttttaaaaaattaatcagttggtattcctgttctgagcatttttaggttggaattaagtctaccaaattcgtgctttttattccaatggaaaagatgtcttctgtctccaaaggattcatttcacccatgattaaacagcttttcagtacaagtccagattaaataaatactttaggttttgggggctgcactgtcttgtctcaaatactcaactccactgccacatagtgaaagcagtcagagacaatatgtaaatgaatgaggatggctgagggccaataaaacttaatttgcaaaaacaggtggttggctgaattttgctgctcagctgtagttagccaacgtctgatttaacctctgtgatattgaggagataatctgtctaacattcagaatgagcattaaatgatgcagctttatacctgacacattgtcggcactcaacaaatgtctttcttcccttcccagcagctgtggttgtagtagaaatcacatgtgcttgcatccagaaaactgttcaagttacggcacgaattagctttgtaattctctgagtttcagacctgtcatctgaaaaaatcaggccaacttttatctccttttgagctcatataaaatttaaatatgacaaaaatatgcaaaatttatgccacagagaatgtaccaaagatcagctgttacaaactgtctctggggatttccatttcaaagtgttgttagaaaccttgaaacccaaagggcagataaatcactcattatttctcatcaaaagtagcagattttggaattctcaatggtgtttttggtagaaatcaggctccatgagaatatatatttaggtgtccctttttttaattctcatagaactttagaaccaaaaccaactgtcaagatgagcccatcattctcattttacaggtaaggaaactgagactcctagagattaaatgacatgcccaaagtcactcagcaactcgggaagggttcagaccaggactccatgctcaggactctcagtgtaggaatttcatactataacaggaagtcaccctactataacttgaagtcaccctactataactggaagtcacccacttcagtggttttcatgctgagtaagcttgaaacaagttctgcactctttaggccatctggttatccatgatcagattagcaaatgcagaattacttaacctgcttatattgcaaaggaaatggctctggccaatcacagagtaggacattcagtaaacaggaagggtttcccattgcacctccactgtatcaagtgaggtattcagaggacagactggctgacattcattgcttgggatagggtttcagtgacattactgaacttgtgcacctgcattccataggatcacaccttggagggcccatgacactattcttccctgctgatataacctagaaaatgtcactgcacaaactatatggcatatatggcattttgaacacactgaacaatgacatgacattttgagctgctaaaagcagagctacatggtgtctacactgcgcatatcctaaataacacccctcccttgttcttccctttccctttcttttggttatcaatcgtctttacctccattacttaccaaattttccattttgtcccttaataagctcaactttgctggagtttttttaactgcaaggtgagagcctcatgattgctatagcattttgaatgcactttttcttctgcttctctttcttcattgttacttttcatataaacagaaacataagtcaggattctcttcaatcaatcttcaaacaaggaaagatcttttggttgctacaattagagtctttatcatttcatttgagagttagtatgtataggtacatatgtattagttacttaggactaatatatattttgccattgccagcctatcctaagtgcttattatatatcttgcatgttaagggacatctctataaataagagtttttagaagtatagtttttaaaatgctgaatgtgtacatttctttatttttaaaactcatctttatttaattaaactcataacatttagagtccatggtaattgaaatggctgataataaagtacattttctacatatatatattatatatatatgttgtatatgaaaattttctgcctgctttcacattttttattaaaatattctgttgattacattcccaataaaaatcaaatgcgtagctatgtatattttgcaaggagagcaaggaaatgcaccttcctttctcacgctttcagaagatccagtatgttctaaatattggccctaattgacatgtggttgaagagtcaatagaaatgtagaacctttgttaccattttatgtcacctcatatttttccatatgcaaaactatttctgaaaatttggagctggaaggcactgtgacgcatgtcactggaatgacttgtggtgaggccaagctgccacttcatcacgggctcccatcccaacccacattttccattaggatgtttccatcaggatcaagttcctcttcagggataagagccgaccatcttgtcttcctgttcttcataaaggcagcttgagaaagcccataatcagtggagtcatcagtagctgattgagttcctcctaaatgtattggtaaaagaaagatctgtgggtcattttagtcattcaccctgatacctccctatcacaatggcttcttctcccacctctctctactcatgtatttaatatgcataatatctggtaccatttcaactttattgaaaggttttacgattatactcttgccctaaatttgaaatcaaaattttcaatatgtgcaagagtacagaatgaaagagcatttattgagataaatccaaatggaagaaaaaatacattaattcaagtatgcaaataaacaggaacattttgggtttcggtgatctaactaatgttctcaataattcatttgagtatgtaaagaagttttaaaggaaagaaaggacaaagtatgggtataattttcatgaattcattttcatcattcaaaagtgattctttctcttctactctccttgaaccattatctaaaggctgtctgcaacctaaacctctaaaaacaccagtaattttagtgtcagtatctacatgttaaaacttgttttggtctaataatttgagatatattatggttctattatttgtaattttggtagcttttttgttctattaatctacatatgaaaacatgttatatgtttaagatttttattttgatatagatcatttattttattcaaaacataatttaaaataaaaatactttcatattgccttgatctaacattcaagaagatacatttgttatgttgaataataaccagaaaggacaaaagtttgaaaacagaaaatggtgggaaataaatcttaccaaatcaaaaaagccccagtttaattttataaagaatgaagacataaggcaaaggcaaataaccactctaatttaaaattatatttcaattagcactttgtaaagtatcttaacttgctttgtctgacttggaaatgagacaaaagtttctgaaagagcaggctctgaaaatatttatgaataagaaaataaaagaaaaaagaacaattgaaagccaataggtgctaaaaaat

SEQ ID NO: 1884063 - DNA, 4001 bp, Homo sapiens
cacattggcttcttaaacttagtaacacacaattaaggttcctttgtctctttttgtggtttgatagatcatttcttcttatctctgaataatattccattgcatggatgtaccagagtttgtttatccattcacctattcacctattgaaggatatcttgattgctttcaatttttggcaattatgaataaacctgctataaacttttatgtgtaggcatttctatggacataacattttcaattcatttgggtaaatacctaagagcacaattgctgggttgtatagtaaaactatgtttggctttgtaagcagctgtcagattgtttttgacagtggcttcactatttggctttcccactagatgtgaatgacagtttctgttgctcaacatcctcacccacatttgatgttgtcagtgttttgatttttttgccattctaataagtgtagtggtatctcattgtggttttaatttgcaatctctaacgaatgtacagtgttgagcaccttttcatatgtgtatttaacatttgtctatcttctttggtgagttgtctgtttagattttttgcccatgtctaattgggttgttctcctattgctcagttataagagctggttgtagattttggaaacaaagtcctttatcagatacatgttattcaagtattgtctttctctcccagcctgtggcttatcttttctttctcttaacagtgtctttcagaaacagatgtttttaatttcaataaagtccaacttcattttctctttcatgaagcatgcttttgctattgcatctaaaaagtcatttccaaatctgaggtcccctagatagtctcctatgttatcttttggtacttatttttaatctaaaaatattttataatcgttataccattggggatagtagagtcataagtttatgatttacatcactgattttatgtaattttgattggtgcaccacatttttgatatgtacagtatttccctactctgagaagtagtgatatatttgttggaaatgggtacatgcttttttatactagattaaatctgtccatttcttctgagtccttcagggaatctcctgagagtagggcagcacacttttattcttgggaagagaggaaagcatacctgctatggaaccataatgttggtcactttatacctccaaagtcatgcccatcgtcatatctgatttactgaaagcttcccgttataagaggggaacatactctacctgattcaatgattggcaactgcagtgaatgaactgctgatgtcttccccaaggaagagctcaaacatcatcaattagcagagatggcggaaggaaagatccatcttctctacgatacgtctgagagaggaaggagacgaagctacaccgtcctcacccttgctagttgtaatgtgcatctttgaagagaaggaggcagatactagcaatggaaaaactatccctgggaagtctatgtttatctttgaaaatgtggctgtataataaagcacagtaagcttagttttttcaatgtaacactctaaaaagctactcattcattttgaagttgttgtcattgctcaagatattcttagaactattgtttggaattagactttttaaggtgtttacaagaggtacaagaaaaataattcaacttgtttttaaatcatgcctccaaataacaactattgaaagaataaattaataaacttaattttaaaacctaaaatcaataagctattgactttttcagcagtaaaataaaataaaaaatcaaggtataattatatgatagaattaatgattagaaaattaagatactgcaaagatctacaagaaactacatgttttttgaacgcttattttccattaaatggagtaataatgcagttttcttccttgtttaccatatctcatactgttttcccttattttttgtttccttttccacccagactgacacttttttacctcaccagtaactacagtattggctaaagttccagaaccttattcctcccttaaataattacaaagaatctaacattctgtgaggttacttactcccattacaacactaaactactctccaaatggagtcagtgctattagaactcatttccttgaagtctatttcgcttttactttttcagccaactcactctccctccctaatttggattataaactcaggggaagggacagtgtcttaccctatatcaactaggtgttcaatgaatattattattattattattaaaattcataatgatgccaggcttggcctaatcaattttaattcagcttaatctctttcaattaagtttaatttaggaggtgctgccctgatatttttcttttacctagatttctaatttacttctgcaataggctcctcctttcatcttttttttcttgcctcataaatttcttctacaggcaagatgttttctttatgccattgctaaggtgcattttatctgacagatgcttttaaaagagactgctttccttgcctattctaaagcattatgcacagctttttgtattaaagctaatttttctcccagtgaattgaaaaaagctgactgaaacaaactcacctctaggcagttacggttcatattagcaagtgggaagggtatctgatgagcagtttctgtgctttggagaaagtgctcctgtagctgtgtggaagatggattaagctgtgcaagagtagagacaacaagatctgtttggaggctactgaaattatccatgttagtgtagcaagagattgtccaaagctctgacagtaatgatagagagctttcagtatatactttgagaaaggtgaccaaagagaacttgctgatgacagggagatgtgaaaagccgatctgagcagcgggtgatacaggagaagcaggggcaatggcgagtgttctgggtaccactagtttaataaataaagacttggaagtgtccgggcctggtggctcatgcctgtaatcccagcactttgggagtccaaggtgagaggatcacttgaggccaggagttcaagaccagcctggccaacatggcaaaacctcgtctctactaaaaatacaaaaattagctgggcgtgatggcccatgcctgtaatcccagctactggggaggctgagacaggggaatcgcttgaagccagaaggcggaggtggcagtgatccacgatcacatctctgacctctagcctgggcagctgagtgagaccctatttcaaagacttggaagagttgaggatcacctttccttaggaaagaatagtaccctctaaagggaatggctgggtaaaatactgaagatggctgaggctggaagtatagaaaatgccaatatttatggagataaataaagaaatacaaattcaagaagtataccgagtagcagtgaacagaaaaataggacaatgaggaaaacatctggttatgtaagccatctggtattttatcatcagaggctctggaaagggagaattgcacatgattctgagcctctagggtgtgctctctgtcaagagagggaattcacttaaaaggcactattaacagggctgatatgtggctagggggctgtagctagcaagcaggctctggtacctctctacaatagtttgaggttagcatccgttctgatatgtcagcctgtgcagtgttacatatttataatatcgctggactgtaacagtagctatcgctttttcgttgcaactgtacttcccatctaacttgttgctctaagaagatagtttcctgcctcttgttcttatataagaccatctctaaaatgtcttgtgacggtggcatgatgcagctgaatgaggaatcatacacacacttggagctcagtcctaagtatgacactcattagctttctgaacttgggtaagttatcaaaactttctgaatttcaattatttgcataaagacggaaaaaaaaaaacaagaaaaatccaaa

SEQ ID NO: 1884064 - DNA, 4001 bp, Homo sapiens
tcatatttgtagtaagatattttttaagtcattactttattttcaggtttgtttttttttttttttttgtccagaactagtcttaaaagagaaaggattgaaagaatgccacttaattgtagaatgcttcaggaaaataaaatctctcttcaattaaatcttttgaaataatctatgcatagcactttccaagccaaggcatgggttgtttcgttgcatcttatgctatgacaaagtcctataattagcacattggtgtaatctaccactgtttcattaaagctgattgcataactatttgggaagttaacatggcttcttgagtacttgacctgccctttttttttttctatgctacagctgttagtaggaagtgagcaaaggcattcattgctgaacagtagtagagaaataatcctggtaaaggttataatacaagacaaagatggagtttcactctgtgcatctcagacctttccatttttaattggtttggttttttgatgagacctcaaatgacagaacaaatatttgacagctaaatttttaccaatttaaaaagtgaactcatatttatttaaattacatttttaatcatttatcttttgaaagtctgatttttaaaagtgaaatgcattaaagcagtgcgtccttgaatttaagaggttctgcaagttgtgcagaaatggtgaaatccatttaaatggcttgaggtagggataagaggtaaataatagtttattttaaaaagtagattaagcacaatcatgttatcaagagtaactctcttctgtgtctttggccactgttgaagaactgtgtacaattatatattttactccttagcaacccacccccagctatgggacatgacacatcagtcagcatggtcctctcaagttagggtagtcggatgatcagagaaaaatccagacttgcataggagcaccaatgccataaaccttcataaaagcagtgcttcagatcaagaggcaactttatagatgttccctactacaacagtcttccgatagctttaatactgaagtagtcgctaacacactcgtctgaaaagagcatttagaaaagaacaacaacacacacaaaaaaaaccttgttgaaaattctgcacaagcaatttacatcctgacagaagaaggatggggtttattctctttcataattcctctgctacacactcgcaataccctgcacgttaagtatcaggtttttcttgctaaaattaaagcggttttctataggagacaccttaggtaaaattggcaatggagaccaagtttatttccattatttttagttatttgcacaatacataaatacgaaaataaacttcttgcatttcgttgtggagactttttcatttgaatatttcatccttcctagaagtttctggggttgatgggaccttcatcctaggccctctgtcccttaaactattcttagtatgatgcacctccctgtagccctcccaccatccccaaaaaaagaaagagtcagagcagaagtggaaaccttactaatcttggtatttccatctctatattcccagaaatttcagtgtttaggaattaaaggaaaagacaggaaagaatgtgttttggagcaggagacaggaacagtaagaaatgcacaagatgtcactaaactgtcatagtaaaaatagtgttaataattatagatgtttagaaaaagaaaaaaaattacaccccaaacagaaatcaaacccaacatcatgtactatggtgtatcaattaaaatgaatgggagttacatgcaaatacctcaaataaaatacctcaaataaaaaatgtagaatacctttccactgatgatttttagttgtcaggacaagtgagacccaaacagcagacagaatggtcccagcatgcttgttgcctttttttgtttgcacagtggctgtcagttccagccttgcaggtagtggaacccagccggaagaaggggcgggacccagcattgcagcctgaactgagagcaaatttaaattactgagccttttttttcctttttttatttttctactctgcgacaaactgaaaagattccagcacgctaatttaaccaccctgcttcttctttgcctttttttttttttttgattttttttttttttctctccctgcttctaggataattaaaagagaaacctgtaaaaggcaacattcctgtgagcgagttggtgctgcaacgtgctggtaagaaaacgagtttaatttttttcatctttttttttttttttttttttttgctttttctttttttaaagagctgaaggctttgtctgtctaatgcagtcataagcgtggcttccctgccgtgaggggttagcgtataatgaaaaggtgtaatagcctgatgtacgaccttcgcgtcatacttataatggttaataacagcattcctgtctaccccgatgatgcttctctctgcaaatggactatttgcccagttgcaacagggctaagattgtcgcactatgacaatgagttgttgattgtttggagttgcggtgtcctgtcagaaagatttcttgactttctccaagttacttccttccagggatgttacgggttttaataggtaccttgcagaccataacgagtctgctgtttactcatcaaacaggaagtgcaatgatgaaacttttttttaaggaatcctaattgtcttagacttccttagttcagataatgaaacagactaaagtgagtgctcagtaaagtcattttaatccctttcatctgtaactagtcaggagttcattagccaactaagaagaacctacatcatttgcagaccttgtatttgagatgctaactttgttcctcaaaaggacaaatttttattcaacccaattaaattcaacaagtatttctgtgtatactctgcctggaacggctgctgagaatgtgcttgcctgttactctgttgtgggggaataactgaaattagatagtgtaaattttcagcaaccagattttcttactacctttagcactgaccagatcacttaagacatttcagaatgtgtgaccgttggctataagataaagttctcaaggttacatatcctacaatcaacgaacttctgttctttttctgcatgtaacttttgctcatgtgaaaaatgcaactctggctactatattttacatcacatcttaatgttataaagaagaaaaaaacatagacatctctttttttgtacactaaacatgtcatttgaaaatatatccatgtgtcaaactttgagcttatccatattttagcctcagaagcaggaagacacacggagaggtttaggcttgtcaatgagtctgcttggatttgggtcaagaaacttaggaactacaatttctctgtttgtttggttgtttgtttcctttaaaagcacgtgtgaaacagcaaggaatacattttgctttcgccccattgttctttgtaaactggtgtagtttttatttttttattttttgtcctttggttttgaatagataactagaaatgtaatggggaggttgtcaaaaacagaatgtagttaccaaatgtccattaaaacctttttctaaaaaaaaaaaaaaactcctatggattttgaaggttgtatgctatttgcatcttatagagaatgtggcattccatacgctggtaacatttggtctcgggtctctatagctattctatctaattgtgtcgctctatatttaacagctctgaaccatgccgcccctgggtcctcaccggtgcccccagagcgcttgaaatgtctaaaaagaccttagaacattacaaagtgtcaattgttagaataatttctgcctctttacaacaagagaaaatgctgtggagttaatagttcatttttaaagtctgttcttatccaccggtaactgtctattagcaacatttcagttataattggaataaattgttgcccagtaacaagcgactaactcctt

SEQ ID NO: 1884065 - DNA, 4001 bp, Homo sapiens
acccaagcacattttcatctttcaccatgctggaaaaatcccaagtctttggtaagctcgcaggtaacatgggaaaggcaggtggggatccatgcacaggtcttcatgacatagctgtggatggctgggttagacacacactgggcaaatgaacaggtgaaggggtgcatagtgagccagccttgtagtaatgaaacccggttattcagaggcccaggtgagcagcggaaataaaacagagttgccatcaactaaggtcaggttcttctggtcaatgttccatcctcctgtggttcaaaatagatgctacattaccatgaacatgagagttaggccaagttctgtccaacatgcagacattaggaaaaagcaagcacagacacaatcacacaatctcttcctgtaactgggggaagcttctctctccggctttatgacaatgcagaaatatcatcagatgtggtttgttgattcctagattaatggtttatatatatgtgtgtgtgtgtgcatatacatatgtgtgtgtataaatataaaatatacacacacactatatgtatacacacatactatacagcatatggatataaaggtatacacataatacagaaattatacccacacatgcttatatttgcctatatttaagaaatttgcatcatgcacagccagtgaaactttacgctttcatatctaagccatttcagctcaggttaggctaaagaatactttttcactgttggttttgagaagcaacatgatatgttggaaggagcaacgacagaaagagataggcacaggttccagttctgtccctgttcctagtgcccaggaaggctacgtaatctctatagaccttggtctcctgatttggaaaatagaaataataaaccacacacacatcatgttgttctaacagttaaacatggttgtggaggtcaagcatttaacatgtgtctggatccattaggtgttaagaaaataatatgtcctcccctttcctcttctcaatatagtaaaataatcagatgagcagcatttcaccaggacataaagtgcttacaactggaaggaaaaaccatttttcaaggtgatgtagaccatttattgtttttatgtaaatgtgattgtaacttaaaacaagctgtatctagtgaccagtggtgaccttacagtgtcttttcttggcagtgctacgttagcactggaaactggttcaagttaccatagtttgcttgcttttttaattcataaggacatctttctttgattctactctatgaaacatagactgtcaactaattctgggtaatctcttctccctacctgcaggattttctgtattacaagctctggtagtatctagattaaaccatctaagagtaaattcctggaagtcaaggtcagagagcttttcttacacagcctcccatcacccaatccaccatggcttaccagggttatcctcttaaaattccctcctgtcctgtatgagtctcctcagtggagtccgtctccattccagctgtgtgtagccataagtttgacaaatcaacgagttcctggacaccttccagaatctgtggaatttgagtccggcagcgactcaaaaatggtaagggggaggagctagttttacagccaaacatgcgtgcagattaaatcagtgccctgccagatgaaatgcttgcccttctacgtgttcctgaggcgtgaccctctgaaagcatgaatccccatgggcattgcgccaggacacaggaatcctgctgctcagcacagcagttcatagcattcacagcgtctgccatgtcgtttcaactgttgattctgattgctgttgcttttatcgtctcggcatatccaacactgcagctatgaaatagctgataattcatctcgttgaagacccaggtcttaaacatttgcaccatctgaatctgaccctcaggtctggacaagtagaggcctgtagcatggaacctgggtcgtgccgagtgggcacaaccttggagcatacatccccctcccccatccactgcttcattatttgccgtctccatggaaaccccattctgtactgtcagaactcaccttggccacctttgtacttaccacctaagcactttcttggtgctatggtactacatatgaaacaaaaaaaattttttttgagactatcttgctctgtcatccaggctggagtgcaggggcacgatctcagctctgttcagcctctgcctccaggtttcaagcaattctcctgcctcagcctcccgagtagctgggattacaggcacacaccaccatgcctggctaaattttgtattttagtagaaccagagtttcactatgttgcccagtctagtcttgaactcctgccctcaagtgatcctcccacctcagccttccaaagtgctgggattacagacatgagccaccgccctatgcaaaatttaaaaggaacttttggtgacccaatttatacagggcaacctccagtcttttaacacctaagttattagggatttcatcttgaccagtgggtaggtcacaacaggatcccggtggtggtgaaaaacccatgaacacgacacattcatacccctggacttcccctcactccgttcgcttcttctacagcagcccttggacaagcaaagacaatgccaacaacatcagccatcatccctgagatctttcccatcatggacaccagccaagtaataagtgaccccagcccccagtgttattttgctttgggagggtatatccagggtccttggtgtctagatttatccacacaaccacaaaaccaaccacacaaagactgatgggcagattaagtcaatcacctaggaactcaaggaatgggacatttcttgcagcaactcaatggatctaattcttcatgacctagaacaccctcccttcccaccaaagaagcttccagcttcatcccatctgtcaccttgtagccctcccttcagctccattaacaagccagcatccaactcgccctcactcccactactgcccccagcctactaaagggactacaagaaatacaccaattattaagagccccagggagggcatatgaataaaagacaccacctgtcaccaacctctgagctgagagatggaggtaccctgggtttcctggacagctggtaagggtgcaggttacaaggggttctcgtagtgtatgtcttgtttttgtttcttttctctatttctaaagctattatttttttatcccttctttttggctctttctctctttcctttcatatgaattataaacatatgtatatatttctctgataatcagtatgcctggctatacttgaccaagacttttgttaaagaaacaaactttatatctgggaagtgcaggtctggggactgaaaggaaagctattttccggaagcacgttttattgcttttatgactcaaatatctccatctcacctcattttcctttaaagctaaatatgtagcaaatggagatgtactgatatggaatctcagtgggaaatgattgcagacaaaaagcttattagcgtggtttcttctcttctaaaaaaaccctcccctttcccaaaataactgataaatggtcctttgtggagatggttgtgatgcagcttcaacagttatgaaaaccctgctttacatcttgctggaaatgagagcatgcatcacagttctggatggcaaatttggtggcttgcttcttgtggtaacttaactgaggctcagaaagcgttaggctttagaagacaagttgactccaactcacagaattttaatcttataatattttcgacttttaattttccaaataatgtttataaagtagaaggacggaggatatgtgaatccaactctgttcccaaaatggtatagccacggttgttatttttggctttttcttcttaatatcttcacttggctttttgaggatattatctagagaagtaagaacttctga

SEQ ID NO: 1884066 - DNA, 4001 bp, Homo sapiens
aagttaaaaaagagttaccgtgtgttctatcaattcaactcctagttatatacctcgaagaatcaaaatagagacttaaacagatattcatgcagcaatgttccccatagcagtattcacaatagtgaaaagatggaaactacccaaatttccatcaacaggtgaatgaataaacaaaatgtgacatatacatgcaagggaatattattcagcaataaaaatgattaaacttctgatacatactacaatatggatgaatcttgaaaacattatgctaagtgaaataagccaaacacaaaaggacaaatactgtatgattccacttaggtgaggtacctcgagtctcataaagacagaaggtaaatcagaatttacctgggattggttggaggggaatggggtgttaatgctcactggccatggagcttcagttcagagttataaaaacattttggaaatagtggtaatggtagcacaacactgtgagtggaattaatggcattgaattgtatacttgaaatggttaaaatggcaaattttatgtgatatataccactgttttaaaaattaaaaattaataaaagtaacattactgaaaaccattgaattgtgtactttaagtttgtgaattgtatggcatgtgatttatagctccataaagctgttaaaaataaaaatacaaaatattcacctcgaagtcatgtttactggatgtaacatagattggtttttgttttattctttttttctcctttcccatttgtaatagtttcagactattataaacacttccatgcttttatcaacactaaaacaatgttgtcagttaataagtgaattccattagaagtataaatatgctcgctaaattaaaattggaaactgccatcagaattatcttagttctgcattgatctaggtctcttgtcacacattcagaatgccacttcgcacagtatctgcacgtaatggatataagataaacttaataataatttatatgaatgcatgataagggagaaaaacttatatgatccatgcaacttcctttcctctactcaaaatttctaagtcagttcctttatcatcattattcctagaggtggttatattctttagaacctcaattcttacaactcacttattcattgggggaaaaaaaatcaactgcttaagagctaccggcatattgacaaatacagtaagtcaaacattgcatttttttttttttggcctgatgaagactcatcattacaccattgagtttcagaactggcaggaaactttataatgaaacaaacattttatttccctcatgtaaggatccaccattttaagtaaaattgcctgtgtttgaatgtcaaattgacatagttgatgaaaatggaaaatcataatattgaacttgaaatactaaatgtatagagtgacactagcaatttccttcatggaagaatctgtggacggtgtaatagtttaccttataaataaataggaaagacattaaaatttaagtctaatagtccagggattttcaagaatgggagatatatctttaatctaggaaaaataaaagcaatttgagactactaaaaaacaaaagttgaagtaggaaggatttgccattcctcaccttccaatactcacactgaaaccctttcttcttttattacaactccacatccttactcttaaatatcatcttccttctttgtagttacccaaatcttgaaggccagacaccttcaaatgttttttcattttaatagaaaattatttcagacttaaaaccctttcagaagacaagtagcttcaataattgaattaacagagctgagaattatataaatttacctggcttctgcctgctgaccgtggtctgggtcatctggagtcccagcagtttaagaccaaaaataattgcttcatatcaagatcttttgtgttgcttctgcctcacacccttgcaactgacggccaagctggtcccttcagctcctggttgtatgctcaggctttgaccatctgtcctgtctagccctgtggtttgggtttcctcctgcttcctgatttcatgcctgatttcagcctcttaatttttctgagctcttggtgtcagtgtctgtcttatctttacttagttcctaatttctattatgttttgatcatccctacttccatgtccaatttttcctgctttggtattttgatgcatttcaaaactacacttcactccctacccaatctcaactccaagatcatccctggctcagttcatgcactaaccatgctatgtactgagattactactccgagaatttaacatagactagtcttgaataaagtaaaggcaaagagtcaaacacaacttactcaaattaatcagagcaactaataagcattcaattagtgcttaaggaattaacagatatttgttgactcaattcagacttttttcaataataacccacaaaatagatgcatatggccctattcatcaataagcaaaatgtacccgcggtgagggtgaaacatttaatctattgtatatttaagccagtggagatcaggaagcttaaaagacactgaatccacagggacaatgtattgccagccaaacataattagctagattagactgttaggctcactgatgctgcagtttctttgaaaaggaccatgtggtttggtagatgacaataggcagttatgcctatggcaatttgttttcagaaatcaaatcagtaagagcccccttcttgctacattttattttgggatttagaattatattactgacaaacattaattttcactgtatcctgaataggcaaaaaatatacattatacatacattatacattgtgttatacaattatcatacattatatatttgttactcgtgtcattaagctcttaaaacaatcatcctggaattggtcttccattctccattgtgtgtgtgtgtgtgtgtacacatgcatgtataggatcctttcttatgtgtgtgtgtgtgtacacatgtgtgtataggatcctttcgtgtgtgtgtgtgtgtgtgtgtatttagttcttggttacttttttttgttcctacgatggacattttttcttcatcagttgtcaccaagtagtccagggctgcgtgtcttctaataagtctattaattctttttttttttttttttttttttttttttttttgagacggagtctcgctctgtggcccaggctggagtgcagtggcgcgatctcggctcactgcaagctccgcctcccgggttcacgccattctcctgcctcagcctcccaagtagctgggactacaggcgcccgccaccacgcccggctaatttttttgtattttcagtagagacggggtttcaccgtgttagccaggatggtctcgatctcctgacctcgtgatccgcccgcctcggcctcccgaagtgctgggattacaggcgtgagccaccacgcccggcctataagtctattaattcttaagtaaagtataaaaggaaaataatcatatggagcccagttaattatagtgaattatgcacatgtagtccaatatgtgatattaccaagggcttgctgtttttgagtttcatgaaacactaccctaaagaacttttcaaaacagttgtatttaaatttgctgattaaaatgttaaagactatgactcatgtgctacagatctttatgacagatactgtcatggaaaacagtcttcaggatgtagtggtttggcactgtgcagtgtaaaggacttcaagatggcctttctttatcactagtacagcttcatattacattgttctttctaatgttggacactttgcactgagtaatattttaagaaatcaacattaagactaacttttgcaatttcttttatttgcctgagtttatttggatctaaacactcagagttcaaattacatttgctttcctgaatgtggttgccttggtgtcctgcaaaaaataaaaaata

SEQ ID NO: 1884067 - DNA, 4001 bp, Homo sapiens
cacacgcatatgcactaaagcagaagattacacatatcatttataaatacatattgttctttagaaaagttattattatagttatagcaactaacatgtctcataattgtatgtaggcaaatatacctccttcccacattagttagaataatctttggatacagtaacagaaaatccaacaatgttttaaaattgttttaaaatatgttttaaaatataaaagggtttatcatttacctttgaaaataaaaagtcaggaagtagtgtcacctaatgttggattgctgacttaatgatgcctaatatctctccaattatttttggcttatcacctcatagtccccagatggctgctatcctgtaggtattagatctgtgctcaaggcaagaagaagagtggggggagcactagctacaatcatcctcttttaataagaaaacagaagcatctttaccaccgccaccaccactatcacttccagcaagtttctgctcacatatcagtagctgctaggaattttccaatgcttttgtatagccatgcaagaaagaagagtgttagcaagagctttcgactcagccaaccaacaatgtttgccataccccaaatgctgaactcctccacagaaaggatttgagcatatccatatttgtatgcccagttctcagcagagtttgacatatttgtagatactaattaaatatttgtcaaattatactcctttatggttaacattatttcttctaaacctaacaattgaattgacattttcaaaaacacatttaccatgaatcttagacaactataatataatagagaatctacaatataaatctataaaatctcatattattaaactgaaattaagattatttgtcaactatgtcaatataggccaggcgcggtggctcacgcctgtaatcccagcactttgggaggccaaggcagacggatcacgaagtcaaggggtcaagaccatcctggctaacacggtgaaaccccgtctctactaaaaatacaaaaaataaataaataaattagccgggtgtggtggtatgtgactgtagtcccagctactcgggaggctgaggcaggagaattgcttgaacccagcagacggaggttgcagtgagccaagatcatgccactgcactccagcctggggcagagcaaaagtctgtctcaaaaaaaaaaaaaaaaaagctagcctgttctgtttttaataataaactattcagaaggttacaaattcagtagaatacacaattgctagtgaaaaaacagaaatttacccatagagtgcaattaggaagccagaaagtgctttacagtgctgcattgtctttctggagttaaacttaaaactttactgtcaatatttatggaaactttcattctattccataacatgtacatgttggtgataatataaatgagtattttttccctaaaatttttagtagaatttcaccctaggctatgtgtaactttaataatgatgatgataatgatgacgatagcaaatatatagagtgcttacatgtaccaggtacttttctaagcactttatatgtatgaactaatttaatcctcataataaccctaggaggtaggtattatcatcaaccatacatacagaagagaaaatggaagcagaacttgaggaagtaatttgcccaaggacctacaggttgcatgtggcagaggtggaattcagtcccagatcatcaggccccagaacctggcttcataaacacctgcccttgaaacccactatggagccccaggagtacccatccatggttttgaccaacattacctcctctgtcatttcaagaactctataggcattatctttaggtttaatatatgaggaaacagaaacttaaagaaattatggtaacttgccaaaaatcacaagctccgtagatacaagtcaaacacaactctctctggctctggagtctacattcttatccactgtgcagtgcactgtactgacagaaggggaaaaccctacagtgtgtgatgcacttcctatgtcacagagtatgaagaatgtcacaaggtcacggaatttcagagctgaaagggatcatctagtccaacccattcatttcatgggtagagaactgaaacccagagaaaatagaaatgccaccacctcggtgccagatctcctagatgcccacctacaggtcagtcctctctatagtatcttctccccttttccctttaggttgatttttcatttaaaaattatttgatataatataaattgttatagctcacaattgtgaggaaattataaatatttgcctttatgattttagaatgatgaaaacctttgttattctgcagactttctccaaagctttatttcaaaaagcatcattgttctttttcatcttagaaaacataaaacctacttgcttgtcttcaggaaccctacgaagataaaaattatcacaatttatacccaacatacctaaagaaccctgtccattgtgccctcattggttgtcctcttaacttggacaaatgtaatcacgtctttgatgtatttccagcttcacggtggttttggatatacacttctgtaaaatgatcaagatttttgttggaattcacgagtgtttgttaaagttttattaaaagcgatcctagaaaatataactagagcttactataatatgttctgcaggtgggaaaaatgttacagctccatgaacataaagcaatcattaattagcagcaaagacacgccattttcaatcttatcttttcatgattttaaaaaaaccaacacttttcccttatattttccaggtaaggcatcttaccagttcttatgcactgcaatggccactaggtaatattctttaagcaatactgttatacatattattatattacagcaatcctaaacgagataggaaagacatcatctttcattttctacatggagaaattaaggctcagagaagttaggtgaaaagactaaagtcaaaaatgctaatgggtgtaagaacctgactcaaattcagatctgtcaaatgcatctggtgtctgtccttaatactctattaagttgcctctcttcatttaataaaattctctaccattcaaaattaaagttgtatatctataatgtttgctgtttatttcagtgagtagttatttcagtttttaatagatatgttttcctttattaggatttgttaaaactaaaaaaattaataataacttcaaacaatcattgttatcatttccaataagcaaagcagacaatttaaagagacagaattctcagacatgcaatgctatttcaaagtccattcacgtgctgtgcaaaaagtcacattaaaacactttatactgaactataccatgacctcggcaaacacagtactcctaaaagcacagttatacttgttgatggctatgagtacagattacttccttttcttgatacaaaagtattaaaagtattaataccatacagttaaatctgaggaataattaatttgaaggaaggtaataggcaggtaaagcagctcagtataatcaaaattttcctttaaagaggttgacagttactctgatgtaatatcctggaagtttttttccaaatgtgcacttctgatttgcatgaattttaaagtcattactggtgaatacagaaaagatacaggcccactctcacaaggatgtagattgatctctgatatctagccttcccagtgtgccatttggggtgtgaaaaggtaccccagagccccaaggtctaaaaacccactaaatcagggtttcccaggactgctgttttataaacactccagagaatttgtctctaaaaacaagtgatgaaggacagagacaaaagggggagtgtaaaaaataaccttttttccccttaaagcaaagaatcaacattagtttgtattttggttcattgtagaagtcgatcactattgtgcactaatcatttcactagaaa

SEQ ID NO: 1884068 - DNA, 4001 bp, Homo sapiens
gaaggcaccagcaccagcagtgacttacgagaagggaaccattgggtccaaggcagttcatggagggtcctctggagcaggcagattggccaaagcaatttaccccgcttaggacactgttttctcttttctttctttttagaaacaaggtctccctccgttgcccaacctgcagtgcaatggagccatcatagatcactgcagccttgaccttctaggctcaagtgatcctcctgcttcagcctcccaagtagctgggactacaggtgcatgccactacgcccaactgacttttttgtcttttgttttgtagagacagggttttaccatattgaccaggctggtgttgaactcttggcaagggattaattctcctgcctgggcctcccaaagtgctgggaccacaggtgtgagccaccgtgcctggccggggctgttttcttgatgtctgtgaagactctgaggccccacagactgctgttgcctgggcaagtcctccctctcccagggtccactggttccttttttctggggtcagagacagaagggatcacaccatgtggcatccatgaaatggcacctcgagccactggtggagtgaggtgtttgatagtgattgcgatgcgggccgggagtgggatgcctccacaccgacactggccaggtctcagcacatcccctcccgtccgatggcagtgcagcagcctcttcttttgttaaaccctcagtctattctggttggtgtcagaggcatttgtccccagaatctcagatcttggcactccctagcttaaaatctttctgcagctccctctcaccttccagataaagcccaagctccttggggtggatagcttttccaaatccttccaaatttaacctgagagccaccttccaacctcatttctgtgacagctgccctcctttggcaaaagcacactcactcttagcggatgctttctcattcctttgcccgtggttcctctccctgggacccccgctcccggcagcctggcagcctgactcctgctcacccttcaacactcagctctgtgtcccctccctgcaaagccagctgcctttgtctcccagctttgacctggatatctctccctgtgcctctcacaatctgagcactggtcctactatatggaaatagctgatttatgcgcctgtatttcggatcaatttcccagggagcacaccgtctttcatctgcgcatccctagcacctaacacatgttactcagcacagagtagatgctcagtaaatgtgtggacatagattgtgggatctaccctacctcctacacagcaagacagcatctgggagaaccctcttacttggtgcataatatatactaataaaagttgcataggattaactccctgaattccctcaccaaataataaatgactccatcagctcctttgtggctgatctgtgaaggtaagaatttccggatgtctacacaaaaacaaaaaatcgagctggctgcacctttgctactctaactatggtctacagaccagcaacagcagcaacatcaccaagttggccaggctgttcttgaactgctgacctcaggtgatctgcccgtctcggcctcccaaaatgctgggattacaggcatgagccactgtgcccagcccccacctttcaattaatggcatctgtcttgggctgggctgggttgtgttccaatgtctccttttggagtggctctggcctaaaaaaatcagcatccttggcacctcaagggccattgtttagtccctgtctcctctcccctccaggagtgttttccctctgcccataggatcatcggctgcaggaggctggctgctcctcgccgcacatcctgtcttccccctcatacctttatccgagtttccccaggctgggagcaccagctctctcttcccagtgatggcatcccaggatgggctccaccgtcgaggccacctctcataccaccgcaagggctgtgctcacatttgccctctccagttgacatgcacattcctacagcatgagccagtgggttgggctcaggctgcagagtcaggctgacttagttcacatctcagctctgcgccttacctcgagggctctgagaaatggccagagtcctcagccttggcaaatgagcataatgatacctagtggctgtgatttgaagacgttgattatatgtccaacctctaatgcagagcttgccatatctgtagtagaccctcaataaatggaaactgaatttgtttcttaatagaaaatggggagttcctttccctggatctcggagggtccaagttccgagtgctgaaggtgcaagtcgctgaagaggggaagcgacacgtgcagatggagagtcagttctacccaacgcccaatgaaatcatccgcgggaacggcacagaggtacctggcaggtggctcctgtgaccgcagggaaggcggtggcatccgtgtgtggggaaaccacaccttagcccatgtactttgctttctcttctctgcagctgtttgaatatgtagctgactgtctggcagatttcatgaagaccaaagatttaaagcataagaaattgccccttggcctaactttttctttcccctgtcgacagactaaactggaagaggtaaggcgcggagggaagcagcagtgcaggaattggggcttggggaatgtgggcacgggtgggagtcaggctgcacgcaggagagaacagcaggagctttcttgtttgtctttttcttttctttttgttcatgatgaggtggcagcgtgaggcagagaacttgttaacgcaatggccttgattttatgattaacgtgggcacagctcgggggagtagaatgcttttcactagctctcaaaccttggtgtgaggaattccttggagggcttgttttaagcacagattgctgggcctactggaatcagtggttctgcaaggaggccctaaattcgcctccctgacaggttcctggcagatgtgatgctgcctgaggcctgcacttaggaccactgacatagccaactagaagaaacatgggaaggctggggagtctctccctgtagtgagccctcaggaggaggattagaatgggggcactggaggaccaggcgcggtggctcacgcctataatcccagcactttgggaggccgaggcgggcggatcatgaggtcaggagatcgagaccatcctggctaacatggtgaaaccccgtctctactaaaaatgcaaaaaattagctgggtgtggtgccgggcgcctgtagtcccagccacttgggaggctgaggcaggagaatggcgtgaacccgggaggcggagcttgcagtgagccgagattgtgccactgcactccagcctgggtgacagagcaagactccgtctcaaaaaaaaaaaaaggaatgggggcactggaggagtgagaatgtcctggagcagacacagagcctgggatacacagtctgaactgtgtcaccagctaggccggggttcctggtaactcatctctgtgtgtctcagttttcaatctgtaagcaggaggaagctaacccaatcttatgtgaataaagacagcaaataaggggacgttctggggccaggttgggggagttactgtcaagagtctagtctccccgggccactcctgtctgggttggggaccctgatcaatctcctcctcctggccctcctggttatgatgcccagttgacagtcacatggacctccttgggatgtgcttgatattgttggcttgagtcacttattggtgtggaatagtgaaagggaatgagctttcatgttccacacacatggctttgaatcatggttcaggacaaattgtgtccccttggaccagttccttaatttcatgagcctcttgttttctctttgagaaaattttatttatttttatttttttctttgtagagatgaggtctcactatattgcccaagctggtctcaaactcctgggtttaag

SEQ ID NO: 1884069 - DNA, 4001 bp, Homo sapiens
attgccttatcaaaaggttctcagggctggaggcagtggctcacaccagtaatcccagcactttgggaggctgaggtgggtggatcacaaggtcaggagatcgagaccatcctgcccaacatggtgaaaccctgtctctactaaaaatacaaaaattagctgggcatggtggcggtgcctgtagtctcagctactcgggaggctgagacaggagaatcacttgaacctgggaggcggaggttgcagtgagccgagatcgtgttactgcactccagactggcaacagagtgagactgactccgtctcaaagaaaaaaaaaaaaaaaagttctcaattttttttgtcttagaaccttcctttatttacactcttaaaaagttttgaggactccaaagaacttttatgttatagcaattaaaactgagaaattttaaaaatatatttcactactaagctcattacatgttaacatgaatagcatatttttaagtgaaaaatacctgtattttccaaaaccaaaaaagtttaatggtaagaatggcattattttatattcttgcacatttctttaatgtctggcataacagaagacgttacctgtttctgcattcaatctgttgtgatatcacatattatggagccactggaaaacttcatcataaattcatttaaaaaatgggagagaaaaaggagtggaaaaaagtcttattattaaagtaattttggtcctgtgaacctcccgaaatggtttcagagaccgccccctgacccccaacaaatttcccctagaccacactctgagaaccactggacttagctcttctagcttctgtagttttcatatgaattctagaatatatttgtctcttaatttgggaggtagtaattatgtgtttaacatcttgtcttctaacttaggattccagtgtctttccaattataaatagtctgtcaacaatcctgcatttttaaattttttcccacttttctcctatatttctcattttttatcattcttagttatttcatgttctttcatgcttctattgtgaatgggatctatttttctattgtattttaattgggtgttgtttgtctctattgagattgtgactttattttgcatgtgagcactcagttgctctaattcttaaaatctcccaggtatgtccaaatggccataattatgttgaataatatatttgctgtgatctgtttttgatgagataacttcttgatttgaagctgttcatatatgttaggcttttgattcaatataatccctattacaagtccactattcaatttctaatttttttttttttttttttcgagacggagtctcgctctatcgcccaggctggagtgcagtgacgtgatctcggctccgtcactgcaaactctgccttctgggttcacgccattcacctgcctcagcctcccaagtagctgggactacaggggcctgccaccatgcccggctaatttttttgtattttttagtagagacggggtttcactgtgttagccaggatggtctcgatctcctgaccttgtgatccggccgcctcggcctcccaaagtgctgggattacaggcgtgagccaccgcgcccggcccaatttctaaattttaaagctactttaagaggaagggtcttgaatatactgaatgaccttttgaaacagatttttaacatcacattttttccttaagatatgcattgattaggattagatgacctctctttggtctcttctataattctcatttagataacatgaacgacagacccattgagataattaacagaatcaaaggatgttttggttgtagttctcacctgttcaatggatgaaggtatagcaatacccaatatgtccctagagactgttcaagagaatctggccatcagggtccccccaggtgagccctgtgtgacaggagaccacagaaggtctggaaaggattgcaaaggaccaagtagagggttggtgactaacgggctgcctcccgagggtagaagttcttgcctttaacttcagccccagccccaaactccttagcagtctgcaaaagggaactggaccctgggagcgatctcattagccactcactatccctcttggacctgaaacccattacattttccgggtccgagaccctcgtagtgtggggaatttcctgggaggaagatactacgcggggccgggagcagaatttgctccaggcactgggccagtccatgagggctccaggatccaggggccccactcccttctcgccgggctccgggccaaggaagcgcggccggagtcccgggaagcccctcggcagccagccaagggccctgcgaggatgtggatggcgcggatggcgcggcctccacctgcgggcagtggagagagcggcgagaggaagaatattccccgcgagccgggataaggggccccttcggctcggttgacccaggtcagatcctcccgccgaccttcggcccgccctctacaggcggcccagttcttcccctgctcggctgcccctgcccgcccctcgagggagcgcccgtagccagcgcccccgtaaagaaataaggaggcgcccggcttcccgcccaggtacgtgtcgggacagcgcaggggactggcttggggcggcggtgggtagcggcgcccgcgcggcgctggaaacggccccgcttccttggaccccggggcttgcagggcgggcccggggctctctgagcgcgaggctgccgcgaccgcccgcccgcccaggtcagatccggaggacctgtgtgtttgtcggggcctggggtgagagaggggactcgaggggagaagtagagcgggaaaccaagagggggaatgtgaggcttgaacgagctggatgggagagctcgaggggaggagagggatgaacttgagggggaaacgggggcgggggtgaactcgagggggagccaggaggagggaacgggaagggtgaacctgaggggtggacttgagggaagatcttgtgggtgaacccgaggagggaacgcgaggggatagtgaggggggatctcgaggagggaacgtgaggaatgaacttgaggagggaacgggaggggtgaacgtgaagtggaaacaggaggagggaacgggaagggtggcgtaaggggtgaaggaagatctttaggggtgaacttgggaaggaaacgtaaggggaggacctcgaagagtaacgaggggcgagaactgagggggccctgcagggagactggagggaggaggcgccgagtctggcgggtgtcgcctcggagacctgtggcgcgcgcgggctttgcggcgccgcccacaggtggcgctgggtcggcccgtccctgagggaactgcgttccgggtgatttctcagaacaagcaggtcggtggagctgggctccctgcaaccccaaatgcatccgtaaaggagttttaattttaaggagaaagagcagacaagaaaagtatgatcattattgagaaatagagaaacctaccaggaaaggatgtcctttcaagtctgctcaccaacagctctgttctgttctccaagtagttgctaactcgcaccttgctactatcccccttccagaaaaaaaattttattattgttagaatggaaattggccataagccttgaaatgactgttgtaatgccactgaaccctacacactaagcgtttttgaaaactcaaaagaatcttcatttctggttgtttctagttttcttggtgaattaactaattgtacaggtgcacttaaaccttcttaagcatttttataattcagacggatctggtagcttgagagttgtttaatgccagcatatgaaatgaggggctttaagttccttgttcattgtgtaaaagtgcgaaaacttagttactgaggaataaactatttgtcttgcccttctacctagaagtttctaagttcaacttctgattattttccccagatcctgaatgtttactccca

SEQ ID NO: 1884070 - DNA, 4001 bp, Homo sapiens
gttttcatgagatttgtatcatcgccctcattaagttgagaacatcttggaatgtgagaccatggagaatacttactggtggccccaaaaagggcagtttcattcgttcatcatagttggtggtttatacaaatgttccttcttcatttgttccttgaaggaacggccctagtccctaccccctgggagtttaccatccagtgaagcggacagactctcaacaggaaattctattataagtgagggtaatgggaggcgggaggatgcaggaaagtgatgtgtgagctgagacctgaaggaagagtatgcgcaagccaggtgaagagaaggacaggtcattccagagagacagagaaaagcaggagcaaagcccttgaggtggggagtagcatggcacatttgaggaactaaaaggaagccttgggtagcaggagttccaggtgagggggtgtggaggcagacaaaggcagaaaggcaagctggggcagagccagtgtagacccgccagccaggggaggcaagctcaacttgttctcaagaacaatgggaacccggatgcctttaagcagaagagaaacatggttggatttgctttttaaaaaaagagcatgctggcttgggctgggactacagggaaacagcaaggaatgctcaatggtccggttttcccattaggctgggagctggccaggggctgagatgaccccatgccatttatactgttctcctctgtgcagatctccctcctgctctgcactggcttcagctgcaaatggttgtggttaacaggctggtactcccccatcagaaaagtagaattctccctccaatactcccccagagtaaggagttggcatgccccagatctgaaggaaagaagggatgaggatgggatgcgggtgaggcaaggcagatttcttctctctgtgcctcaatttctttatctatgaaatggggcattcatggtacctacctcagagagtcgctgtgggcgaggacataattcatacaaaatttttaaatggcacctggcacaaaatgaacaatcaaaaagtgttagtttttgcttttgttcttcctgaaagataggtgggaccctatgagcacggactatattccccactgtccaagaggacggctgatcacatccgcagagagagcgtgaggacccctgggccaggcaggtgtcaggagtaccaaatgacctaagtttcaacaaatctcacgtgcaagtttgggcctgggatcctagtctgcagatgcttctgttcctatgacttaaaaagagagtacccccaggtgaggaaaagggagccgccctgtgccctcctgcgaaacccggttcagcccgaggcctccggggttgggggcgcgactgggggggcgccgtggcctgagatccagctccgagtcggtgggggcggagcctggcctggagcgggcgggcccgcgcggcggaggggcgggaccggcgcggcagcccgcagccccacccccaacggaagtgccgccgggcccgcccctccctcctgaggcccgttcccctcgcccctccctcggcccactcttcatggctcaatttcggctcccggagctggttctaccagggccccagcaccggtccagagaggaggccccgggtccgcgcgtctggttgtgtcgggcggtgctctctgtccttctcactccccagccctcccttccatttctcggttacctgcgcggctgcaggcgccgccggggactgcacaggtaaaagtctcggcaagtgagggcgcaggtgtgggcgcctcctgggccaggcgggcaggggagaggccgacggcacgtgcctggctctaaaaagattttttttttttaacagggattgtattgacagtgggggcttggggagggcagacacggaccctgggagcgctgcagggcactggggggagagaggggcgggactgaagccccggagattgggggccggttcctttacggccccgcagcttgcgcaggctccgtggtgcctgggaggtggtgcgccggttgggtgggggcgggtccaggccgcggcgtcggagaattgtcccccatccagtccccgcgatgactgggttttgacagcctcccctcccgagcgcgcacattcccaggtttgcagaatgaaaatcaataaaatcgatgcagtggcaaagaacgcgaaacatgttgggttattattattatttgtgtttgttaaattttttttctttaaacttttttcttataaaaggtggtttcagcttggataatggcctcagagagggacgaaaaacgccccctggtttcccagcagggtccggggacccgtcttaggtcccaagcctcgaaaaacgtcccagggcggctgtgcggggtctggcggcgggaaagaagcccggggcacgctcggtttccggatacggctattcaccgcacctcaccctctgccctttagggagatggcccccctccaccgatatttccccggttcaccacccccacgccccgggaaccgcgcctcctcccctcccccgcgctctccccggcgctttaagtaatgatatttgcatgcagggagcgattcataaatatgtcagggctggtgaaatataggcaacatttcaaactttctatttaaaaaacatgaattatggccgcggaaaatgtgttcccatttaaaggcgatacgaagtatttggtgtctcgtccccgggcccatccatcacgcagacaataaagagagtttttcgccctgacacccgcgatttatgggcgcccttctctgccctcatcactcacgcgccgcggccggcctggcgacaggccccgcggagagacgcgcggccgcccccgcgcgggccagcgcgcgcactttgcgccctcgctggccccgcaagatctcggctcccagagggaagcacccgctcccaggagttgggggatcggtcttgagggtctgggcagccgagtgggagcagaaaccacactggtcctcccacccgcgcagcctctcagggccggggccgagcgcgccgcggcggggttttgctagcctttgctgtgtcctggcctcaacggcgccgcgccgggaagtttgcagggcaggcggcgggaagttatttaagcactggctcgaagtgaggacagagaactgggcagggggttacccaggccaattcttgggccattccgccccaaggaacatggagctgtccccaagctttcttgagccccgccgggcggacgcttctcggctaatctttctgcaacttttacaaagctgcctcctccccagtttgatctctgcaaacacatcctgggcgtccgcggcagcttggaaactatttttaccgtctggggccgaggagttgcattgaaataaggaaggcgaggcgccttctctagcgtttcaccccggaccaggctgggtcacccagtggcctctttgctcccccgccccacccttcgtgcgccttccagagccgccatcgaatctctcttgctaacttgcagcgctctgggggttctccagacacaggcgcaggagggagccttcgtcgaggaaagttccggctacctctgttggggaatttgctttcatttttcaccgcgggcgaacctggccaggcgggtttccgaagcactggcagaggtgggggctgccaggcactgccaggcagcgagaggccgctcgacctgggggcgccgcttgtccagcctccctcggagggcagacttgcagccacccgggcactagaaaccacctcgagtcctgcgttgggccgaggtgtcggcgtacacgcgagccgggagccgtttcttgcaggatgcctgcgagctggatgtattcggataaatgcagcgcaaacgacagccagagaaatcccgtcgattctaaaaatgacaaggttgaatttattagactgagagtcatgtttaagtgcagggagatgaaaattatacaaacagctccacgtccagtgtgaacacca

SEQ ID NO: 1884071 - DNA, 4001 bp, Homo sapiens
tgccccaagggcagaaaccaatgtgatagtggtcaggccccttgactaagtccagtgataaaaggagaaccacgcacggttccagcagcagatgctggagcctctccttctcagtcatcctgggcaaggctttttgcccaatgggaaaggatttagaagtgaacctaaagagctctaacactgggatcccagggcaatgttgatagtgggggtctcaaaagtgggaaactcagcaccatccatatttctctggacccaacagtgacaacttattccagtgccagcagctgcaatggcaatgtgagtacgatctgggatttgttatgtccaagcaaccagggctggcccttggatgtgagttagggagctccctgtgagagccttgggtttatagggaataaggtgttctgagggtgggaaatagattccttactaatctgaggatctgtttatcccactgttgtattttagaggctattgcaagaggttgggaaatttacatatacctacatccaaactctatagcagaacaccccagttatatgagatgccttagatacgcaatgctaatgtttaaataaacatttgcattgagtatctaaggcatctcatataactggcatcaaatcaaaattaccacaggcttgtagctggctgagatggtttggatctgtgtccccatagaatcctatattgaattgtaatcctcaatgctgaagataggggctggtgggaggtgactggatcatgagggcagatttcccatgactggcttagcatcatcgccttggtactgtccttgccattgtgagtgaattctcatgagatctgattgttgaagagtgtgtagcaccttctccttctctctctctctcttgctgttccagccacgtgacttgtgtgcttcccctcggtcttctaccctgattgtaagtttcctcaggcctccccagaagctaagcagatataggcatcatatttcctgtacagtctgcagagccatgagccaattaaacctcttttctttagaaattacccagtctcaggtatttctttatatcaatgcaagaatggacgaatacactgataaaccttgcttccagtcccggtgctgttaacaattgggtaagagacttctctgaatttcagtattctcactgatagaacaaggttgaacttttgaggcataagttcctttgagatctgctaaaatggaatcttttagaacatgcactgcatcttactcatctttccatctccagtcaccggcccagtgcctagcacaagttggcaccaaatttaatatatgttaaatagcttttgagtacttttattatttttgtgttttgagactcagtctcactctgttgcccagcctggagtgcagtggcataatctcagctcactgtaacctccgcctcctgggttcaagcaattcccatgcctcagcctccctagtagctgggactacagccacctgacagcatgcccgattaatttttgtatttttagtagagacggggtttcaccatgttggccaggctggtctctaactcctgaccccaagtgatccacttgcctcggcctcctaaagttttgggattacaggcatgagccaccgtacctgccaacttttgagtactttaaaaagaaatgaaccaaaatgttgccctccgttgggatgactaaatgctaactccatgataagcacagctatttcaaagctacatacaggagcaaaaaccttgcacagtttttatatcgagatgttttccgttgcaagtagaaaaaaaaccagctcaaaatggcttatgactaaaaaggatcttctggctcagtaataactaaaaggttcataggtagtaggcttcaagtgcagtttgatctggctctatttctgtggctgtcttacctctacccacctctgtgaccggcttcacgctcaagatggtttccttcagggtcccaagacggctgctggcagatcctgctacctcccataaccatggaacaggagttctaaactatgttctaattcgtccatccctgaaccaatcactgttgtcagattattttagaccaatcatgatctatcccagtagctggggatggaattaatccaactaaaacctcttggcttcaacacagtggaagagggaaagagtggatgttgagagtggatgttgggaatattgttaatcaatatccacaccttcaaaatgctcatacttagctgagaggcacaaacttcagccagctgcaactccagcctctgcagctaataatgccaggccaggatgtagctcctcattattgagtaaattaggattaaatgataaattactgactccaacgttattgctcaggattctcaattacaaacaatggaatctactggactatattaaacaaaaaatgaatttagtaaatgacatcagatagcaaacagcatctcaaaggggaccaaagagccacattctaaagctacagattaggaacaatgcccaatcatgccgcaggtacaggtccagcaaaaatactcccgtcactgccaccagacttctacagcacttaagggctgggtgccagaagcactaccactattgcccagatggaactgaaaccgcgtttgcaaaaattataactgagaaaattatgacggtgaaagagatctgacctaactggctccatcttgcttctattctccaagccgaccttggttcattcccgggtgcaggccaaactaactttgggaggaactttgtttatggtttaactttgaaacaaaggcgataatagtccttttgcaaaacaaactcccttctttcttggggactagtctgcctttgtacgactaaccacttagctgcaagattagaaattgtggtttaggagtcgtggggatggaggctgtaagattctgaacctccccaagttgctcctggggataacatcactattgtaaaacctaagatcagcacttgagatgttttgcagatgctgcattttgatgcaccagaggatgcctcccatactaagtaatttggctcaaccagttctgtgatcctacttaggatgagaagacaaggaaaatccacttcgactccctattatctcatctgaccaatcaatcaacactccccacttcccgaccccctacccaccaaatcatccttaaaacccccaatccccaaatttttgaggggactgacttgagtaataataaaattctggtcttttgtccagccagctttgtgtaaattaaactctttctctattgcaattccactatctagataaatcggctctgtctaggcatcaggcaaggagaacccgttgggcggttacagaaccaaacactgcctccacagttgctgaaagattcatctcaattcttcattgttgctcttttctgttttcacatttcccgtgggtgtatctgataggtggaagttaagctatgtgtctgccctgtagaggcaagggattctggggatgtgaatttcctgtattctaccttgggaatgtagaactcataatgtgagaagttatccaagacgtaggatgaatgttgaaaatatatcagtcgcaaacgataaatgtatcctatattaacctataaacatgggaaaagaagagggcacatacattaaatccttccatttgggaaagaagatcatggtaaacaaggtatgtcatatcctcacagatgggaattctgtttcttggtctgaaagtggagttagttttttggccaaccaatttggtatccctaagttctgtgttctggggggactctccctggcacctggttttgccttttggggaatgagaaaaaggttctgtcttgtactttttttttctttttctttttctttttgagacagagtctcactctgtcattcaggctggagtgcaatggcacaatctcagctcactgcaacttccgcctcccagattcaagtgatttgccctgcctcagactctcgagtagctgggac

SEQ ID NO: 1884072 - DNA, 4001 bp, Homo sapiens
tcattgaaatcattatgcctttatttctttttcttgccttattgcacttgttaagacctccagtataatactgaatagacatagtgagagcaaatatccttgcctccttccaatcttaaggaaaaatcaatttttcactattgaaaatgatgttagctggagatagttcacagatgtccttcatcagatgaaaaagttcctctctattcataagtattgtttgttttcaaagaataatcgattcatgtcacagactcaaaccactgcaaaatttgatattacatgcttaaatttattaactttttaaacttctttgctttacattgtcagcactgataacttttctgtggttcttagctgtgctattaaggccacagatatgaatggtgaacttttggctagactcatgctgagagttttgctaatgtatgctaacttgacaacttgaccgttaagattttaccaacaaaattagaaatgactagatgtaatctattttcagggttctagaaaataactgaaattggctttgtcaaatctaaggtcttctttaatctctcctgacttttagttctatctttcctatccctttcatttacaacggttttgggagatttggaatttagcaattcaattctttctaaactactttcttaattttattgccaactttaaaaaataaaaaattgttggtggaaagcttaataaatctgatcatttatatgtacattttctttgttactgacataaaacacacatactgaaaagtgcataaataagcatatgccttcatgtttttttttttttttcttttttagatggagtctcgctctgttgcccaggctggagcgcaatggcacaatctcggctcactgcaacctccacctcctgggttcaagtgattctcctgcctcagcctcctaagtagctgggattacaggcacccgccatcacgcccggctaatttttgtatttttagtagagatggggtttcaccatgttggccaggctagtctcgaactcctgacctcgagtgatgcactgcctcaggctcccaaagtgctgggattacaggtgcgagccaccacgcccagcctgccttcatgaatttttgaacacacccagaaagagcagaagacagaacatttctggtacaccagaagatgtgttgttttccctttccaggcaaccccaatggtaactcctagtggtgtgatggagctagcctacaccagctcttgggagctgataaattttcaggaatctcttgtgaggcattcagattttactggaaaattagaaataattagatataatgaattttcagagttttagaaaatagttgaaatctactaagtcaaatctaaggtctcctttaaacctcctggtttttagttttagttccatctttcctattcctttcatttacacacaggcattattaacagttaaattgtatcaattaatattttaaaatattaaaaacattttacttcgttcaacttaaagacaaaattaatatatttcttgaggtcaaattatctaaaaaactctaccttgtaaaattgcatcttaaagcagtgcgtggaaactgatggcaagaaaccacttaagtgtcacaactctgcttcaagttaattcctagtccatttgattttgttttgcttttaagatcacgaagctggtgtacacttccgtgcgagcttagagtggtaatgaactccacaatacactgaaaagagcttgaggagacagcagatgaaggactggggctctggttttgtagctgaagcccaggttctcaaaggtcctaccaggcctgtactttatttctcctccgcgggcctctaggccaaatgcctggatgaatctgcgctcagggggcgtcctggaattacacttgggagagaataagaaaggaggaggccgatgtgcccatggacattattaaccttccggcaaatccccacagccgccaaactgcgtctcctcttccgctctcggcgcgcagctcacgctcgcagcgtcagcgacgccggcggcgccaaggcgtcgtggcgtcgggcgcctgggacgtggcttcaacggccccatccggcgccggcggcgggtgcccggcggtctttgctgccgcccgggggcgcagaggccgggccttttctttcagcacaaacgtcagtttgtaaaagggaggtgctggagtctgaggagttttcaggcttccgtctcgaaggaagtctggcaggctcggaattgtcatcttcctcaggcaaatagtttttcaccttagagccagcaaggccaaaccgcccagtcacccgacttcccacagtctcagcaggtacacagggcggggagcctcgggagcggctcccttagcaggacctgagggtttcgggagagtcctggctttgcacttagttttcccgctgcctggctgcctccgtggcggttgtgctgctttttatgcaggatgtaggatcgaaggcaaatcatcctttccctacgtcccctgccaacccctgccgctctcctctattttgtacactttatcattaaaggatttgaaatgaatgtaagttaatccttgaaggatgaaaccagaaaacatttgtcgtggtggcggaaagggacggatgcacttgggcgaagtaatgctgacatccacttcctagcattgttaggagggataaatgaattaaatatgtaaagtccttaaatatttgcttgctaatacgagtattcattgcgtgtgactatttttgtatttatgtgaacttcatcggagcatttgtcaggttctttttttttgcaccaagtgagcgttgcctgcctgcctgcctgcctgcctccctccctccctcccttccttccttcccctcttcccttcctccctccctccctccctccctccctccctcacacttttttggggagagaggacacaatgcaatccataacagcatatacacttgttcttttttccatcgaactttcctcttgaccatgttttcttctagtaatactgtatttctttactcccttttatagtaaaatttctctacagtgcttatattcaattcattgttcctacttcctctcttttgaacggtaagtcagatatttacctcgatcattctactgaaattgttgccgttcttcaggttacaaatgacctacctccatgttgccaaatccagtgtcagcttagtcttcattttacttgactcagcatttgacgtagttcatcactcggtccttggtgatattttcttttccttgctttctatgtatatataaccttttggttttacttattggctcattggccactcttcttacgtcctgtttcctggtcctgatggttttgatggaatttttgatgtttgcttggacctgaaggttttgatggagtttctttggcaatgtaatttattcagaattcttttgaggcttttcaattttgtaaatttaatcttggtttctgcatcattttgcttgtatcattaatttttactgaaagcatcgtgtcacaatcggcatgagaaaaatgtaaaagggagcagggcgcacagtggctcaggcgtgtaatcccagcactttgggaggctgaggtgggaggatcacctgaggtcagaagttcgagaccagcttggccaacgtggtgaaaccctgtcactattaaaaatacaaaaattagccggacgtggcagtgggcacctgtaatcccagctacttgggaggctgaggcaggagaatcgcttgaacctgggaggcaaagtttgcagtgagcaagattgtgccattgtactccagcctgggcgacaagagcgaaactctgtctcaaaaaaacgaaaaatgtaaaagggaatattttgcaggggctttggttcaagttctataatgtgtttatttactattatcatcagtaatttccaagagagcattgtgttcttccttcaaatggatttttagtgacaagttatttttgcaaagtcata

SEQ ID NO: 1884073 - DNA, 4001 bp, Homo sapiens
ggagcgtctctgccaggccgcccatcttctgcgatgtggggagcgcctctgccctgccgccccgtctgggatgtgaggagcgtctctgcccggctgccccgtctgagaagtgaggagaccctctgcctggcaaccgccccgtctgagaagtgaggagcccctccgcccagcagccacaccctctgagaagtgaggagcccctccgcccggcagccactccgtctgggaagtgaggagcgtctccgcctggcagccaccccgtctgggagggaggtgggggtcagccccccgcccggccagccgccctgtccagaagggaggtgggggggttagccccccgcccggccagccgccccatccaggagggaggtggggggggtcatccctctgcccggccagctgcccgtccgggagggaggtgggggggtcagccccccgcccggccagccaccccgtccgggaggtgaggggcgcctctgcccggccgcccctactgggaagtgaggagcccctctgcccggccagccgccccgtccaggaaggatgtgggggggtcagccccgggcccggccagccgccacatccgggaggtgaggggcgcctctgcccggccgcccctactgggaagagaggagcccctctgcccggccagccgccccgtccgggagggaggcggggaggtcagccccccgcccggccagccgccccgtccaggagggaggcgggggggtcagccccccgcctggccagctgccccgtccgggaggtgaggggcgcctctgcctggccgcccctactgggacgtgaggagcccctctgcccggccagccgccccgtccaggagggaggtgggggggtcagccccccacccggccagccgccccatccgggagggaggtgggggggtcagccccccacccggccagccgccccatccgggagggaggcggggaggtcagccccccgcccagccagccgccctgtccgggagggaggcgggggggtcagccccctgcccggccagccgccccgtccgggaggtgaggggcgcctctgcccggccgcccctactgggaagtgaggagcccctctgcccggccaccaccccgtctgggaggtgtactcaacagctcattgagaacgggccatgatgacaatggcggttttgtggaatagaaaggggggaaaggtggggaaaagattgagaaatcggatggttgccatgtctgtgtagaaagaggtagacatgggagacttttcattttgttctgtactaagaaaaattcttctgccttgggatcctgttgatctgtgaccttacccccaaccctgtgctctctgaaacatgtgctatgtccactcagggttgaatggattaagggtggtgcaagatgtgctttgttaaacagatgcttgaaggcagcatgctcattaagagtcatcaccactccctaatctcaagtacccagggacacaaacactgcggaaggctgcagggtcctctgcctaggaaaaccagagacctttgttcacttatctgctgaccttccctccactattgtcctgtgaccctgccaaatccccctctgcgagaaacacccaagaatgatcaataaaaaagaaaaaaaatggattaccctgtgcacagtattctgcatggcgtcttttcattttatcaacggtggccacttccctcgacgaaacagtcgacttcattgtgacaggagtagaggtccatgctgggcaacccacccccatggagggacactcaggtggtttccagtcacttgcacaacattgttgcgtgcgtgggccttccgggcccggaagaaactgcgttcgcgtgcaacattaaacaccccacatgggctggtgaaaaatgaaagcaaaataagaccagttgaaaggcggcagaaaacctgtgtgactactccgtggctcccctgcctggtttccagccgcggactctgctcttcggcgcgacccctgctcctggggtcctctggggtcctctggggtcctcccgcacacccaggccaggcacacccaggttgcgaagccgagtgcctccccgtgcggccgccagggagcgccccaggcctggccgagtcccccgccctccaccccgccaggcccaggagaattgataggcgggccccgaagcacgtcttcccggaaaccggacttcacccgctcccgggctgccatccgcggctgggtgacgctcacgtccccgcgattcggtgtctcttggcctcctgccccgctgacctgggagtgccagggatcaccccgcccccagcgagatcccctctatcgcacaaaatgggcgctagcgggggtcattctagtccggctgcctcactctcccgacggtcctccagggtggcaccatcaccgttctcgcccgcctccagccggcccattcctgctgctccctacagcgttgtccctgccccgtgccctcttgtggtcgtaggtatctggcggcccgggaaagacaaaaagaagctgcccgcaggagcccagaccctgggggccttcctccccttgtctcctctttggactcgggggtctcccaccagccacggcgagggggagaaagagaatagctgggcagaggctagggaagacccccggtctcagaaactgaggggagccaggactcccggtgggggagtcggtgcaagccctgaggtgggtggatgggagtccagggccacagctctgcagcggacaggcgagtcctgtggcggctctaggaaggtctgggcacactgggaccagctagctggacctgggtggggaggggtggggcgtctgactccactcctgtgacctggacattgcctagctgagcaggagctttgaccctatgggcttacagctcatctgaatctgcttagtccatcttcctgttgtgttaaccttgcagagggggaagaatgccaactctccacccctcttccatcactcttgggtacctgatccaccttccaccctcatgggcaaggaaggggacaggaaggtcaccaatccaaccaagccacagtgccaaatcctgttggttcgtttgttttcccttggttgggttatgttttcaaaccatcaacagattcatagttgctagtggatgtcaaatttcaaaacgggggagtcccaatacagtgacttgtccattaggaagccataggcaagccacttactttctctgagcttcaatatccttgtcccaataagaaggcatctgtgatttgctctgagcacatatttagggtgagctttcaccctaaagatctcagcaacggcagcttctacccaccttcacacaccaaagagagggtggcttccctcccagcagaaggcaacatcccgccattccagtgtgcttctgatcagggcacagagaagagccagtttcatcttctttctttttggtcaactccaggcatctgcaacaaacaagattaacaacgaccattaaaactggcccctggagggtttatctgtcagccacgcatggctgcaggatctcattatatataggccaaagggaaaggatgtctgcttcctttctgtcctggaattccaagataaaatcccctccagttgtctctactgattccattttgttttctttcttggctgtaacacagataggaggaaaaatctttcctcccccaaggcagagttttaaacgcatcatctcagaatgccaaatgttctggaaaggaagaaagttggcagcgaaggaacccgcagagagaggggctgagagggctgaggggcccagcagcttctggcaggctcctctggtctgtgtttgaaattggctgaaaagacatggaatttagtaggcaagtctgcctccttctcctcctcttatctgcagaggagagatcagttcccagctggccggggcagtgtcattgatatagctggtgtcattgttaccttccactaacagatcactcgacacctaccagcccaggcagggctgg

SEQ ID NO: 1884074 - DNA, 4001 bp, Homo sapiens
attttcttcataaaacacaatataatctgtgcacatgcaatttagcagaccaaattttatgaaaattgatgacgattagccaaggacattctatcagtgaaaaacaacaacaacaacaaaaagattgactacctgcatgccaggttctatagttagcattaagaatgcaaatgtgagaaaagttacagccccatctggagggggcatgatattatgggaaagattacaatgggacgtgtccattctgacacgtgttctgtactctcacagaggttcaagaggtgtcactggcaccagaagccctccatcctcaaccccacatgttggtggtaagggccctggagagtctttggtcatgcagagatgatacagaccagttttatttgttttggttctctctgtttgtttgaacttcacagtactcactgttatcatgggagcagagtgagtcatggctcaagtttagctcagagtggtacattttagccaagcttgtgtgtgtgtgatatatgtgtgtatatacatatttactaatatatagtttatatatgggtgtatatatactttgtgtatatatgtatatttacatatatgtacatatataatacacatgtattcatctatatattcatcccatgatatatgtgtatatatatgtataaaatcacacacccatcatgagatgtagatattaaaataatgcaagaatatacatatatatgtataaatgtatgagtaaatacacacacacacactctcacacatatgtacatccccttccccttccagttgtacaattccctcctgattgagatttctactattattttaatacccacacgccatggtgggtcactggggcatcatccagatgggcagtagaggtgagcctgaaacgtaaactttaccccaccatttgacaagttgtctgtgctcagaacctcatctgggatctaatttgctaaactgaaggccttaggcatttttgtaatgcagcatatggccaaaagaaatcaggttctttttttttttttttcagttgaataaggctaagaagaggaactcacccaaattgaacatcagtacatgagaggaggataaaaaaaatccaaagctgtgcttgcaacctaggcacagagaggtgtagacaaagcctctgacacaaggcgctctgatgaccaccaggggcattctttaatgcgcaggcaaatgaagaatgatgcagggctgtgccagagcctcatcaaaggcagaggtatgccaggcactgagcttcagcacagagactagcagagcttccctacatctctctggagccctctcagcatggaaacattgcaatgggatgagaggaaagaatgtaattgtacctcaaaagaggtgacagttacaggtaggggctgtgatccctggaacagattgcccaataaaagcaaaggcagatttcaagttgtctgatcctgaaaattagaaaagtacatgacttagctgatatcactcttttttctcccattcacctctggtggcctcagaaagcccataacctctaatgtagttttcttttccaaaatttctccagtttcaccccgaccttcttccacaccacccttcctactagctcctggctcacctagtgcagtacgagtagtgctggaatcatcctctccacattggggtcagtctttcaatcatcttccttagaattgtcccttttatctgttccttctgccccaaaccctggtaacattgcccgataactgaagttcccatgcaacttttgagttttgtccatgactagtgggcatagaaggagattttctatttggtggccaagtttgctgacaagatcagctgcctttagcatttgtacgggactttaatgagtaaggagggatgtgttgtgtggagaaaggaagaagggcttccaggcagaggaagcagtgtgcacaaaggcacagagatacagagagggcaccagggatggaggcagcatgagtaacactgaggagacagagcacagtatgcatggggagacagtgggtgatgtgtctgtaaagttatggcatcataaagaaaagttatgacatcatgaagaaaagccaccctgggagcaaagcaagttagggttgtaagagacatttctgagattaaagcagccagatctatgatggggtgggtacgggtggttaaagagaaacagaacgtgagaatgactcatgagactattaaactgacttaactgaaattttaaaaaagggggaaataccaactacgatgcaccccccccacccccaccacaccatgttttaatgctactcaaggtctatggctgggaaaggccacttgtttttcttcagttaatgctgagactgtttgtctgccagaggtaagaatgtcctgcttggtcaaagaacatgctaggattttggaaaaacagaggaatggtttatcttccgagagaatagacctagattctgatacgctatatgctattccaccagatctggggaaaattacagtaaaaccttttttttttttagaattatcatgggatatttaacattaaccaagtcccctagttacgctgaatgtgtccactgggcctgacatggacttcttgcatgggaagcgtacatgaagtcaggccaagttgtccagctgcattggcaatggctggccaggaaaggccaggctggatcccatttcatttgggcatttcgcgccaggctgttgtcccgtctgcaaaggggctgctggcaagaagcatccccaaacactcagttgcaaggatataaatttcagtgagccttttcaatattcatgcaattaccccggaaagcacatttgacatttcataaatacagcagaatatttagcatttgtctctccctctctgctacctaagcatacatgggaaaatattccccagagaccctgctgtctgaaatggcaacagttattgaatccataaatttgatggatcaaagtcttccttcttcatcccttttgtaatttataaatgaaagtgtgaccatataaataaggtggcagggtgtccttcctcatggagcacaaccagccatttcttgcaacaggccagcctcccgccagctctgcctgcagctttaatccttcacgtttgagtctccaaagtgagctcacaaaccaatagaccccacacagacctgtgccatggcatgggggcctgagtgtggaggccccagacacccaggcagcagtagacagtgccaacgacaggcttgtgttcctgcctcagagccaccgaacacgatttcagtttcccaaggactctgggggctctgcagatggattgagagaactctggggccttgcacacagccctccccatcctcccacaacccacacaggctcaggaataaaaactgcagctcttcagcagctcacctgagggtgtatcaatgagagaagcaaaccaccttgcttgacccaagcctggcctttgtgagccagcgctgaagatagagcttctgtatcagaacagcccatctcacagctgccctgtggcatcccaaacataggccagatcttcatggacctggctcctctccccaggcaggaaagtagtatctctcctgtgtgcctgacatgaaacaaggtcctcctctgccaccaataggcttatgaagataaataagtaatgcatatttttctctaaaagaaggaacaggagccgttttccatacatgaggcaataaggctgacctacctgagagttattttcagagctatgtagcgaattattttgacttttttcaatattagagatgaattcttaatgtgtaaaatgtgtgtttatatacatgcatgcatacatacatatataatatgtgtatgtatgcatacatacatgtacatataatatgtgtatgtatgcatctgtggatatatgtgtgtgtctaatagtgtggtgtatctgagatcaagttgatatatgttcatgaatgtgtatattaaagatt

SEQ ID NO: 1884075 - DNA, 4001 bp, Homo sapiens
ataccagttttaaataccaatacacacaataattttatacacatctgtggatagcattaacatttatgctcattcatatattatacatataatctttaatatacacattcatgaacatatatcaacttgatctcagatacaccacactattagacacacacatatatccacagatgcatacatacacatattatatgtacatgtatgtatgcatacatacacatattatatatgtatgtatgcatgcatgtatataaacacacattttacacattaagaattcatctctaatattgaaaaaagtcaaaataattcgctacatagctctgaaaataactctcaggtaggtcagccttattgcctcatgtatggaaaacggctcctgttccttcttttagagaaaaatatgcattacttatttatcttcataagcctattggtggcagaggaggaccttgtttcatgtcaggcacacaggagagatactactttcctgcctggggagaggagccaggtccatgaagatctggcctatgtttgggatgccacagggcagctgtgagatgggctgttctgatacagaagctctatcttcagcgctggctcacaaaggccaggcttgggtcaagcaaggtggtttgcttctctcattgatacaccctcaggtgagctgctgaagagctgcagtttttattcctgagcctgtgtgggttgtgggaggatggggagggctgtgtgcaaggccccagagttctctcaatccatctgcagagcccccagagtccttgggaaactgaaatcgtgttcggtggctctgaggcaggaacacaagcctgtcgttggcactgtctactgctgcctgggtgtctggggcctccacactcaggcccccatgccatggcacaggtctgtgtggggtctattggtttgtgagctcactttggagactcaaacgtgaaggattaaagctgcaggcagagctggcgggaggctggcctgttgcaagaaatggctggttgtgctccatgaggaaggacaccctgccaccttatttatatggtcacactttcatttataaattacaaaagggatgaagaaggaagactttgatccatcaaatttatggattcaataactgttgccatttcagacagcagggtctctggggaatattttcccatgtatgcttaggtagcagagagggagagacaaatgctaaatattctgctgtatttatgaaatgtcaaatgtgctttccggggtaattgcatgaatattgaaaaggctcactgaaatttatatccttgcaactgagtgtttggggatgcttcttgccagcagcccctttgcagacgggacaacagcctggcgcgaaatgcccaaatgaaatgggatccagcctggcctttcctggccagccattgccaatgcagctggacaacttggcctgacttcatgtacgcttcccatgcaagaagtccatgtcaggcccagtggacacattcagcgtaactaggggacttggttaatgttaaatatcccatgataattctaaaaaaaaaaaaggttttactgtaattttccccagatctggtggaatagcatatagcgtatcagaatctaggtctattctctcggaagataaaccattcctctgtttttccaaaatcctagcatgttctttgaccaagcaggacattcttacctctggcagacaaacagtctcagcattaactgaagaaaaacaagtggcctttcccagccatagaccttgagtagcattaaaacatggtgtggtgggggtggggggggtgcatcgtagttggtatttcccccttttttaaaatttcagttaagtcagtttaatagtctcatgagtcattctcacgttctgtttctctttaaccacccgtacccaccccatcatagatctggctgctttaatctcagaaatgtctcttacaaccctaacttgctttgctcccagggtggcttttcttcatgatgtcataacttttctttatgatgccataactttacagacacatcacccactgtctccccatgcatactgtgctctgtctcctcagtgttactcatgctgcctccatccctggtgccctctctgtatctctgtgcctttgtgcacactgcttcctctgcctggaagcccttcttcctttctccacacaacacatccctccttactcattaaagtcccgtacaaatgctaaaggcagctgatcttgtcagcaaacttggccaccaaatagaaaatctccttctatgcccactagtcatggacaaaactcaaaagttgcatgggaacttcagttatcgggcaatgttaccagggtttggggcagaaggaacagataaaagggacaattctaaggaagatgattgaaagactgaccccaatgtggagaggatgattccagcactactcgtactgcactaggtgagccaggagctagtaggaagggtggtgtggaagaaggtcggggtgaaactggagaaattttggaaaagaaaactacattagaggttatgggctttctgaggccaccagaggtgaatgggagaaaaaagagtgatatcagctaagtcatgtacttttctaattttcaggatcagacaacttgaaatctgcctttgcttttattgggcaatctgttccagggatcacagcccctacctgtaactgtcacctcttttgaggtacaattacattctttcctctcatcccattgcaatgtttccatgctgagagggctccagagagatgtagggaagctctgctagtctctgtgctgaagctcagtgcctggcatacctctgcctttgatgaggctctggcacagccctgcatcattcttcatttgcctgcgcattaaagaatgcccctggtggtcatcagagcgccttgtgtcagaggctttgtctacacctctctgtgcctaggttgcaagcacagctttggattttttttatcctcctctcatgtactgatgttcaatttgggtgagttcctcttcttagccttattcaactgaaaaaaaaaaaaaaagaacctgatttcttttggccatatgctgcattacaaaaatgcctaaggccttcagtttagcaaattagatcccagatgaggttctgagcacagacaacttgtcaaatggtggggtaaagtttacgtttcaggctcacctctactgcccatctggatgatgccccagtgacccaccatggcgtgtgggtattaaaataatagtagaaatctcaatcaggagggaattgtacaactggaaggggaaggggatgtacatatgtgtgagagtgtgtgtgtgtgtatttactcatacatttatacatatatatgtatattcttgcattattttaatatctacatctcatgatgggtgtgtgattttatacatatatatacacatatatcatgggatgaatatatagatgaatacatgtgtattatatatgtacatatatgtaaatatacatatatacacaaagtatatatacacccatatataaactatatattagtaaatatgtatatacacacatatatcacacacacacaagcttggctaaaatgtaccactctgagctaaacttgagccatgactcactctgctcccatgataacagtgagtactgtgaagttcaaacaaacagagagaaccaaaacaaataaaactggtctgtatcatctctgcatgaccaaagactctccagggcccttaccaccaacatgtggggttgaggatggagggcttctggtgccagtgacacctcttgaacctctgtgagagtacagaacacgtgtcagaatggacacgtcccattgtaatctttcccataatatcatgccccctccagatggggctgtaacttttctcacatttgcattcttaatgctaactatagaacctggcatgcaggtagtcaatctttttgttgttgttgttgtttttcactgatag

SEQ ID NO: 1884076 - DNA, 4001 bp, Homo sapiens
tctagagaataagaaatttttttgtactccacccattattactaatgtaggatgtggaaatagttattttgttgtttactgttattttaatgagggtagaaataattcatttccttggttcactcttgacttactctattttgttcttaaaatcttaggctcctcaattatgaattctactgctaggactttcaggaacctaatgttgtaggctggagagggctgtcagaataatattcagccagtattttcggaactgttaaacctggctaaacaggtgtcattccacagtgaagttggcaattcttgaggctcccagaaagtgactgctatctaatgactcagcttgtggatacgtcgctaccgttgtcttaagatacctttcttcccttcatttttactttttttgcaaagttaacccacacttatcctacataattttactcagatatcatctcttccaaaaagtcttcccttgctacttcattagaactactctcctgggttgggcgccactcttgccccttcccacagtggcctgggcttccaccataacacttagctcgccgtgtggcagttgccattcgcgggtccttctccccactgtgtaagctcctccaggagccctgtgggtgccaagctgacttggaaggctatgagggctcaatacacaccctcaatactcattgaatgaataaaggcacggtctctgtgtaggaaatgcaggtgaacgtccttatgcctcacttaagtgagctgccaatatcggagtttaagtataattttggagaactgcaatccgtcctgttttctccctaccccgcgggagctggctaaaccagcctggaggctagcagtttgcctgtgtgccctaagctagtgacagctcatatcaagcccagtatttaaggagcgtgattacttttactacgtagttcccagggagaaaagcaactcaaaacatttttgtatctttttgtatcttgttgcacaagatacaaaattgtgcactaagatacaaattgaaactcgaattgaaatttggctgccaatttattaaacccaccccaacaatcttccctattaacaacaacaacaacgaagagatctcaggatacccattttcatgtgtaatataaaccgatgccacccatctatcatatccatctaaatctaataattcagctttttgtttggcgggagtacgacaggtctttatatgattcaatgttacaaagtttttcagaggacaaatgatgaaagtgtgaacccacggctatgatgaagccgcagtctctttgagtacagaatcatgagctagatataaagaactggctttaaattctgaagtagatcttgcttttaaatgttatagtggtgggtaataatttcctttgcttcagttactatttaaaaagtaaatatgtgtagatgaaaatgcaggatttaaaaaaatctactttgtagaataggatacctatcatttatattaagcccaatgcgtgggaaacggatcaatgacttgatgcggtgcctataaaacattataatccaaagttgcattaggacataaaaataactgctgataaaagtttactcaaagtagcatctgcccctaattcagtttgtatttttatcgtaaagacctaaggcgccgcgggaactaggctgtgcgttcgccccccgcggcagacggcggcgcgcggcgcctctggagcgcccctccgaagccccgtgggggcggccgtggccccggggcagccgctggcgagcaccccagaggtccgagccctccgagccccaggtgcccggggcccgagccccgcctgccactctccccagctgcctttccaaacggcggcgtgctggtggagagagttttcccgcaccttgttcgcccgtcagaaagcggcgccgggagggagcgagcgtgagaaagtgagcgtgtgcgctgcaggagagcacgacccaagagccggcgcccggtgtccgagcgcccagtccgccctgtccgcccccggacccgcgaagggcgggggcccggagcagcgaggcgcgggaagcgaggccggcgggtgccgggggttggcgggacgcgcgcttcgtgccggcgccggcctcgagcccgcgctccctccccccgcccgcgtgcccgcgccgctgcgcgatgcagtgtggggaatggctggggttggctgaagagcgcacagtggagttttaatgtccgccatgttggccatggcgtattgaagagagcgagcgagagaggagcggagcggcacagcctcccaccctcccggctggtgttagtgcccggacggcgggctctgcgctccgcccctcaagtccccggcagcggttggcgagtggggaccgaacccccggttctccatgatcccgctggccggggccgtttccccagagcggagaggtatctgctgcgcctgagatgagtaaactgtcgtttcgggcgcgggcgctagacgcctcgaagccgctgccggttttccgctgtgaggatctgcccgacctgcacgaatacgcctcgataaacagggccgtgccgcagatgcccaccggaatggagaaggaagaggagtcggtacgtgttaactcccctgtccgacccaccgtcaggcccgctccctctgctgcctgcggcggcggcggagcagcaaacccacacaaaatggccgccatcttctcttcgccgccgactctcagtcgccggccgggcctataccccgcctcccccagcctcgacccccggccgccgcggcccagcggggccccttctaaggccacccgctgaccctggccacttgtacccgggtcccgcggagttcgggggcccgaaaggcacaaaggggtcacgtgacgaagctgccggcagccattttgtgtcttagttcttgggttgggccttgtgcatccggagaggggaacgggctgggtggctgtgggggtgcggcgagtcgggagccgtggaggacccgcctacaggcctctccgtgggccgctgggtggcgctccagggccactgcggcctgcgcgccgctgcccgggccgggagcgcaggttctgtgcacagtcggggaatttgattgccccatggtctgggaagcttgttgggctcagtgcagcccccacgtggagcctcagacgggcatgtcatgtcgcctgctgctctatgaggcttttctccccctctgcaaggaaatgtcgagggtgcagcgtgtttgcccggacgacttacttttctagaagataagacttactttcagtgtcctctttctgggacgtttgtatccatccctctccagagctagttggtcggaggataataaaccactatccctgactttttctgtgatccttgcgaatatcttgcagatttgtttggagtacctctctcttctgaagcctgtaaccttacctatttgtaaaataaatttaagttctcctgctctctggtatctcaacatagggggagaaaagacccaatttaagtaacttttatagatctaaatttcgaaggaggatcctttcttattcaaaaccgaactaaaactaagtgacttgattcacagaaatcttaatattgagatgtctaaattgggtgggtttcagcacgtaaatgttgacaactaatagacattttaccatcgctgtggctttaccttgttgtggaagttgggttcggacaccaggataatagaatcttcctctcatttcccccagatccttgacagtataacttgatgacttctaatcctaaggaattgcataccttggttttcaggtacagccatttaaacagggtgcagtgtattgacagttcaaggaagtccaggagtcgcgtggatttgtgtgctacaattttgttgtggaaaattgtactgtaatacttctcttggtactgtaagaatttttaatgtagaaattatgctctgtaatgttgtttttggaaataaaactgtttaaactctttgggttgttta

SEQ ID NO: 1884077 - DNA, 4001 bp, Homo sapiens
  modified_base (3722)..(4001): a, c, t, g, unknown or other
agctagcacaggctcaggatcccctaatgggcatttctgccaaggagaccatcctcatgaaaatggagccgaaagctatgcgcacaagatggatggatgctcctctcccagagaccagcaggtgcaggtgtgcagggagtgggccagggaggggctgtgagcaccaacctgggaggggtggctagacctccattggatcctcctgtccgcaggggcctcagagggttccagcagaggccagtcctaggttccttgtcccatggctggcccctgagacttgcttcacctgccagctctttccacaaagacatcaggatggcaaacccaacccagccccctcacagagaaaggggattaatgtcagggcccacggccatcctggccttttcagtaactgtttaaatagtggataggttaggccagaatgtgctgctgtggcccctgggatcacatccctggagggaacctgcctggggttgtgaactgaagggcgaggctggacagcccacttggggttcagtgagccgagacttagttttcggctcagttccctctgccactcctgggggacttgggcttgtctagagcaggcattgaggatggcagagagcagagatgctgagctgtcaggtgggtgccaaagggtgagcatgaggcatcccgagggttggagccatcagaaggcccttaggtcagcccagagccatcccagcctctgtacctggagctgcagggtgggcgctgtgcagtgggctggtcagagtggactgagaagccagttagggaggggttttcattgcccattttcctgcggtgcaaatcaagttccgaaggccacaagcgaggtggggcagaaacactgggctgaggcatcaccttctctcctctttggctcacataggcccctgactttcttgggcttgcctgaaagtgagagaagatccctcttattgtgcgggtggacacagaagtcaccagtcacgtgtgatgaggagggctgaggcacccccagagtctttgcagggcagcacccactaattgctgggtggactgggaggccaggctgggacactgggaactgaggtcaccagtccccactgtacctcgaatctgtccccaccgtgcaacattgggccagctcaggctctgtcaccagctccccacatcgtcgtccctcagagccctagggtgggttccccctactcagtgtctctggcccgtgctctccactttcaggcctgacaagcacccaggccccacaccagtgtctttctgagggcgtgggtgttgggatcgctggtacagaactcacagcttagctacatgtgtgtcccagacttgcttaatcaatggagcagtgaacccgctgcttctggggtacagtctcctgtatttcatgggtcaggtagacaggctgcctccccttcacctccaggtgtgcgcacccacagtcatctccacctgcaatccagtctcatctgaagctgcacgctctgcaacagacgcctgtgcacgacctcgctgtgcacacagcaggggctgccctcggtccctcactctcccctaacgcccctgcctcccagacccacgactcacaggaggagccagtcccctagcccagggagccagggtgggtgcggcctggggactgggcatggcaagctggcccatagggtcgtccctagcacctaccagagagtgtacgagggagccgagcctgcagcgccgggtgggcagcgagctccctggagacccatgcagcgggtcaggtgccagcggccgccaggtctgggcgcggggccgggccaccagggtgcggctttccgctctggagagtttatggcccctgtcgtgggacggctgcgcagccgccagggagggactgcagggaccgcggctgggacaggctgctgcgccaggcggccctggaccgccgcttctgcccctaagccgccgtcgcagcccaggtgaccggtttgtcctacccggggagcatcgccctcctccgccgggcccgagcccggcgtgggggttgtaggccggcaccacagcgtgaggacaccgcgacctctgcccccgggagcgcgctgaatgccaggtggggctgctgtcgcaggccgtggagccgcagccccgctgaatggcagggtcaggctgggcgtcggggtcctggcagagaccgcggcgagggccagagcaggtgcactggccgctgcacacgcgccgctaggctcccggacaccgctggcgcgccccctggtggcagccggctcaggagccgcgggagggcggtgcccagtccccagccaagcggcagcgcgaagctccttccccgcttgggggagtgggcgtggcccaggggcccgactgccttactagtgaaaaagctggggttggagctgccacggggggaggtggggggcctaggaggctctctctggaccttctgggtgtcctcctgcgacctcaggttcttcacctgtctcagaggactgatgggctggtatggcaaggttgtttggaggattaagccagatagtcgcagtaaagccccattagcccgtctggcctctggatttttttttaaattatttttctggctttcttaggaaactttccagaatgtgtccaggtgttgaagcgggaaggctggacaccctcccttggcgttgcggttccttccagacgccccctcttcttaggctcttttcaagcgcacgcccagcaacgtgtgctctacccaagagcgcgtcacagatcttcctgtgggtctaaaaccagaaggctttcttccatgacccctgccctcatatcaccgcaacgccatgtctcttggcagagccggctacagaatcgagtgtcagtttaatgcttgttccctaaggtctccctagggctcttatgacggcattagggttcgggttcgggcgcgcccctccgcgcctgcgccggcgctgcgcgcccctccgcgcctgcgccggcgctgcgcctttgcgaaagtgaagctgtgttctcatcagcagagactcgcagagcatggcgagggcgcagctgcgttcttctctgcacatatgtccggagtaccgcggaggcggagcagcgttctcctcagcacagacccgggcgggcgggcagtccaggggcaccccgaaggcagagctgcgtcctgatcagcacagaccttgcgggcattacctcgctttgggacaactcggggccacagcgacggtaaataaaattcttcctctttgcagccctcaacaatcagggtcagagtccagttagaagggtgagggttagggttagggttagggttagggttagggttagggttagggttagggttaagggttagggttagggttagggttagggttagggttagggttagggttagggttagggttagggttagggttagggttagggttagggttagggttagggttagggttagggttagggttagggttagggttagggttagggttagggttagggttagggttagggttagggttagggttagggttagggttagggttagggttagggttagggttagggttagggttagggttagggttagggttagggttagggttagggttagggttagggttagggttagggttagggttagggttagggttagggttagggttagggttagggttagggttagggttagggttagggttagggttagggttagggttagnnnnnnnnnnnnnnnnnnnnnnnnnnnnnnnnnnnnnnnnnnnnnnnnnnnnnnnnnnnnnnnnnnnnnnnnnnnnnnnnnnnnnnnnnnnnnnnnnnnnnnnnnnnnnnnnnnnnnnnnnnnnnnnnnnnnnnnnnnnnnnnnnnnnnnnnnnnnnnnnnnnnnnnnnnnnnnnnnnnnnnnnnnnnnnnnnnnnnnnnnnnnnnnnnnnnnnnnnnnnnnnnnnnnnnnnnnnnnnnnnnnnnnnnnnnnnnnnnnnnnnnnnnnnnnnnnnnnnnnn

SEQ ID NO: 1884078 - DNA, 4001 bp, Homo sapiens
cagagctcccagatgcgccagggccttgtgatgatctgtggcctgctggaggattgctgaatggccactccctgctgagagttcagccacctgggcaaggtaggaaggcataaacgtgacctctcttattttccctctgctctctcccttggctactccaggttcttctgtgacccagttgctggcccaagacatggacaatgaccccctggtgtttggcgtgtctggggaggaggcctctcgcttctttgcagtggagcctgacactggcgtggtgtggctccggcagccactggacagagaggtatgacttgcccatacccctgccccaattctctcctggggacaggaggagacactgggggaaggacggcccgccatcttttggcgtcttcctctaagaccccattctgactccacagtggcatcttcctgcctgaatggtattcctcttcaagggccaatgctggtgtctggacttagggttggaatgggtggctagaggtgtctccaagcaagcagctacattggagaggcaagagggacagtgaccctgtgttcatcccttgtagaatggccctccatggagggtacaagtctacccctacccccagtaaacattcccccaatatccagagaagcaggaattgacggcatggtagcccttagcaagttaaggtaaagacgtgaacacatccccaacccttaccctctccttgagtttgaggaaggaaccatagaggtgtgtagtgacttgctcagtgtcacacagcatcttagaggcagagccaagactagcacccaagatgctcggcttctgtcttttattgctctcttaaagcaaggatccatattccacacctgcttccccaacccaaagggcaatgctggtattttagggaagcctttgggtgcctggttccaggcaagctcctagggcaatcctggagcccctcccgccccatttagggcccaggacccaggacctcagcaccgcctaactgcccccctccctctctcacttttctttcagaccaagtcagagttcaccgtggagttctctgtcagcgaccaccagggggtgagtgttccctggggccctggaggcatgttcctggggtcacaggatttctggacccctagggtggaagaggccagagtcaggtggcggcgctaattgcccgcctttctcttgccaggtgatcacacggaaggtgaacatccaggttggggatgtgaatgacaacgcgcccacatttcacaatcagccctacagcgtccgcatccctgaggtaggagccactggggttacccttgagggtatcagagacctgctgctccccagaccaccatggtgtaggtgaagagtcaggtggggagagcagctgtggctcttctgcccagacctcagcccaggtgccaactctgagcaggttggcgaacatgctggtaccctgggaatcggggcccagcctggggttgggaagagcagttgggccggtaggttgggagccttgtgctggaggctgagccccacacctccagctggagtcaatggtgggacaagagttgggagaagcaggtgttgcaccctctttccttccactcgtatccaaatgtgggcctgggcagggtgggtgggcaggcctaaccccagatcttcctgctttggccagaatcaggtccctccaggactcagggagcatgcagttctaggaaggggctttccctagccccgcgctctccaccatggtctcccaggcccctgtactgtgtactctgagtatgtttgcatgagtgcatgcgtgtaaaatcaagccattgctggtaattgagaagtacaaattattgcattacaaacggttcgttaataagctggctgccagctcccgatggcaccagggttcccactgcttgcggcccctctcctgggtggctgatggcagtcttatggtctggcagttagtgattcaaagactctgaagtgggagggtaaagggcttctcactgggtgtccctcgggcctgccctcggggttttgggctgggcggtggcagtgaagggttgggatgggaacagtggaaggtagaaccctctggaaaggcaggttggcaccatgtcatttgagttctaactccttgatccaatgactgatcagggagtaaaaagccctgagagaatatcgcagtcagttcatggatgaggctgggcatgggagagtgacttgcccgaggtcgcacagctttaacttcgagccacctggcttctagggcaggctcagcctccctcgagggtgacgagatcttgctcatacaccccactccctggcctctgttactgagctgcgagccaacggtcctatgctggcaccagatggaagagaggacagatgtgcaggtggggatgcagcggaggcaccatgcacttcgcctgcctggggcgggagagaactggggagcccgcagtcctaaacatgggggcatggtgctctgagctgtggccggtgtgcccagggactgcagcttggctcctgctctctctcatttggaagtctccctaatttaattaagggtctctacgtgccagcctgcactccgggcctgggctcagaaaccaagggcacggctcagagttaatgagccttggacccattgctcagctgccatcctggcaggcatggctgccctctcttccctctcatggggcagcagggagccgcactggcaaggagacgaggggtcatgtccctcctctcctgcccttgggctgggggccagccttttcctctctcctgcttcaggagatgtgacttccaacactcggccctgttggaatcccctgggattctccaaaggcctgtgcctccaaggagagagtctcttcaagtcattcattcatttatttaacaaatatttattgaatgtctgctgtgggcttggctctgagccaggctgtcattgtgcagagacctgggaggccacaggaatgtggaatgacaggagttagaactagaggcaagagaccctgggtccagcccctgctctgttcccagcttgctgaatgtgtttgggcatgtcacttcacctctctgtgccatggccctccttatctaataaaaacaaagggcaggtggataaagtggcctgcatgatacccatctgacaaggagagggtaggctgagaggagccagctgcaaaggacacaccgtccttggaggaaggcccacatggtttaattgctcgtgtgtaaacatccctggttgctttagtggcctgatactcgatgccctgcttggggctgctcagtgtggccagtggggatgtggtatcagctggacggaggcctggctactcctgatctgaggtaccttgacattgaccagcccttgcctggtgtggtcacctgagctggaaactagctgcctggctctgaccacagctggggtactagcccagagtctactggcccctgccccggaaatgagcccaagctttcctgcttgcattgaggtcaccctggaaaccccaggcccctgccctttagagtgtgattcagcagcaaagggccctgcaaatgtgaacagggtgaggatgcaagccagagaaatggggtgagggagcactgcagaccctgttaggtgtgaatgccagggtctgccagggtgatcagagaaatctcagcaggcttcctggaggaggtgggtttccagcagagtctggctgaggtaagcagtggttgctcttgtgctgtttcgtgggaagagagaaactggagtcaggacacctgggttctagtctgctggcttcaggccctacagctttcaaactagggagttgaacccagccccttccagggctgacatcccatgatcagaggatgaaacccagcaggagaaggtccttcccatccttcagcaccttatcgttctttgcaggatggcggagaagctctggtggctgcttccatccattcaattcctctcttggccatctcagccatc

SEQ ID NO: 1884079 - DNA, 4001 bp, Homo sapiens
cactccagcctggacagagcgagactccgtctcaaaaaacaaacaaacaaaaaaaaaaaaacataaatatgattccaaagaatgaaactttggaagtaaagaaagcttagggagattgaatgccataaaaaatgctatttggactttatagtcacaaatgatcttaattaaggagagaatgtggagggaccttttgaaaaaatatagcagagcacgcagaaaactctttaataagagctcaaatttggaggataacgagatagctgcctctgcctttgccggtgcagtgagagcagcttcaggaatcttatggcctctgaatattttggcatcttcagcctaccaaaactgtgtcaaaaatgcctctcttatttctgcattgtccactggacgttttagtcatattcagacaccagttgtttcctccactcccagacttaccacatctgagagaaacctgacatgtgggcatacttcagcgatccttaatagagtggccctcttgcttccaagtgtcttgaagctgccagccagatctctaacatacgtcagtacaggaaaaggcaagagaaggattgtgaaagctgtcatctataggtttcttcgacttcattgtggcctttggatgagaagggctggttataagaaaaaattatggaaaaaggcacctgcaagaaaaaagcgattgagggaatttgtattcggcaataaaacccagagtaaactcttaagataaaatgacgacgtccttctggaagaggtgaaactggtatgtccatgatccttatcagaagtgtcatgatcgaacaaacctgaaagtatagatcagaagtttcacttgtttctcagttattgaatatgtatctttgtgtacatatctgcaaaaatggataagtaaaaatctcgatgtaaattgtatcaatgaatatgtaaacatacagtgacaacactgaacttataaaagttttaaaacttaaaaaaaaagctcaaatttgtaaaagacatgtaaaaagaaggtggaaaatgtatttagaatcagggaatgatgctaaaagtttggtagagacaaaagagaaaagaaagtcccaaaagtggtttaagtttgcagcagatgctgatgatatcaaaacaatcttcacttaaaaaaaaaaaaaagactccaaagtacaagcaacaaatggaaaaaatagataaattagacatcatcaaaattaacaatttttgggcatcgaaggacactaacaagaatgtgaaaagacaactagtggaatgggagttaatatttgcaaatcatatatctgataaaggattcatattcagaatatttaacacagtaacaactcaacaataagcaaactaacaacataattcaataatgatcaaaggaatttaataaacatttattcgaagaagatatacagatggccagtaaacacatgaaaagatgctcaacataaccattcaagaagtgcaaatcaaaaccaaaattagataccacttcacacccatcagaatgacaattgttttaaaaaatggaaattaacaagtattggtgaagatgtggagaaattggaaacacttgtgtattgctggtgggaatgtaaaatgggaatgtagaagacaatttggtggttcctcaaaatgttaaacatagaattattaccatatgatctagcagttctacttctaggtatattacccaaaataactgaaagcagggactcagataattgtacaccaatgtccatagcagcattattcacaatagctaagatagaagcaaatcaaatattcatcaacagatgaataaacaaaatttcatgtatatatacaatggagtattatttagccttaaataaaattttgatacatgctacaacatgaatgaattttggaaatactatgttaagtaaaataagccagacacatcagacaattattggattttctaagaagaattccacttacaagaagtatctagaataggcaaattcatagagacacatagtaggatagtgattacctgggagtggggtggggaggaatgaggcattattgtgtaataagtacagagcttctgtttgggatgatgaaaaagttctggaaatggatagtggtgatagttgcgccacactgtgaatgtatttagtgccaatgaattgcatacttaaaatggaaaattttatcatatgtatagtttaccacaatttttttgaaaaagttttattctacaaatcagtaaacttaaaagttggatcacagcttagcatagattattaaaggaattatttttccccacctagaagaggaagtggtaaaactgtaagctgctacgtggctgtaagtcatggggcaagaaaatcttttctcttttggtatgattattgttcatttgaattcgcttcaagaggtatttatatagtacctaagtacctattatggcagaccaataagcagtggatacatagtatattttagaacatctgtcattacgtggactatagaataataaagattggctataagacaattagaggtatttggtattttattgaagcagtctcaaaaggtctgttgataaataaattgatttctaggggtacgcctcagtgtttaccctgcctttgcttaagtaaacagtgatttagataaagctatatttgcatataattcaaatgcaaataatacaacaccttaatacatactaggtaagttgaaggtcaaaatcagatttttttaaatgttagtagactctaaatatcagttgagtgatgaaatttaatagggataataaaaattatatcgtatttgattataaaaagcaagtagagtaaaatgctttatccctttaatctcatcatccattgtttttctccttgaatactatagtgataatgttatcttcagttttccaggaaaaaagagacattttacttctaaaatgtgacgaaggataaaatatagttatcagagaatatacgtaggattctttaatatttcccccctcaaaaaaataaagtatactgtgtttagtataaatttttaaaatgtcaaaactcagctaaaatcaaacacacttggcccttattttctacatgtcaccttcctcttgtcagaggattgtacagtagtaatgatgatttaaaacttctgatagcctcaatatttaaaaaaaataataccttgtccacaaagattatttcttcacaggcaatgatcaatgatccctgtgagacaagaaataaataagataaacctgatgattaccccagctaactccttggagataatttccaggcaacagaagaaaggtaactaaggccaagcacagtggctcacgcctgtaataccagcactttgggaggctgaagcgagtggatcctttgaggtcaggagttcaagaccagcctggccaacatggtgaaaccccctctctactaaaaatacaaaaaagcctggcagggtggttgtgcgcctgtaatcccagctactcgggtggctgaggcatgagaattacttgaacctgggaagcagaggttgcagcgagccaaaattgcaccactgcactccagccagtgtgattgagactctgtctcaaaaagaaaaaagaagggtatctcaagtagacccttgcagtctcttttaatgaggagttggagccggaagttcaaggagtctaagacagctagtgtttgtaagttaaaagtaccagagaagaaatagctgaatagagggagaacacaggacatttgcagaatcccaacaagtcttcagctgagtatgaatcagtgcatttttgtgaagaaattaaggaagaccacaaaaagaaccacctaaaaagattgtagaagacaatcctcagtgcacacatgaggacctataaccattcctatcctactagtcagagtggataacctcgtaattcacgaggcttcaagtagagtattaaaaggaattttgtctcattagcaggttaaaatcagctctagactagatgttct

SEQ ID NO: 1884080 - DNA, 4001 bp, Homo sapiens
ttttaaaattctgtatgtccgattacttttgtggagacaaagggaaaagtacagaagatcacacgcctaattgtttagcattgcttcttagctttttcttggaatgcggagaaaaatgacactttagacaattctgtgttgttttatacaatgagtaggatatacttacataattcatatgactcaactataatgcatttcaaaggttttcaaatgtgatataaaagaacagacttctggagcctcagcatctatggagcagggacccccccagagagggacctgcaggcaaaccagaccttcctatgccaggaaggctaggaagtggcaatggagaaaccatccatgttccctggggttcctaagctggaagcgggctttgaggcatctcttagaagcagctctggcactggtgtggagagggcactgggagagcaggaggcaggggaaacagccagtggactctggccaaagtccaggagaaggtgacaggaactgagccagccttgccagtgggagccaagcagggcagaaatgggggtcccggagagtcctatcaggcactctgcttctacataaaatcctttcaaatctgaagtccatatgaccaatgatggccagacagccctgtcatctcagcgcggctgagcctggcacagccaccatgtaaggatcagcaacagcaggtgagagtctggagtagtttctgccttgtctccactgaaaaattatgggtgtcaaaatcaatagcatctcctatatgaatgcaacaactacttagaaaatgccatgtgaaaaaaaagatcctttcataataggaacagcatgtatgaaatacttggaatgaatttaacagtgtggaaacctgtaatgtaaaagtaaaaatcttcactgagagcatacctacaatttaattaagtttaatagcattaagttcatataggaacacaccacactgacactcagaaagatgccatattgtcagatgtgccatttatctgtgtattagccagtctccaagatggttccaatgatgctttcctcctggaactcacacccttgcatagtcactctcgcatctattagggttggtctgagtgaccaatcaaatatgacagacgtgacatattctaacagattactggttgcacactctctctgataactcactctgggggaaattatattgtgagaaccaggtggagaactgaagcctcccaccaacagtcatggagtgaggttggaagggatcctccagccctggccaacagtttcactgcagcctcatgagagacccagagccacagtcacccagctaagctgcttctagattcctgaccctcagaagggtatgagatatatatgtgctgctttaaggtgttaaacttggggataatgtattatgcagcaaaatgtaactcaatatgtattatgagtaacacgtaatactcaaaatgtaactcaagcattatgcagcaaaatgtaactcaagttaatgtatacattgaatatcatttcgagccaaaggtgaaaggaaattgggaagtagagagacttgataaaataattcccaagttaaccaaaagaatgaacagataagaaacagccttgaaaatattgaggaatagtgaactctatattgtgccactattcaaatttataaaatcaaacatttcagttctgatacaagaacaggtaggttgaaccaaaaaagagctctactaaatcattattatatgatcaaaatggcagctcaaagtagtgcaacaaggatgaaagctcagtcaatgaagctgggacaatttgctagatccttacctgtgatcctgccagcacagccttcagtagtcatgtcctctgggggttctgtgcatatataagaataattactgcaacatccatcataacactgaaaatttcagaataactgatgtgttcaataaaagtggtttagattataaatgagagcacatccgtaggataaaatgtaatacagccactgaaattgatgttgagaaatgtattggcatagatggtgctagtgatgtgttcgttggtaagagggaagacaggtttaaaatattatgtgtagcaatgtcccagttttacatctctgcatcaggaaaaagaatcgttccacccccactgctttctaaggagtgtaaataacttctgttaaaaggaggatctcctgatctgggcaggatccttgctaggtttggagatgaagctgtagggggtgagctcagctcctccacataacacaggccaggaaattggggtttctgagctgcagagacaacaggggaagaagagggggaggtggccatacaacccaaggttgtggcccaccttgccccaaatctcatcaaaactcatgctgtgagattttttattatttttttaaatgaatttaaactttattgtttttttaaagaattttctctaattctgccagaatagaggcagggctcaacagaggtccctaaaggacacaggagttggggacacatgggctgccaggagcatgagtccccagaaactggcaaaaatcatggggagggcttgggattttcctcatgatgggagcagtggcatgtatctctaacaaacaaggacacccatgctgacattgtaaacaactgtacacacacacacatttatgattacaacagcagagcccaggcttgcagccaaccggacctgtgtcacccaacttgccagcccagagacctcccagggaagtccttctccctcccacgactccctttcctcctctgtgccagggtaaccactgggggtaaccagcagggtgtgccacagggctttggtccacattagatagacaaggtatgcatgagccagccaggcacacagcagatgacagtgtgagttctgcttcttaatctggggcctggttcctcactaacttagtcaaagtaatactggctgagggagtgggctgtggtggctgattctgtctgcctagtgagcatctccatactccaggtttaaaagaaaaaatcttggccaggcgtggtggctcatgcctgtaatcccagcactttgggaggctgaggccggcgggaggtcaggagtttgaaaccagcctggccaacatagtgaaactccgtctctactaaaaatacaaaaattagctggatgtggtggcgcacacctgtagtcccagctactcgggaggttgaggcaggagaatcgcttgcacccaaaatcgggccactgcactccagcctgggggacagagcgagaatccgtttcaaaaaatagagaaaagaaaaagtcttgagtgctggacaagcctgtgactcaggactcggaatgataaacaagagagaaatacactgagtttctatgatagtcactaactcggggctgccggcactcgtgttcccctgcagaggaaaggtctgcgtgccctaagagagagctgctggcgtgcagagagaagcagagatgccgacgacggggaggaaacacactggcggtggtgaggctccttccagcagccacagccctggttcctctcagtctgtgaccctcccacatccttcccatctatgagagcctgtaaactccttttgcttaaccttgttttagttaaggttttaaacagttgccaccagtgtgccctaaccaccccagtggcttgagtgtttctccgcttcttttgcctaggatctgcggagatggacaggacaggagactaaggaggtgagaaccctggcccacaccatcactaagggcccttcctgaggtctgcttcccacatgaagtcctcccagggccctgaatccagccatccacctccttgttggacataggctccattagagagatgcggggctccagccccccttgctctgcctccctgtgagaagttgctgacagtgaaggaaaggtcagtgagtcctgctaattaaaaaacactttgccccatccgatttcccctgacacaaggtcactcagcactagcgcaatta

SEQ ID NO: 1884081 - DNA, 4001 bp, Homo sapiens
ttacaaaactaaatatactcttaccacacaatccagcaatcacactccttggtatttacttacatcccaacaaaaaccctcatatggatgtctagagcagctttgttcataattgtcaaaacttggaagcaaccaaagatgcccttcggtaggtgagtaaataaataatatccagacaatggaaataccattcagtactaaagagaaatgagctatcaagccatgaaaaggcgtggaagaaactgaagtgtgtatcactaaaagtcaatctgaaaagggtgcataagtttccaaagatatgatattgcagaaaaggcaaaactgtggagacagtaaaaagattgccaggggctagggcagtgggagggatgaataggcagggcacagaggattttcagggcaataacactactctgtatgacactataatgttggatacatggccagatccacagaatgtagaacaccaagagtgaaccttgaactatggactttgagtgatgaggatgagtcagtgtaggctcatggattgtaataaatgcaccactgtggggggggggggatattgataactggggggctgtacatgtgtagggacaggagtaaatgggaaatctctacttttgttaccggtggagggtgtaccgcattttgaacaaaaaattggacaaaacgcacaaagcaaggaaagaatgaagcaacaaaagcagagatttattgaaaacgaaagtacactccacagggtgggagcaggcctaagcaggtggctcaagggcctgaatacagatttttctggggtttaaataccctctagaggtttccattggttacttggtgtataccctacgcaaatgaagaggatgaagggaggttacaaagttatttacttggtgtagaaaattagggtttttcccttttatttagttgtaggaagcccttaggttacctgcctccagaccctattctcctgcctcattttattcctaattttgttgtgaacctaaaattgctctaaaaaatgaaatcttttaaacaagaaaataaacttataaattgcaaatatgtgtcacttacataaaaacaaagaattagtgtccctacatcaggaaaaaaacacctataattcaatgtaaaaatgcaaaaaagccaagagaaatggccaagccatggaaattcacagaagtagaaataggcagtaaataaacaatgctcaatttcatttatctgagaaatggagagtaaaacttcagtgacatacaaaggagtaacaatcattttaggaacaattttaaaaataacacttgtgatgtggctcaggaaagattcatattctcactgtaggaaggtaagtgaatcattttagaggtcagttttgcaacttagaagatcaaatgcatctaccctttttctacttctagaaatgtatcttcagaagtgcccctccctccctcacacacccccaagtgtacaaaaataaatgacatggatgtggactgcagccttgtttctaataccaaaaatcagtaaacaacctaaaaatctgtatccatgaggatttaaagaaatcctgcatgagttagaaagaataaggtagatgcctgggttctaacatagaaaatatcaaactggttgttagatgaaaaaagcaagttgcaaagtgaggtaatgtgtaaatgcagtaagcaaaatacatcatatatatagtactttctatgtatttacctatatgagcgtgatgcctccaactgcatagctgtggctccgggagcaggaccttgtaacagagcctctgcccctgactgtcctgaggggcctttccctgggaaaggaaccaggtttgattttcagtctcttttgttatcaccatgctgacagctttgcttgtcatatgcctttccctccgctgtactgattttaccttacagaagctctccttagtgcttcatcagacactccctcttttccaaagaaaagacagccgcattccatggtcatctggttgagctcgaggtgagccccagggatcatgtgcctcccaccaggctgacaccccagtggtgaggagttgccccttggctttttcgaggccaagcaactcagaggtgtggcaggattgcatgtcacagtggcacttccaaggccctggagagtgactcaacgcctctgttattaagatgtcacacaggctgtgcagcaacaactctagggacacccttcacactgacagagttggcaagcttttcctataaaggggcacacagtgaatactgtaggctttgtaggccatactatctgtcccaacaattcaactttgcccactgtagctgtgaatcaaccgtagataatattaagtgaatgtgcactgctgtttgctaatagtttattgacaaaaacagctgcttttgagcagtttgctaccccgacagagactgtggggagtccctggtggcagcgagctacaggcagccagtaccccatcagtgtggctggttccatcctctcaagcctgcctgcacccagacactgtcgagtgtgtcttcagaaaaactcctaaaattccccaaaagcacagtggctccccgagagccacctccctcaccttcttacaggggcaggttcctcttccggttccaccctcctcagcacggagctcaggggccatccccacctcctcttggccgcaagcacagaccttcccacacaggctcagcagctctgcgggcctgtcccccacctggagctgcaggcctccactcctggggacagctgtgaccatggctctgcaaagcagccttgtgcctagctcccaagtcagctggcagcccagagtggaacaattctgtggatcacctctgagacagcagcacatctgggcaagcctggcttcccacccctcacctcctgcaacctctgacccttgccatgcatgtggtagggaagctgcaaccaggcctcagcactcccagacctgtgggcggtttgctgtctgaggatcgtggcactgccttccctcagaggccttgccagagccaggggatgcagcgtggcagagctgtcactggcaaccctgctggtctccctggtgctttctcagctgggctgtgggtcaggacaaatttctatggataaggctggatcataatctagtgctccatggtcatgcagcgacagactcgagtctgccttctctcagggtggtgagctcaggtaggaacgggatgtttgaagcaagcacacctgtgagaaatgcctgttttcactcccatcccacacactcgtccagacactgccagcccacccccgacacacgtgtctgagggaggctgaggaaaacagacacctccaggagccgcatactatttcctgatgtgtaagccagacaaccctggaaaggaggtcagggaaccggagtgcctgccaacgtccccagcctccctgcagcaaaacactctcatggcaaaactcctttttaaagaaaggctttattgctgcaattagacatcccagtgtatagcacaaacccccctgtacagagaattattcaagtggtaatactgagaaacagtgaacacacacaaaagaatacaaaactagacatttagatcactagaaactttctaaggtaagaaaaatttcaaatgtgaagtgccttttagaaactacaccacacatgccagtgtaaatttggtttaacaatcaatttctataaacattgcatctaactgtgcactgatcaactgcacaacttcaacaattacttccaagacaaagataaatgcttttatttccctatgttttggtctttccttgggctagagacagaagctgcatgtttcaaaccagattcaaaagggaaagcacttcaaaacagaaagtacttcaattgtgtatttgccttcagccacatccagagacttgtggatctcacccggttggtcccagcccttctccaaccctgaagcccacagcaggggtgcagaggcagccccagatcgtgcaga

SEQ ID NO: 1884082 - DNA, 4001 bp, Homo sapiens
aaaccaaaaaaaaaacaataagactaaaatttaaattacacggtaaaaaatgttcaacatttatagtcctggaccatttactgaatttaattgaaaaccagcttaaatttcaaaaacagcaacaacaattcaggctgcctttttttattacacattggattgctccttgtctcttcgcttcatctatatcgggtcaaaaaaagaaaaagaaaaaataataatacaacactggaatcatgtgaagttataacaatattttcagcccagcaatttcagcccaattttcagcagtaatgtttcattagaatcaaacatttcctagatggtttaaaaacacaatgaaaatctggcactttgagagcttgtgtgaatacagctttaacttcttattttcaaagaaaaatgagatttaacattaaaaaactaaagcaatgcccctgaaggttcttcccttaaaaaagaaaggaagctcagcctgctgtacacattaaataattaaaatcaatgatccttttaagcctttagcaatgcatgaaccaatagggagaagcaatctaatacttcatgcatttgggggattgcattagaaagactgctagtctgcttctgcttttataaatgcaaatgtatgcagagcagacagattgggatctgtacaatttagcaatgatcgaaacttgtaatttttgaaaatgggacagatgtccagtctagttatattaagatgcttcttattgaagaagaaaccaaaccaaacaaacaattcaatgccacctcctcttttaaccggaaacaaataaacaaaggcatcacaaattagaaaaagttatataccatcttgtttctttcatggattgttaagttgagaggcagcttcgggtagtggaataaacatttccagcatgtatcactgcattactcatctttctgtccctaaaacacaggaatgaagggaaatatttccccattcaaggaccggggtgggcttaagtctaacttccagagtagccaggtctctggttctgtagactatgctctccttgaaccacagacaggaaggcagcccagagtcagggcagtcaataaatacatgctgaatgaaagcctttgtttactcactgaaagttgctgagtgctcgtcatcttttcacgtttgtaatatcacagctccagaggtttatttcatgatggcgagtgcctagaatgtgccacaaactggggaaataaaggtgaaaacatggcatttactcttgaagagcccgcagtctggtgggaaagccagataagtaaatatacgattaagatgagtgctagcggctgggcatggtggctcacgcctataatcccagcactttgggagactgagacgggcgaatcgcctgagtccaggagttcaagactagcctgggcaacacgatgaaaccccatctctacaaaaattacaataaattaaccgggcatagtggcacgtgcctatggtcccagctcctcgggaggctgaggtgggaggattgcttgagtctgggaggtagaggttgcagtgagctgagatggtgccactaaactccagcctgggtgatacagtaagactctgtctcataaataaataaataaataaataaataaataaatgtacaaaggcaggcagagaggcaactagaagagtgggaggcactgagtttacaataattcaatcaaatcttcattaggaatgtctacgtgtgaggtatgtggggcacaagggatggagtccctgtaggtgctaggagttcaggaaggggaatgacatccagttgtgcttcagaacaatcactctggaggcgaggcagaggaggatggtgggggttacagcctagaggccaggaggcttaccgtgggcccaaaccaacacagtgacgggctggagaaaaagaatgcctgcttatgagagagactccagccagctttcccacaacgcggctgccgcttcactttcagtcagagccgatggttctggagttcatccttacactgagctaaatccacctcactcttactgccatttgctggcctagatgtgcactctgcagaaattcagaaattacagcttctcaaacagtgggttgtgttcatgcttgactgccatcagcaaaacctagataaaatatttatatttctctaacaaacaaaaaagcagacataaggcatgcattccaaaacctccctggatttcccactctcaacattcaaggcaaggacgtgaggtcttcctaaagaggctcaaaagaagatagtttaaaaaattcttccttaaaaaaattaagctgctgctttatcgatgttttctggattttggaaattttcacttaatgaattacccctcttcttgcttcccaaactcaataaataaggggaaagtgtttctccattcaagaaaaatagggttttgcagctgggtgtggtggctcacacctgtaatcccaggactttgggaggccaaggcaggcggatcacttgaggccaggagtttgagaccagcctggccaacacggtgaaacctcatctctactaaaaataggaaaattagctgggcgtggtggtgggcacctgtaatcccagctactcgggaggctgaggcaggagagtcgcttgaacccgggaggcagagttcagtgagcggagatcgtgccattgcactccagcctgggcgacagaccaagactctgtctccaaaaaaaaaaaaaaagaaaagaaaaagaaaactagtgttttgctattctgaagacacttagagctccactcaatgtctacaagtggagctacttagagctccactcaaaattgagctccactcaattttccacgaatgagggacagaaaagcagggggcggtcagctgctaatcacgacctctgccctctgctttttcaccttagtagactcacctcctgcaggtaccctgataggtctgcagttctaacaagtttcctggatttctatctacaaccttagaaagggcccttcagcccagaccacattaccagagcaagatggtgaaccactacgtggtccctggtcggccagaactctgcccatgtggtaatgaggctgttctagtcaggaagcccagggattaatactgctactaagttttgatcaggaaaatataatttaaattgtttattatgaaagttggcaaacatacataaagaagactgaagaggaaagtgaactcacatattaacttccttcaggttcaacattaccaacatcttgccatacttcatctatccttttctttctttttaacttattttttttttttagagacagggcttcactctgccacccaggctggagtgcagtggcgcaatcacagctcactgcagccttgaactcctgggcttaattaagtgatcctcccaacttggcctcctaaatgctgggattataggcatgagccacagtgcccagccttcttccttcattctttttctttctcttaccttctcttccttctttgcctctttttccctttcttccccttcctttcttttcttcctccttcctttctttccttactgtggtattttaaagcaaatctcctacatcatattctatgcttatatttcagggtatgtaactctaaaaaatacaatttttcttatagaactacaataccattatcatacctgaccaaattaataataattctctaacatcatctaatacctagttcccaagaaacttttaaaatcgtaagacttgaaatttctattgcctctccagggaaaggccacactacagacagccttaacagattcactatcggggaattcttctagatactcagctgaaattttcatcctgtgactgcatattgtgcccccgtgtatcatgttaaataattaatctctctttttaaagtttgcacgtttcagatatttgtatacatttagctggtctctttcatctttgcttagctgagctatacacatttaattcttttaatatttcttata

SEQ ID NO: 1884083 - DNA, 4001 bp, Homo sapiens
ttgtctaactgacttttaaagtattaaatgccatgaatactcaggttcaacactgaaagtattagaagaaggaaggtttagttgttaaacaatgtatatatttaccatttatttacatggtatatacagtatgtaatattttatgtatttactgtatatttattttggaaattcataatacatactggaatgttaaaagtactgatattaatactgaaagaaatctcttttcttacatttttctcaatctctcccaaacatttttgaccatgaaaccctttttcattacatttattaccattttaaggaagtagtgttctttagttcacattctgagggaagccctgcattagagtcgcctggttgctagcagagctttctttgacactcctcttagaacaacatatttgcctgcttaagatccatgataactatgttttcttcctgtcactttgaatattttctagaaaatatgtgtctttatacaactacttttttttcttgaaagaatcaccacttaaaagattccacctctcaatcttggtgcactggggattaagtttccagcatatgaactttgggggagacattcacatcatagctaacacatttgctttttttttctgtgggaggtgggataggatgggatgttaagccatggcatatgttgctgtcgctcctttaattatctgtgtttgtgtgtttgtatgtatgtgtgtatatatatatatatatatatatgttatttgtgtgtgcccttgagagtggcataaagtaaactaaaaaatagaccaaacatggaaacactgttatcttaggtaagttttagttctgtgactgctgagagaatattacttgctgttttctgatggagggtctaaccagtggaaactggaaaatgaaagtaagcaattttcactaagttctctatgttcctaacagcagcaattgcttttaatattccacaaataaacattgtgaagatttccctgttattttttccacttaaaagttgtagtcaacatagatgattttctaaagaaactagatgattagaattttggctgtattataatctggggaaaaattagatgaattttccataatgactctctacattaactctttgagtaaaaaatttgtatgtaatacagtgactctagacagacactattttgtgctaatatcaaaaaagtgtgaaatttcctattgtacatttatttatatggtgcattgaaactatatgatactttagatattgctgctttgggtaacttcttcattatataggtgtttgaacatttgtcttttaagtttaaatctggaacactaatatttattctttacctaccagattaaatgcctgtgctttcaataatgaatttttaaaaatccagtctagaccatgaaggaattactgaatcttctctaaaaacctacattaggcaaggccaatgataatgttgtagttagttacaaatacatagtgaatgtatgcatctcctgggccccagcctggggcttctacccttgtttcaagaataatacgtggcaatatcttggccctggaatgatatccatttgctttactagcctactatttcatttgcctgtcgttagaaaagtggatttctggatttccatctcatgatgattatagaaaagtcacaatttgaagattccttaatttgaagctaggtgatatttacatgcccattaagttaatgagagtggagatctccatgtatttccctactatgtctttttgcctgcaaagccccctctcccttgaatcactgacattctcacaatgtaaataaatttcttgacatctttctcttgcccaatgcagtcatttgacctactaataaaaattcaattcacccaaatttctatttcattgtccttcttacatctttagtattttcttaccttattatttttaaagagtttgctagcaaaacttcagttttctttactttaaattttggttacaaaacctgtaagaagaaaatggccaagttatatcaactgctaaatactagttaaaatacaaacaacagcaaaaaagacaaatcatggactagagagctattctataagccccacaatatcaaatctgttttcagaatcaaaattacttttaaaaatactttagaatattttgtggaaaatattgatgatttaccttagtaaaagatgcacatttaatataccagaagaatcactgaaatggaactgagcaactctaacttatttatcatacaggtatgttgcatgctcatgtacatattcattacgcttcaaatgcagtaaaatggtgtcttgtgaataaagcattttaaattctattttatgcatttaaaaattttacacttatttcaaaatacaaaaaacctaatatttttcttgattttttttcttttggctattgtaaatgagcagctgactaaagagtacaaataaatattcattttgttagatagctcatgagttttcatgagaactagtttagcctgagacccaataataacttcccgtcatcttaagaaggggactataaaaattcatttcacctaatattaagcatgacactaattcagtattaaatgctaagtacattagcaattatggtacagtacgctgttactttccaagtctctgcagtaagtttttcatcattaatggtttattatttttttcttttctacgcagaacttaccatttgaaatagtataacttgaaaacagccaaactatttcaatttttacttatatccatgtaaatatatattccttatggccaaatctatccactaaacacaattataaaactagttctataggaattaataaaatagcaggcacttgaatccctgtacttaattcacagggaatcaatgtaagttccagtttctgtaaaaacaataaagcaaaaagggatccttgaattattgtctaatttatcaaagtataattaaaattctattgtctgactcatccccctttatagtccaaagacagttccggttgtgcattattattcattgcaataggatgattgctttcctaaaacatattaacacaaagtaatgtataagtgggtttgtaatgtgcctaaaataataggtattatcattacagatcttccttggttttacttttctatcagtaatgtggaaagcaaaatttgaaaatatttataaactagagaagctcagatattttgaattgaatagggtgaccaactctcctggtttgcccgagactggaagattcttagaacttttagttttaaagacaggacaatttcaagcaattttaggattagtacaatctctggcaaatgggttcaagttacttaccctgagccagaatgtaatcttgttgaaataaagacaggactgttttgtgaaaaggaactttttgaaaaccttgttgctgctctttcaggattttccaaatttgtcctcttcacctccctgacccctaagtcaagcaagttgatgttaaagacactcttctctctctggatacagaataggacagtagcaacacttataagttctgcagaaagtaatgaggggtaggggcctcagctctacatcacctagtctggatatgaagccagtctttgccattgattaggtgaatgattctgtgactccattttctctaatattaatagaatattaataatattgaacttatagggttgtatgaacaatacctatcatgcattaagaagtcaaggaagttagttaattttttgtgatcttgattatgattagcaacttagaacagaccgtcatgtctgccagtaatagctttaaaatctagattcctaggaggacttgttacttttagcaatcttctgccagaggaagcttctgtctcctgaaaggctcagctatatatttgtttgtttattttttcccattcaagatatacacatgaaatgacagaagaaaatttcaaaacttaagattcttccaggaaata

SEQ ID NO: 1884084 - DNA, 4001 bp, Homo sapiens
caaattttgtaccaggacacacgaggtactggatctggggggggctagaggctcacccccgcagagtcccacatgaaatgtgccctgggctgccagtgcaggatggggactgctgccaccatgccccactctgagatgctgtggggtgtgcttgtccccctcccccacagggtgtgcctgtgcccaggttgggggcaggttggcagtggttgctgggtgggaggcagggaggtagaaggtgagtggagctggagctggagctgtgggggcagaggagcaagcagctgagaagcagatcctggacgcagggagatgggaggctccatgctcccagttcacattccactgtcccattggacttcacttacaaaacacagtgacaaagataaaattattaagaatttgaagacagtgactgcagagccttatttcccaagcgtggggcccttctgggcacaaagccctgtgtagctctactggtcacacacctgtgacaccagccctgcatcctggaccacttagaagctcagcttaccaagtctcgtggtcttctagaaggttctacaaaccacagactgccatcttagcctttggctcttactttgttgggaaggttccctttgcactgccatggaaggctgggagctagcagagacctaccttcctgagagattttctagcccagctttcccattttgtggatgaggaaaccgaggtctggagcagggtgtgactggcatataaggccacacatcaggccactggcacagcagggcctagagccccgagacccgaggcccaactcggcatgaaaggtgccagcctctgggaaaagaccagagccccactggtatccgtaccacgctgttcctggctgtggccgcattccagccacagccatctggacccagaagtggtatcagggtttccctccagctctatcacccaggctggagtgcagtggcgcgatctcggctcactgctacttcggcttcccaggttcaagcgattctcctgcctcaccctcttgactagcagggactacaggcacgcgcctccacgcccagctaatttttgtatttttgtagagacagggtttcaccatgttggccaggctggtctcgaactcctgacctcaagtgatctgcctgcctcggcctcccaaagtgctgggattacaggtgtgagccactgtgcccagccgaaaactgagtttttctgtacatgttggtttaataaaaaagtaactggagaactttagcaccaagagtgtgaaggccaatactactgaggaggccccctggctctgtggctgggccacagcccttctgagcctgagggggcgaaagacccagccttgagttgctgggcagtgggtggggatgaggcagagaggatttgaaacaaaagttccaacccctggtgctgtttgaagttccacttcctggtgcagaggaaagacgtctcaccagaggctgaaggcatggaatctactcctggacctgttaccaatttgctaggtgccattaagcaaatcttgtcccctctctgagcccccatttccccatctgaaaatcagcaggtaggccacagtggccccctagggcccacaaagctcaaaagttttataaatctgagctcctggttggctcaccccatcgccaaggtggctagcactgagctcaaggaatgccgatccacacttcctcatttcaaaacgctgctctttccagctctgtgggcttcatctcccctcacaaaggagttcagagaggccgtccagaggcggaacatgcggctgcatttgctgggatgcccaggctcctctgtccctgaatgccatgcacccagacatcaaagtttctctgctgtctgggggaggatggtgcgggaggaggaccaaatcagccacgcgccccaatctggattctacttctattttcccctttccgcatgggggacagagagaggagaagaaggggagagaagcctttgaaaatgtctgctgctccatttcctccccgttcactgctctctgcttagcaattcacctcgccggcgggcccagtgacactcccgtggtgcacctcttagccactcggcaacttttttcccttttatgatattttgggctcctgattgcctgccaagtcaaacctttaacatttaataagcaggaggaaaaaatcctccaagtcggccccgatctaaacagtccccattcctatccctggcctctcctaggccagtcctggaagtagggccagtgctgatggggacctgcccacctgcaggcaagtgtcagccctactcagcctcagcggggctcctttgctaatgcagtcatggggattgcaaggaggaatgaacatacagcattgtccacttggagaagattttgcctagtaattcacagtgatggtgcattcatctcagggggcagtgtagaaggtggcagaggcacaggcatcgcaatgtgattttgagaccctgagaatgaccttgcccgggattggagtgagtcaggattctggaaaggaaaatagttttctgacttccagtgctgtgagactaccttctttcttttcttatctatcttcttcaccatgtgtcttcggggcctggaacatagtagatgctcaataaatattgattgaatgaatgaatgaataaatctgcttacacctctcatgcttcaaacagggaaaggctagattatttagaagtcttgtcggggataataatgagctcagtgaagccctctagttctcactcgagtttctccctttctttagaaatgcagtgtagagctctggaagggtgggtgtggatgaatgagagaagatggaaattgagcggagagtctctgacggccacagtgtcccctctgtgccaagacccctggatgtggcagtgtggggaaggtctgctcagggcagaaaagaatcccttttgggtccttccccaaatgccaaattgtacaccacagcggatttggacttccttcagcctcaggagggccagaggagggacacaattttcctgcccccagggttagctgtccaaactccaacccagcctccctgctctttctcgatccttctcagccagggcatggctgtgggacctgtcaggagaccctcaacccattactgctcctttgcagagcccattctcaggctcccatgtttgcctgcatgcagccctaagccagaacgcaatccttagaagaacggggtcctggccagggagtgggttttaaggcaaggctgaaggcagctgatacggggcaacctccagggagctggtcctagggaaccaagcccctctttccttctaacctttctcccaaagaccactcaggctccctcatgtagtgggtctgtcttcccccaaacccaaaatctgcccccaggaaagggtcagacaactcacttagagggatctgtggctggtaggactgaagctgtctagggaaaaatgaatctgcatttttccagtgttccagggcagaaaccacaggacggcctctctaggggtggggtttcaggcatccaccaccgcgagggtgtcactgcgcaggggcctggcatccctcaaagggtcaaggccttgaccacttcctgtgtccagaagaggtgcaaacacggggagggacagtctggtcagaggctcagggagtggggctggcaggctttggtctctgctggtctcccagcctgcggctgatgcacgtctgttgaattttgcaacagtccccatccctcaaggaggtggtgagtcctagccatgttcttggctcctcttttctgatgggatgagacaggggagagtaacgcgaaaatgtggtacaggatgccgaagtgcttgtcagcgctgggggtataatagggcccccacaggtgtcagcccaggatgcctctatggcctgggtccttggcagaacattctggggagaaactggagcgggaggatgtgttcattctcaactctgtggggcc

SEQ ID NO: 1884085 - DNA, 4001 bp, Homo sapiens
agtaaacattgacgtgcctttcatgtgttcttccttagttttgcaaagtacgttagagtttgcagagtatttataaggtgctatgtgagcacaatgctgagaagtagacagcactgtgcatcgtcttctgcaccctccccctgccctggccaggctaattggaatgaagttaggcttattcttgttagaatttggggaattaaatgatcaaattaaagataagagaacacccgctggggtggcagaaccttcaggctgtcctttgattttgcttctctgtctcttccatggtaattaaactttcggctgggcaatcatcccaccaggacaatgcctactttgcagctccctttacagtgaggcctgactatgtggttgaagtcctggcccacgagaggaagtgttgtatggcagctgccaggaaacttccttaggaggaagcagctgagccaactggggttggcccaatatgatccatggggacacgccctttcccctctacttccctttctgcattctgctgcctggaacgcagatgccatctggggccaagtgatgacagctgccccctggagctggtgagtggtggtaggtgggagggagcctcatctctgagaatcctgaacagcagagccaccatatcgagcctggactacttccctctggacttcactacgcagagagaataaatgtctatcatgtttaagcccctgttagttcgggtttcctgtcccagtcaaatttgttcgtaatcaatatagtgcgtcttggcaaggctgtgagacgacagaactcccttgcactgctgctgctgggagtatttctttacacctgggctttggagagcagtgggcaatgcctggtaaaggtgaaaaatagtgtctgttgcactgggtttgtcagcaggtagcagaaatcctggaagggtttactccacacacaacagtattgcctggtacagcagctctgcaacaccaaaagaggtggcccaccaccttttcctcctctccttaccatgtggcttttggcatcatagtgcaagaggacctgtgcatctccggtgtcacatctaagggccacctctggcccttcagtgctggcagtggataaggtcctctatcactactacagcaactctccttggaaaacctaggagggtgactggaggaggaaagggtggaggacacaatttctgagtgagagagcagctggacaggttgtcctgcatgtgtttactctcgtattcacacggagtagccaagagaattggcaagacacaacattaaaaaaaaaaagaaagaaagaaaagcagaaaacaccttactgagtagaagggaggcaggacgtgtgtgtccaggccccgagagaaacgccagatttcacgagcagcctttgcagccctggggatgccaggtggcccttggcaaggctcatgagctctggagctggcccatgaccttgctgggacttgtggcatcccatccattgctgtatgtcccttgtttcctatttgtaaatgttgaaggttgtcgtggagaaaaaataaaaacaggtgaatgtttagtttagcacagcacttggcatataataattattcatgagtgttacttcctcatggtctcaatgctgtgccaggcaggtaagagtggctgtgagtgagtcctgaggttgggtccgagctgagacacagaggctgccacagaaggagatggtaggcagcgtgggtcctgggtgcagcagtgccactgatgcagacaaggtcacccccagcctgggactcaacttacttctctgaaaactaacaggttggaacatacagttgccagggggacatgcaactcaaacattattggttcaaaaattgagagggtacaaaatgtttgccattacccccaaatcatcttgtccttacctgtctgagctgaccacagggcttcctcagctgggacctggtggctctttgcctcttaccctggggagtcacagctgcaaggaaccagtggcaagaatcctccgagggtttagaagactcctttgcccattgtgatgggtgagttcccattccatgacaacaatgggcacccgcaccttcccctcctggaagaggctgagaagtaaagatcaggaacaaggaggaggaggagcttcccagacgtgtagagcttatgaagtttaggaagcagcttcccagacatgtagagcttatggagaggtgagggagccaatctcagccacattcagcttcctggagagaatgaccaaagggcgacgcttcaacccaccttcagacaaggatgggagatgggtaaggaagatggtggcccctggtgcctttctcatgccacgtgggtgtggtcaacagtctgaggagttccaatcctgcttctactattactgaagcatgacctttgacaaatcacttcactttactcaacctcagtttcttcatctgtgacatgggaatcctctaacactcttgcaaagattgaatgaaataatgcatgtaaaatgctcagcacactggaacctcgtgaatgtccactaagcagtcattcctgctctactttttctttcttccttaacatctattttctaacatactacagaacttattctcttatctatgttatttttctccccttgctagaatataagctccatggagctgggatttttgtctattttattcactgatgtatccccagtgcctagaacaggatctggagcatagaaggcactcaatacatatgtgttgaagtaattatattatactagaaacctctaaacaaattcttgttggctcccaatccaattcctttagcccctccggcctatgaaatgagaagagtccaggaatgcatcatttactcatcttcatcacttgaaaactttccctttccagcttcacgctctcccccaactcttgctcttctgatgtcacttacagagcctgtgggatttttcactcttctaccatcttcaggaaacatttgggtcactcctaagtgtgaggtcttagccttgtcggccaagcacttctctcctttgctcttcaacatgtatatttcatggccgacaagcctcaagcctttcccatttctgatttctacaattcattcacaaaaagaatgttaaggggaaatcacagcagtagactcgcaatgagaaacataatcagagaaaaacctgacgtcgacttcttttagggtagcaacaggtaaaaaattgttaaaattttaatttgtttcaaagaaaaacagaaaacacttcagcaaatttgggtctgaaggctttaaaaaactgatctacccacttggatacaaccttggctaagcagcttagtctttctaagtctcagtttctttgtctgtaaaatgggagcataatgtaccaagggtagaagaccatggtgggggattcacgactcattaacaagtgctcagtacaatgagtgagcacatagaaaccacttaacatatatacactttgtatgtatgtgtacatatacgtgtatacacacaaatgtataccttgtttcattccacaaaaatttaaagcatggaaaatgtacacaataaaataatacagtataaatcaaatagaaagttataactagttttataaatactttagaaagagaagaggctgagtctgagaacacatataacatagacataatattaggtatatttccaggattatatggtagatatttgggcaccacatttgactctgagttccctggcagccaaagtaaaatgagagataatgtcaactccataaagctaagttcccatgaaaagaaaaatgtaagttgctcagattaagtagctttccctctagctattacctatgtatcagttacaattgttagcctgaattttatagaaggctgactaaagtgactacagtgtcttaaccaaatagggatttatatttcttaagtaacaatgaaacctagaagttggccatcccaggctagtacagctgctcaagggagt

SEQ ID NO: 1884086 - DNA, 4001 bp, Homo sapiens
ccgctatattaagaggtaggtcttgattatcttcatttcatagatgaggaattgaaggaacagaaaagtctagttacttgacccaggccctagaaccaggatttgaatcaagtctgatgccagagcttgggatcttcattgcatttgatgtgataattcatttgtgaaaaaacaaagcaattcatttgttttcatttgtcaaaaacaaaacaaaatttcaactaagataactgttgagctctttaccgttaaaataaaatcgggtgttgaaatgagtaacagcaagccttgagaaaagacaccctgagaagtcaagaggatgcattaactgtctacagatgaacagaatctcttctcttctttgaacaagaaaacccagcagtaacttttatctaggtttcacatttcaggagttacagtaggggtaaaccaaaacaggttaaaaaaaaaaaaaaaaaaaaaaaaaagcaaaagcccagcaagctgagacatcagagtccttcagaaggaatgatttgccgtcttctcttcaggacatcccctctttaggaggacaaattttttctccagggaaaggggcgtccgcctcagaaatgggggtgtaggtgagggatcttgttgctttaactgtttgttcattaatccctgcactttactagatttagttctgcctgttaacgtagcctcaggacacttggctaggaaggctggagtgtactctctgggttagttattttgggacattctcgccctgctgcttgggatgaagaggtcctaattaaatacccggaccttccaacgggtagattttcaaagaagatgcccagctatgctgcatcctcatccacactctcccgctccccccaaactagtgcaaaaaagcttgccagggcctgcagaaagcgccgcgactgcgaggctgacacgcgtctttccttccctcccccggggaatgatcccagcatctctcgcagtgatgtcagtgtaatcctgagtcggatcgggctcccggctgggtggcgggggggcagatgatgctcccgccagctgggcagagcaagggtgttccccgcggaggtggcagccctgggccgcggcgttccggaacccccgcacccacggcgcggtgccccacggtgcccgcgagcgccgcccccgctggctagccgcgcctcgctccgccctggacgccgccggtcccggcgcggaggtgcggcggggagtgggagccggcccggctcagtctgatttacggctctgctgaaaaccgcttcgctcccgcagcatcagcaccggaggcggcggctgcagcagcagcagcaacaagtcgggtaagaggcggccgccggccatctgcgcccgcggctcggcggaggggacctgccggggtggccggggctggggagggggtccccgagcccgcagcatggcggggagttgggagagccggcttcccggcccccaccagcaggaactcatgtgcacacgaatccactctggcacccgtgggctggcacgcagcggagagggggcggggagagctgggaccccggggcagggtcattgccagcctgcccttctctggcagagtcacttagggctcttcatcagcccagtggactgggtttcctctgggcccataaaagcctgcgtgctctggagtgtgtgattacccatttccccatccaaaatgccacccttttcccattgcccccttagaatcctgacttcccctttccttacctcttgtcagcgtctttggccctatgctgagccagggtttgcatctcgttcccagaaaaccagtggttaaacatcccggtgtacccatcacaggaagaggttcccctctctgggggccgggggcttcacctagaagccttgcctgcctcgctgcctggggaccatttgcacctctgcttttgaagaggttgaggacacttttcacccaaagaccccagctgggctccctcatttcgggtccaatgcttgttacatttaagtagaaacctttcatggaggaatagaagatatgcactgcttgcagaattgggttgccaacagtcatctgttgctagggtgaagataatgcattcctacaaggaaaccagaacttcctgttattaagagagtatgctgatacctacctggttcacacactgaccatccctagaggttgtcatataaaatagcatctgagacaagacaaatccgtccagaacactctattataataaaaatcttggccatggccccacttatgccaaatggtatttgacacattgggtccccaggtttcagtgaaactcacgtatggggtctgttattgttacgattagcactttggtttatgtcatcacagcaatacctgaaggaaaaaaaggcaaaaatttcagggtgaaaaattttcagctgattgcaggcttaatgccactgtgcatagcttgagtaatctttcctgtacttgaggataggtcctgagcttgctgtcttaggacccattttgacaattcatgtgagttttcatatgttcttgtgttcacgcatctcggattgtatccttaaaatggggcacggttttgcatttagtgtgccaaattcaggaggggaggaaacttgaattccacttctggatctaccactttccatctgaccttggattaatggctttacttccttgcttcagtgttctcttctgtggagagggaatgttacccacctttttgattctaggtaggagttggcaaactttttctgtaaaggtagtaaatattttagcttttaggagcatagagtctctgtctcagttactcaccactgccattgtggtttacaataaataatacagaaattgatacggcagcagtaaataatgcagaaattgatgtggatggatttggcccatgggctgtaggttttaagtgcaacataaaatattatgtgcaaaagtcacttgaaaccaaaaagcctctgctgtcatggagatgagcagcaatcattttagtagtgtgtttttcagccgacttgtaaactacctatttcccccctcccaggacttttagagtaatgcaacagaaggcttttgaggaaagcagatatccctggcaggagtcctttgagaatgttgctgtgtgcctgccattacgctgcccgaggtgtggagaccataccagatttagaagcttgtcatccttgagggcccatctggagttcagtcacagctacgaagaaagaaccctcttgacaaaatgcagtctctttccatccctcaaagacacagacctagtcacttcctcagaactcctgaaaccgggaaaattgcagagcagtggcaacgtggtaaagcagaaaccgagctatgttaacttgtacagcatttcacatgaacattccaaggacaggaagccatttgaggtggtggcagagaggcctgtgtcctatgtgcagacctacactgccatggacctccatgcagactcgctggatgggacacggtcgggtcctggactgcccacctcagacaccaaagcttctttcgaggcacatgtcagagaaaaattcaatcgaatggttgaggctgtggataggaccattgagaagagaattgataaactcaccaaagagttggcccagaaaactgcggaactgttggaagttcgggcagcttttgtgcagctgactcagaaaaagcaggaagttcagagacgagagcgggccttaaacagacaggtggacgtggccgtggaaatgatagctgtactgaggcaacgcctgacggaatctgaggaggagcttcttaggaaagaagagtaagtgttgctgacaggggatgctaaccccattgctttaagcagcaccccaatcgccttacaagcaaatgctaagcaaggttgatttttgctatttgcaggtgccttgactgcatttcttattgatatagttgaaccaggaggaacaaggctttgatatcatttaccctctgtgtgcacggtctgcaacct

SEQ ID NO: 1884087 - DNA, 4001 bp, Homo sapiens
gagggtacctttgaggtcttctcacctgaacgtgggactaagataaatgttctctgaaacatggcgccccatctttcgaagcaaagactctgctgcatgcaatgtcgctgcatttctgccaccattcggacagcatttcatgtccctctgatagggccaagtgccccgggaaggagagtggcaggtgtcagggctgagagacaaacatccgagctgatgttcttgttcctttttagctctctcgcagcctggctgccaaccacgtcccagggcccctgtgccctgaagtgcagggcttccaggagagcctgggaatctgaatctgtctagattaagattttcctccgagaagcaatttaactagagtttggggtttctgagcccctgctgaagtcttatctctaagagtaaaaccaactcctcctcattttcttttttcctgtccataagaaaataaaatcacctttaaaataacatggcaaatcatcagaagacataataatcgaatgagaagttccccggagacaaaaaggttaaaaaacggatatggcgaatgcagaagcggtgttatagtacaaagggtgaatgcaaccgtttgtccctttatacagacaccgagaagccattccacagtttgctttgtccacaaaaccagactcggcagccgcatgctgagcgtttggcttccaaatgcacagcctttttgggtttgcaaaagcggagctcccagagccacaaactgagctgctcctgctggaggtggcggggaagtctgggaagggctgactccttcccactgactctggaggcatcgggaggtggccgggcctcggccagcatgcaggactgacttcacagtggggctgggggcccagagctgcagaccatgatgccccgggaccaccgaacaggtgccaggtgagtggggcgtgggcccttatcttcctcagaccgcctgcctgctccccagagttgaggttgtcaagctaactcatctgcacactcattttcttggagtcttcaggaaagaaaccctccttttaggagtctgtttgagcttttctatctccacattttcaattctgaacatcgaaagactggaatatcttttgcaaatgtcaggcacacctgcagccccaaccgaggaccaggtgcccctcaaaagggtggtggatcacatacaggtatatacatcttttttttttttttttttttttaacaaactgaacagtgtttggtctggaatgtgtttaaggaaaaggcaaagttcgcagagtgtgggtagacagaatagggaagaagtacagtttcagaagaacatgcaaaggtttcgtgcactggctgaattcaaggaccttcaattaatttgccagaagtgattgtgcaaacctgggaaagaggacatcttacttctgtttatgaaaaacgggaggagcttccctttgcccgcacttgccttcctttctcatatccaaaggaatcccagtcgtgtgcttgttaaattctgcgaagcagcgagggctctggctgaagctgcggcagtggccctacttccaccttcagccctagagcaatggttccagcgtggcctccccaacgcgaagactcaattctggccaaggttctgggggagagggagaggtgaggggccacgatgctttcaaaaataaagtctacctgcactgggatatcatctttcctttctgtttaaaaatgctcataaaatagcaagccccagtgggttaatcaggttaagctgtcattccacaggggagaggatcaatccactttccaaaggggatcacctgggctccccccattccccccaccccgtgtgcctggtgttctcggcttctgtccctcccacctacgattcatccagggcatgatggacactagggtagacagatgagtgggatgagtacggggtaggtaaaccgagtccggggctccctaggccagattcctttcatcctactacagatatttcctatgagcccagccttggccagcatggccatcttttttgagacggagtcttgctctgtcacccaggctggagtgcagtggcacgatctcggctcactgcaacctctgcctcccgggttcaagcgattctcctgcctcagcctcccgagtagctgggattacaggcacgcaccaccatgcccagctaatttttgtatttttagtagaaacagggtttcaccatgttggccagaatggtcttgatctcttgaccttgtgatctgcccgcctcgctctcccaaagcgctgggattacaggcgtgagccactgcgccctgtccactgtccatcttcttttgctcgctctatcctgactgccggggccctggacactacacaaagagctagctggagagtgagactctctcaaaggccagcggtggctcagagactctacaccgttctcaaggtcagatgctagaagtgaccagaattgtggccatggtcaagaacgcaaagccactcttcctttttttaactttgtatggcacgctttgccatagctcttttcttttaaaagaagacctgaaggggtagaatgttttctagtctccgacagaggcaggggtaggaggaactggtgaaaatcagccactgtgcactgccagagccgtgcatggtcctgggggttgccatttctctaacacagcaaaccccgtctctcctcaagggctttggtggtcattgagcttctcctaggtgtgccctgcgcctctgcaccacttcattctgaggctccggacccgtgtgcccgctgggaagcagagccgtagagaggcagacagctgcccagactccagactccaaggccacctctgtgaaaagggccaagctgctggcctgttggtgcccgctcactgtttgtctcaatgaatagaaactcctcctattgcctcacgtatgagatgaagatccgggaagccagggagcccagacaggcagctgagggaaaggccactccaggccactacttcaacattgaatactccaagtgaggaaaagagaatccacttgctctgagaagggatagtgaccaaatgggggacttgggctcaggaaggaagcctgtgatggggtctacgcgtccacccttagcctcagcccagcaccctgggtgcatgtagaaatgctcagcctctacaggtggactctgaccttggtgcgggtcctaggactctgagaccccatttgtcagaccttcacgaaaggcacattctaggttctcttcctgttttataagaaaacaaatcataccaagcgcagtgcaaagacaacctctttttaacatgagagctctctcaaaagcacaagagcgcctctctttctctgaagcaataggaaattaacccaagcctggtgggatcaggacagtacaggcttcctgatgtcatgctcaacagttgactcttgggctgaaaccagtcactgtctcctcgcacgatgttgttgagacccggcgtgtgacaggccaagcatggccaagaactgacccgaacagcgaggggggcacctgcaccacggctcacctttcagaggttctgcactttttgggtgagggatactttcaaactaagtgcatataacatgcaccacatgtatctgctcctgaaaatacttcaatcaccagtaatggaactcagcttcaaatgctgctttctgaatgcaaatggttgtatatagcacacagcacaaagggctattcatcactattcatgtactcatcctaggtaccagattcgggtgcattttcagcgcttgcagccttctattactttgtcatgcactgtatgaactcgaatgtttccaagacacttcttagtaagcaaccgcctagttctccaatactgcttataatattcattcattgcatggccaactcaggtgacacttgcttcttaactgggtctaatgtcatcttatagacctttccagggtttttagattttgcagagtgacagcttgatttttcaccc

SEQ ID NO: 1884088 - DNA, 4001 bp, Homo sapiens
tgcaactatgagtgccctccaacaatggaacagatgcaaaatagaaatcatgttatcagatgacgccatagttgtctcgcaattgctttgcggaaggatttttcatgggaatttttccatctctttatacttttcacacataggttgttggctttagccaagtgcgacggagaaggacaggcatgtgtgaagaggcctgcccaaatgttacccggtgcggaggcctttgtttagcccattggcaagagaaacaccagcaccacattcttggtgaaaagcctctttcacagagagagtgcattcaaggagaaaatcagccttgaattgccatttctgaggcagagcttgaaagacagatggaaggagtaggttccatgggaaaggaaaggaggaaagaaaggggatggcctcacttgccaaagtaaagctggctgtggctgagagctctttcaaaactgccaggaaccttgggagccgtacacttctctctcccgggaggagacccagggccaagtgacactgcggtaactggaaatcccttctccaaggccagagccctgtgcagaaagcatgggaagacttcaacaaagccctctcttcttcagggaagtaactgtggaatcgggaaaagacagaaaattcctgagtagaggagttcttaacttagactccataggctagtctagagggtcatgaataagctctaggaggtctgtgcacaacctgaatttatgcagaagctgagtttgggttcagttcagaagaagggttctatgcccaattggtcatgtttggaggacatgttcatttcccaaccattgtcctgcctgcattttctattcttgaccaatgtagatgtagttggcctcaccatgttcctttttgagatacgtaatttttcttgatgttctgaagcactggttggtatatattaaaagtagatgttgtaaacggacatattttccaaatatctttttgttaaaatccacatgaaacattgtctttgggcaatggaatggccaaaccacctttttggacaggacacgttgtatttgtgttctggtctagggaagagcagaaaggagcaaatgcccatgggctccctgtggtgaggccggattaaccagtgtctcacagggctgcgttttgtctcactttgctgtgcgtgtagtgtatatgatcagcaaacaagtcctaattttatagcacctactctttctatatgttacagaggttgccagcgtttgaccaaagtccagttagtaagcaattttgtaagttttgtgttaaaattcataggaaagactgtcttccaaaaatgacttgtggatatcgtgaacatcacctctaagcattgcacatgcgtagatttgcccagggggttgatagatgtgagaaggggaagggttctaggccagcatgttcctatgtagaagatgctttcaggacacagcctttgttgcatgtgtgcagttaatgcggatgaacttcttccatcatctctgaatcatgtagcgtaagtatttagaagtgcacatatatgttaaaagtagataatgtaaaataatacactttcaatttttctgctaacttacaggtatgattatctttttagagtggtgttaaatttgatctcttggaggagaggggtgcagagggaagtttagacaatttcagcctgtctgaccatggttctgtctgtgtattttcattaattttggtgtctagtaaggaataaacaagtcctgagtgcccgaagtgtgttaaaagcagaggtagcaaaacaacccctttataaatgtgggttgttttattacctctgcttttaacacactttaggcatttttgttttgccagtttataggaaggactgtcttctgggagcgacctctgtcaacccacctcttggatggagccagaaacgttttcacacttcctcgtcggggcaacggagcagggaggagagtcacggtggagctccttactggtaactccatatctagaagacaatttggggttatcagcacagttccaaatgtgcagtttttagtaagtgcttgtgtttattatagaccacgttcattcttttctatttttattttaagttctggggtacatgtgcaggatgtgcaggtttgctacataggtaaacgtgtgccatggtggtttgctgctcctatcaacccgtcacgtaggtattaaacccagcatacattaggtcttttccctaatgctttaccaccaccaccacccacactcccctgacagaccccagtgtgtgatgttcccctccctgtgtccacgggttctcatttttcagctcccacttatgagtgagaacatgcagtgtttggttttctgcaggcgttagtttgctgagcataagggcttctagctccacccatgtccttgcaaaggtagaccatgttcattctttatttcacaacatcgttggtttttcagatgtcttgagatgacaatgtatgataaaaggtagagctagtgaattggcccatttgtaaatgtttttattataattaacacaaaagaagcctcttgaacgtggtattatgaagccacctctgagcagtgcaccccaggactcattaattgggtcagcaacagagcggcagaaggagcatgaggaaggaactatacagacacattgctatttccatcttgatgataaccattgatgtacgtgtgtatctctttgggggttactataagaatacactgctaaataactcagtggacacataccttcttgctaacattttactaggacagctctgatcattctcttagaaggattatatcccattgctttataccctattttaaattgagcattaacggaacacagtattttaattgtaactctgccaacatctttattcagaggactgttgccatttttgtctttcaggaaatttttgtctccatgaaaggcaaaattacattttttttcctgattgaaatggtgtagtgtattcttggttatcaaaatactcttggctttgggactttaaattgataaatattcattgtgtgtgaaaatatgatacatattgtgtgatctcaacaacataacaatatgcattcaattatgtgtgtatacacacacaaggacttagaagagcaaggtcacatgtaatctgcttgtgattacaggtgacttctgagttctgtcttccacgtgctcttcattttcaataagcacatgttattaactttgaaagtttgagtgcttacattttatttttaaaaattgtatgccaggctgggcgcagtggttcacacctgtaatctcagcactttgggaggccaagggagacagattgcttgggtccaggagtttgagaccagcctgggcaacatagcaaaatcccgtctttactaaaaatacaaaaaattagcagttgtggtggccggcgcctgtaaccccagctactcgggaggctgaggtgggagaatcacctgagcctgggaggcgaaggctatagtgagtcaagattgcaccactgcactccagcctgggtgtcagagggagatcctgtttcaatttaaaaaaattatatgccaacacttgtatgcatctgtatatacctatgtatgtatttatgggaagaggtaatagctttataaacaaaactcgaagaagttgtgagccctaagttaagatccactgctctacttccaatgctctcttctttttttttttcctttaaattgtggtaaaatatatataacataaaatttggcatttaaccatttttaagtctatagttcagaggcattaaatacacattaacagctgggcgcagtggctcatgcctgtaaccctaacacttctggaggccgaggtgggtggatcatttgaggtcgggagttcgagaccagcctggccaacatggcaaaaccccgtgtccactaaaaatacaaaaagtattagctggtcgtggtggcgggtgcctgtaatcccagctactcaggaggct

SEQ ID NO: 1884089 - DNA, 4001 bp, Homo sapiens
attaagtaatttttgtagaaaataatttcgcgtttactgaaaatagaataaaaattattttttcacttatataaattatcagtttaaacagctgcagtaaaaaaaaattgtttccaggccattacttaaatcctgagattcagtttgcctggtaggggacaaacagttgagatcccttctcaagtgacctggtcaataaccctgtgtcgtgtatttattatttccaatatgcacaatatgtaaaatagttgacgttttgatttatattaaggcgcgattagtgtagaatgttcctataagggactagggaaaagatcaaactataacacattgaatatggactaaataggctggtgtggcaccaccttgggcttgtaggttccttaaaaaatatgtgatcaaagtttcagactgactgtcaaattaatttctggaaaacagaccattgtgagtttatggagagagtcaagaagcagcaataaggactgcactcttgcctggacactttaactagtatgaccctctccaggctcacctctcctttattagctctaaatttctgcattcctaaaaatgaggaagctgaactagattgcctagaagatgctttaatggtctaaccttctatgccatagtaggtttttatcttctcttctctaatgtaaacatcaatgtcagagagtcaatcaatattgcaaaaggtgaacagaataaagacaccaattcaggagaacactttcccgtgtacaagtcacacaactgtcatccaagacagtacaaacattcttgcccctactggttccacagtactcctctcctaagtacacttccatatttcttgctgaacttaaaatgccaatagaagcgatttcttcacctccatcagggccacacctcaggtaaaggaagcaggggttttcatcttggttgttcaatcttctcttctaaatcaccagattctggctgagaagaaaacaggtgaaaacatcacacagtatagtttctgaacatggctcaaaacccacttgttaggccatgaggtttattctaacaaatgctcaacacagaattcataaggaaatggaggcatcacacatcagggcttccccctctattttttcctcaatcatcaacgttctactcagtcccctgcaattgattctcggatacattactggacacctactgtgtgcacaggagtaggagcagaacacaatagaagacaaagtgtatctttttcgaaattaagtcgacggcggtcgtctatagctggactttttacacagcctgttttggtggagaggaggtggcttgtttgagggtagatgggcggactgactttgatagcagccctgacgacccgtcacgcctgacggggacgtttatgaaattccaagtcctggtcaccttcccccgctcatgcctcggggcctcgggtacttcccggccagacctaccccgcctccgcccaccccggtcctcgcctccacctcgcagccccgctcccccgcagagacccgacaccaactgctctcctggatcccggactcagaccctcacgttccccgaggagcgcggcagtcgccgagcgcagcgacccggtcgccggcggcccggcgcaccgtggcgcaggtggcgccagaagctcctcccagtcgaagtcgcgggcgcagacacgagcccgggtgaggaggctgtgagttagggccccgcctgcggcatcccaggaagaggcaagcgtggggcggcgggtgaggcccccgtcctcggaccgcgtgtccactgcgccgcctcctgccaggcctctcttccagtgcttaagtgtcggccagtgcagcgcagaaacgggcaggcagagcgactcccggcttacatcatttcaaatgcccgccgcttctggatttggtgagaacctgcaccagagaaacgcatgcgcataagccaactggactcgagaggcgttcaaactttgctcaggaagcgctaaagagcggagcatgcgcactggcaggccctcgctcagcctttggagaccatgcgcaggcgcggtgcactgtgcgcgggcaccacggcggtttttcgacgctggcggtggacgcaggcagcatggaccacggttgctgggcggatggggagcgtctatggtcaggtaggtgtcgtctcttcgctctacgcgatgtgcaggaccgactcctgacctcgttctttcccgagtggacgccagggccttttctgcctccactccgtcgggtctgcagcatttgtggcagcgaacgcggcggaagcgctgtccattcgggttaattttactccgaactctccctgcctctctcatacacattctcgcgttagaggggagttgaggtagatattgaacggcgttagtggtggacgctgggccacacgggccttccccaggtgccatctcatttgatgctccctgatcctacggcgttgccaggactatgctggatgccctcgtgacagaaatcagaaggttgagaaagatcccaggtgtttggatggagcggtcgcctgagggagttttccagatgccccatggaataggaagtagatcttgcctctttcttccttttgtactccagatgcattctaagttgtgtacaccagacttcctgttctttatgcccagcccattgtagtcataagttaactttgatacatgtcatcataattggacagtctaaaggaaaataggctttttagaattacctatctgaaacttcatgagcaagatcaatactataagctggattttgacttccttaaataaggcagaaagcctacagcattttgtcgtctcccctttctttcaatctcgtatgttcagtattatcacccagtcttgttttatttttggtttttaaagaaaaacttccctgtctttctccatctctgcctctctgttttgaaatactagctttcatcggaacaattccaggagtttctttactggttgatagtcattatctcctcacctgcgtttcattttctgcactgccctctaatcttttatcaattgtcctgatgcttgatgctttctgactgaatcaccatcaccattacttttttttttcttttgagatggagtttcagtctgtcacccaggctggagtacagtggtgtgatctcggctcctgcaacttccgcctcttgggttcaagcgattctcctgcctcagccttctgagtagctgggactacaggcgtgcaccaccaggcccagctaatttttgtatttttaggagagacagggttttgccatgttggccaggctggtctcaaactcctggcttcaagtgatccgcccgcctcggctcccaaaagtgctgggattacaagcgtgagccaccgcacctggccaccattacttcttaacaggcatacaaagccctttatccttgacttctgcctgcctcctagaccccccagcttttgtacatgcttttccctctacctagaatgccccttcttttggataggaaaaatcctgttcatcatttagtgccaagcacagccctccacactgtgagagaatttgtcagtaatttctctctgctacacttagagtttttagatactataattctcttctggtatggagctttaccaaataattctcacatttgttttcccaaccatctgtacagttgttgaaaataggaattgttttgtgcctagtagagattgagtataggtttgttgtatggaattgatagagatagcaataggggttgtttgggaactctatcacagtataacaggagtagaaagaggtgaaactggcaaattcaatcttattttcaaagctgaaaaaactttgcaaaagttagtgagaaaattatgacagtgaaagagatctgagctaatccatccccagtcttgccttgattattcttgggcttttgggacatttaggctatagtttaaattatcataggccttcccccaaactcaactgcttttgcatcaggctggcag

SEQ ID NO: 1884090 - DNA, 4001 bp, Homo sapiens
agaagactttcagttaaaagcctcctcccttcagcaaagtatattctgattccattatcgtgttaggctcctatatagttataagtaatcccatgcggttttagaattcttaaatattcacacacatagtcatctgaaaatgaataaatccatgaatgactaaacaaaatttattcctatatcattttcaatatccttaaattatgcttacatccttaaatcggttgcctcattctgaaagcacatagtctgtaactcataaaaaacacctgtcggccgggcacggtggctcacgcctgtaatcccagcactttgggaggccgaggtgggcgtatcacctaaggtcgggagtttgagaccagcctgaccaccatggagaaaccccgtctctaataaaaacagaaaaaattagccgggcgcgggggtgcatgcctgtaatcccagctacttgggaggctgaggtaggagaatcacttgaacttgggaggcggaggttgcggtgagccaagatcgtgccagcctgggcaacaatagcaaaactccgtatcacaaaaaaaaaaaaaacaaaaaaaaaaacccactaaataattcatttagtatgggagagtgtgaggaagcagaaaatttaaaaaaaaaaatagaccagcaataatgtcactttttcatgaatttgttagttctttctgagctccacttacagttactttcccattcttccctgcacaccgtcaacacataaggactcaaattaagatgatgtatatgtttacactccaaaattttttttttttttttttgtgagcatggggccgtattttaatacaagaaagacattgctctagaacatggctcgcctttgcttcagggcctagcagtttattttagccataagggtaagggagcaggtcagaaatgacttttagtgtaatcctatctgtaattaaaaatacaaatgctgtcataagatcaaatgttatcaaaaatcagtatttaaaattaaatttacccccaaatttctttcaaaaaaaatttgtaatgttctttttcagtgaagcctttgcactgctagagctgaagaatgtgatcaatcggcttgttgaataatcccgcacagtaggtattccgctgaagccaactctagctgggggctcgagagcgaaagacacagatggggccctgccgcccctcgaagagtcggatgggggcgcccgtccccggtgcatcaagaggctggccccgccaggggcgagcggctggcaccgaaccccgcgcacctcgccgcgggcggggctgggccgtagtcggctcgatttaaggctggtatccaaggctgcggccggtcaggcgaggcgaggcgaggcgacgtgagcgagggtgcttagggagaacagccgctggcagctcaatgctgggtggctaacgctcgacggtgcccggcagcaacccggccgacaccccgacccggatcccgagctgcgtcgcggacaatgccgcgggcccgtcccggactacgactcccgacgggctctgcgaccgctccggggcggcccagcgtgcactgcgccggccagtttgacagccgggcgccctactcggctagctctgctcccagccagggacgctggccttctcgcggctttcccccgatgtctctctttattccagctgcctgaaactcggtcccacgaatggcaggcagcgtccaaaattcaaccccgtaaagccagcaccagccaataaagcgcacggatggaggccacgtgacagcagtgggccggccctccggctgagccctgatctctatggtttccgcggctcgctagaaggagtgcggtccactggaggtctccctacattcttcctccattatctcactgcctccggtggctgctgggataccggaggactcgggtcccggctcgactcagtcctccagccgcccggggaatacctctagttcttcccggccgccgccgcctccgccccgccgcttcctcctccgcctgccggcctccttcgccccgccccgtccgcgcagctcgtccggcccgcccgcaggccagcttctctcgggagcctccacccaggcgcatggctccatgaagcaagaggaggaggcagagcgcgagagatcccgtccgccccagccgcgtctgggccaggagaaaaggtgggaaactcgggctgcgccgcacccttctccccgctgccgggccaggcctccctcggtccgccgccgccttgcccgccgggcctgttctcgccggggcgggcggcggggccgggaagagaccccgcggtcctggggcgagggtccgggggcagcgtgggggaggggtcccgggcggcgggcggggcctcaggccatgtcccagcggagggcagggggtcgggaggcactgccggggaggggcgggcggcgccgtgccccgggccgcgaggctcggctcccgctcctggtccttgtctgcactccctccaggaagcaggctcgctcgctgtaatgtttggtggtctccggcgccgcctggtggcccccacccaccgtcccgccgccccgccgccccctcccccgcccggcgtctggattccacccccgcggctcggcccaagctgctctacccgtcgctccatcgtctccccaaatccccagcgccccggaccctctttcctcataccctcctttctcacctttcaccctgtccctcggcccgcttttcccctccccgctctgtcctgtcgttttcttaacactcttcacacgcgcacttcctcctcctcctcttctctttttcccacccctacctttgggccctccttccttaacctccgctggccccccattccatgatccgtccacctgacacgctgggtttcatgcctctctttcccaggctgtgggttgtgcccttcactccttgccctcctccattccctgtcctgatctgaactcctctccttgccacgctccctcacccttatccctctgcacactccaaaatttttaaagaaaaaggagagagagaaaaaaaagtaaaagaaacccaaaagggaaaatatagctaaggtgaactggtgagtttctactcagaattcttattattgagtatgatgtattttgttttcttaacttatgtataatgaaaatggacgagaagaattataaatcatagttcatttttatgattagtacataaaaaaaatttgagtctttcttggcatccattactttatcttaaaaacacagagtatttactttttgtgtggcaaaggaggcctaatggggaaccttgaccttcatctcaacttgacagtaaaaaggtgctccttccttccccttttgcttgccatgtgtctgaaaaagactagtagcaagaatatataaagaactttcaaaacttaagagtgaacaaagtcaaattagaaagtgggcaaaagacatgaatatacatttcactgaaaagaatatatgtttggaaaatcagagcatgaaaagacgtcaacatcattagccattagggaatgaaaaattaaaaccccaatgggatttcaatatatacccaatggaatagttacaataaaaaataatgacaacactgagtgctagcaaggctgcaaagaaactacttaactgctgcacggttgatgggaatgtaaaataacaaagccattctctaacaatttgatactttctttaaaaagcaaacaaacagtttaacaggcaatgactttatgactcagtgatttcactcctgatgacatagttggtcatcagaaaaaatgaaaataaaaacctcagtgagatgtcattacatatccaagagaactggtaaaattaaaatggctaaatacctggagaccgatatgggaggatagctcgagcccaggagtccaaggctgcagtgagctatgattgtgccactctactccagcctgtgtgatagagcaagactccatctcttaagaaagaaaattggggactgaatatagcaagtgttgaa

SEQ ID NO: 1884091 - DNA, 4001 bp, Homo sapiens
ggtcttttacaattaagtatcagaagacaactgtgcttttttctcacgtgaaatggttacgaacagaaaacaaatctttctaaaagtgttatccaatgctttgtgaaaaaatgattaattaaaatactgtgtctgaaatgtacagtaaagtagaaataacggtaatgttgtgaaccatggaggggaagttagcatttgagaatgtcagaaagaactggaaagttagtattttactacaagagagggttaggctggaggaacggtgacggggaggtagacttgagaccctgcttgagccatatttggaaaatgcaagggaaaactagtccccagtggagtgtgaagataattagatagcaggcaattagaccaaggtggctctggtgccctgagttcctaagtttaaaaaaatttaactcaaaggcacttctagtaaatttctgccttgcggtaaacaaaattcaggcttaagcaaccacaaacctccaataaacctctgattacataaccaaaactttcccacctgcatcgtacaaataaggcgactacattactgtatccaaccaattattgaattcgatttgcttcctcactgcctctcgtaaaagcgtttccttcgggcgggcgcagtggctcactcctgcaatcccagcactttgggaggccgaggcgggtgggtcacctgaggtcaggagttcgagaccagcctggctaacctggtgaaaccctccattaaaaatacaaaaaaattagccgggcatggtggcgggcgcctgtaatcccagctactcgggaggctgaggcaggagaatcacatgaacccgggaagcggaggttgcagtgagccgagattgcgccattgcactccagcctgggagacagagcgagactctgtctccaaaaaaaaaaaaaccgcatttccttcaagccctcacaatggacaactaaaaacaatagttgggtgctctacgattcttgaatcgctctttgccgaaatttttaaatatttttgcagtgaccccctcactttttttttttttttttttttttttttttttttttttgtgagacggagtctcgctctgtcctccaggctggagtgcagtggcgtgatctaggctcactgcaagctccgcctcccgggttcacgccattctcctgcctcagcccacaccccccccacccggagtagctgaggctgcaggcgcccgccaccacgctcgttttttgtttgtttgtttctttgtattttcagtacagacggggtttcaccatgttagccacgatggtctcgagctcctgacctcgagatccgcccgcctgggcctcccaaagtgctgggattacaggcatgagctaccgcgcccggcccccaccctccccgttacatttttaacaggagaaaagagggaccggggaccccacaaatacacctctttgcatccacaaatcctgctcaccgagtcgagattctcccgtgatgacgctccaatcatccccgcacacgctggggaagacgcgtggctgtgggagccgagtggcacagggagggctccagactggggagccggtgtcgccacacaggcaggggactggagcccggggtcccagcttccagtccagccgacatttgtggccgagctgggccaggagggactcgggtccacaaacctagaagacgactgcagggaggcccagtcacgctaccgccgcttcggcagcggagcctagcctgccccccatctcttgggatgtcgagccggcactcaccatttctctgcttccaggaaatcctggcgtcttagctacgggtctgccagtccctgcaggtcgcacagccacagcagctgggcctgtaggagcagagtacgggggagcagttggggggcagttctctgtgaactgaagactagatctgcagccccagctgcggcaggagacaaatgcccccgccaacacccggaagccgcccttgtcctctccagctgcagcctgattgcccggttttcggccccgtgccccttattggataaagcttcaggccccgtccccagtccgtgagtgacagaagatgtgaccaaacactggactcaatgaggacggagtgacaacctaggctgcagcctttcctggcaggcctttatccctgctctgagcagggcctaccctacagggtatttgcatttaaccttgtgtataaggtcatatccatttataaataatatgttttatgttattcacaagtggaaagagtataatgagaattattttagaattttggatttcatgatcttcctggccctagtcttttgagcaagcagcctgagattacaaggaggaggtattcctctggagtaaaacgtgagccatgtgtgaattttaaattttctagtagccatatttttaaaaagtagaaagaaataggtaaaactgactgtaacaatttatttaacccaatatgttcaaaatattatcattttaatatgtaatcaataagcatgaagaatatatatatatatggtacaaaatatttgaaactcactccatattttacctttctagcactctcagtttagaccagtgagtttccaggcactaagtacccacaaatggcaagcagctgccacataggagtgcagctctgatttcagtggggtgaagggccagtaaaacatcccttttctgtcagaggtgaaaaaacagcctctcctcaccaacttctctcctcagatccaagggtataggagacagtgcccatacagggagaagagggtggaaaaaataaaatgttcacaggtagaccattgctgccaacctgctgcctgcctgccttctttccagaaatcagacagtaaacaaaggatgatagggccacaggagaggggaaccccatgtttttagatctggctcacagacttgacctccaatgtttagatatggagaaaatgaattaatggcaaacgtaatttgctatttggccatggccctaataatcaggctgtggttttctcttttctcctgtagtgtggggatcgtgtaagtataagtaccaatcacatgtgtacatgtctacatgcatttttgcattactcaacattatcttacaagatatccaactttaaataagggacaagaaaatcgatacctatgagatgctcactgttttcaagtaatagtaatcaatctgtttttgaatcctaccaggctgtctacactgggtgcatggattagttagttattgatgcataaaaaccacaaaaaacttagtagctcatgattgacatgctcagccatttaggcttggctcactgagccattcttctggtctgagatgaactccatcaggcatgtatggtaagctgctggttgagtaggcagcttgcttccaggggtaagctgactgtcaacaggggcatctcgcttctcctccccataatatctcagccttcagctgggtaacaggggcttgttctcatggagatggcagcattccaaaacaaaaacagaaggattcaagatcgtttgagcctaggctcaaaactagcacactgtcatgttcacaggtttctattgccctaagcagataagtccagccagatccaaagtttggaaaacagatcctgtcacttgatgctaatagctgtaaaagcaccttgctatgggcataaatacagaagggatgaagaattgctgccatttttgctgtcagtatcaccctgcctttccttgcatattaggtttatagaattcttttacatcaaaaaacttgtccgaagacccacagctactaagtggctggactgggactctggataaactctacctgactccaaagcccatgtgcctccacagactgcaccactcaactagctttcctcgaccttggaaatactgaagtgtgacacttccgtaatagaggtcagactccttttatattcatgctaagtagtactgtttaccactgggaataatcccctcaaaaaactgcagaagtattttag

SEQ ID NO: 1884092 - DNA, 4001 bp, Homo sapiens
agaatcacttgaacttgggaggcggaggttgcggtgagccaagatcgtgccagcctgggcaacaatagcaaaactccgtatcacaaaaaaaaacaaaaaaaaaaaaacaaaaaaaaaaccactaaataattcatttagtatgggagagtgtgaggaagcagaaaattaaaaaaaaaatagaccagcaataatgtcactttttcatgaatttgttagttctttctgggctccacttacagttactttcccattcttccctgcacaccgtcaacacataaggactcaaattaagatgatgtatatgtttacactccaaaattttttttttttttttttgtgagcatggggctgtattttaatacaagaaagacattgctctagaacatggctcgcctttgcttcagggcctagcagtttattttagccataagggtaagggagcaggtcagaaatgacttttagtgtaatcctatctgtaattaaaaatacaaatgctgtcataagatcaaatgttatcaaaaatcagtatttaaaattaaatttacccccaaatttctttcaaaaaagttgtaatgttctttttcagtgaagcctttgcactgctagagctgaagaatgtgatcaatcggcttgttgaataatcccgcacagtaggtattccgctgaagccaactctagctgggggctcgagagcgaaagacacagatggggccctgccgcccctcgaagagtcggatgggcgcgcccgtccccggtgcatcaagaggctggcccggccaggggcgaggggctcgcaccgaaccccgcgcacctcgccgcgggcggggctgggccgtagtcggctcgatttaaggctggtatccaaggctgcggccggtcaggcgaggcgaggcgacgtgagcgagggtgcttagggagaacagccgctggcagctcaatgctgggtggctaacgctcgacggtgcccggcagcaacccggccgacaccccgacccggatcccgagctgcgtcgcggacgatgccgcgggcccgtccgggactacgactcccgacgggctctgcgatcgctccggggcggcccagcgtgcactgcgccggccagtttgacagccgggcgccctactcggctagctctgctcccagcgagggacgctggccttctcgcggctttcccccgatatctctctttattccagctgcctgaaactcggtcccacgaatggcaggcagcgtccaaaattcaaccccgtaaagccagcaccagccaataaagcgcacggatggaggccacgtgacagcagtgggccggccctccggctgagccctgatctctatggtttccgcggctcgctagaaggagtgtggtccaccggaggactccctacattcttcctccattacctcactgcctccggtggctgctgggataccggaggactcgggtcccggctcgactcagtcctccagccgcccggggaatacctctagttcttcccggccgccgccgccgccgccgccccgccgcttcctcctccgcctgccggcctccttcgccccgtcccgtccgcgcagcgcgtccggcccgcccgcaggccagcttctctcgggagcccccacccaggcgcatggctccatgaagcaagaggaggaggcagagcgcgagaggtcccgtccgccccagccgcgtctgggccaggataaaaggtgggaaactcgggctgcgccgcacccttctccccgctgccgggccaggcctccctcggtccgccgccgccttgcccgccgggcctgttctcgccggggcgggcggcggggccgggaagagaccccgcggtcctggggcgagggtccgggggcagcgtgggggaggggtcccgggcggcgggcggggcctcaggccatgtcccagcggagggcagggggtcgggaggcactgccggggaggggcaggcggcgccgtgccccgggccgcgaggctcggctcccgctcctggtccttgtctgcactccctccaggaagcaggctcgctcgctgtaatgtttggtggtctccggcgccgcctggtggcccccacccaccgtcccgccgccccgccgccccctcccccgcccggcgtctggattccacccccgcggctcggcccaagctgctctacctgtcgctccatcgtctccccaactccccagcgccccgggccctctttcctcttaccctcgtttctcacctttcaccctgtccctcggcccgcttttcccctccccgctctgtcctgtcgttttcttaacactcttcacacgcgcacttcctcctcctcctcttctctttttcccacccctacctttgggccctccttccttaacctccgctggccccccattccatgatccgtccacctgacacgctgggtttcatgcctctctttcccaggctgtgggttgtgcccttcactccttgccctcctccattccctgtcctgatctgaactcctctccttgccacgctccctcacccttatccctctgcacactccaaaatttttaaagaaaaaggagagagagaaaaaaaagtaaaagaaaagaaacccaaaagggaaaatatagctaaggtgaactggtgagtttcactcagaattcttattattgagaatgatgtattttgttttcttatgtataatgaaaatggaagagaagaattataaatcatagttcatttttatgattagtacataaaaaaatttgagtctttcttggcatccatcactttatcttaaaaacacagagtatttactttttgtgtggcaaaggaggcctaatggggaaccttgaccttcatctcaacttgacagtaaaaaggtgctccttccttccccttttgcttgccatgtgtctgaaaaagactagtagcaagaatatataaagaactttcaaaacttaagagtgaacaaagtcaaattagaaagtgggcaaaagacatgaatatacatttcactgaaaagaatatatgtttggaaaatcagagcatgaaaagacgtcaacatcattagccattagggaatgaaaaattaaaaccccaatgggatttcaatatatacccaatggaatagttacaataaaaaataatgacaacactgagtgctagcaaggctgcaaagaaactacataactggtgcatggttgatgggaatgtaaaataacaaagccattctctaacaatttgatactttctttaaaaagcaaacaaacagtttaacaggcaatgactttatgactcagtgatttcactcctgggcatttacagcagagtaatttttaaaaaccacgttaattcaaaaactttacacaaatattcagaacagctttatttttaataaccccaaactggaaacaacccagacatttttgaaggtgtgaataagtttaaacaaaatgtattacattcatgcaatgaagcactgcttagcaacaaaaagaaacaagctattgatatagacaacaacttccataaattttcagagaattatgctgagtaaataaatctgaccacaaaagattatatgatgtagaatttcccttgtagaacattactgaagtgacaaaattatgagaatggaggaaagattagtggttatcaagggttaaagatgaggtgaaaaagaggaaaatagatgtggctaggaaagaacaacatgagggattccgtggtaatggaaatattctgtatgttgactatatcaacctccacatattggttatgatattgtactatacttttgcaagatgttaccactgggagaactgagataaggttacaagaaatctctctatattatttcttataactgtaagtaaatctacaattatatcaaaatttaaaggttattttaaaaagagagttcttaataattctttctcccaaccttagaaattagaaaaggaagactaaactgagcacaaagcaagaaaaacgaataaataatacagattagagcagaaatcaatc

SEQ ID NO: 1884093 - DNA, 4001 bp, Homo sapiens; identical to SEQ ID NO: 913818

SEQ ID NO: 1884094 - DNA, 4001 bp, Homo sapiens
gccagccacgcccaggctgcccctcctgcatgggctgctgccgtggccccagctgatatggggccttcatatcagcacttgtcaaaagaggttcaggtagccgggcgcgggggctcatgcctgtcatcccagcactttgggaggccaaggcaggcagatcacttgaggtcaggactttgagaccagcctgtccaacatggcaaaaccccgtttctactaaaaatgcaaaaattagccgggcatggtggcgggcacctgtaattccagttccttgggaggctgaggcaagaggatcgcttgaaaccaggaggtagaggttgcagtgagccgagatcacgccactgcactccagcctgggagacagagcaagattccgtctcaaaaaaaaaaaaaaaaagaaagaaagaaaagaaaaagagttaagggcaatcatggcttcagaaggtgaaaaagccatggcgccggggatgtgggcacagaagcagagagctcaggaaaggaggacgtctccatagtgagagtagagtcctggctgctggggaagggccaggctgaggaggggaaaggaggtgtgacgtttccaccatgggcaggattacaccccacaagtgggaatgcaaggaaactcctggaagggaagtggtggaaatggacaggacacctggagcttggttgggtgctcccagttttccaaagtgagaagaatttctcactatttgccaagaaccaatgtgggttacccaggagccctcaggagcaaaggagctggtttattttttatttattttttttgagacggactcttactctgtcacccagactggagtgcagtggtgtgatctcagctcactgcaacctctgcctcctggggtcaagcaattctcctgcctcaacctcctgaggagctgggattacaggcacccaccaccacgcctggcaaatttttgtatttttattagagatagggttttgccatgttggccaggctggtctcaaactcctgacctcaggtgatctgcccacctcggcctcccaaagttctgggattacacgcgtgagccaccgcgcctggccaaagttgctggtttaactcatcagaggtatttctgattttcagacagcttcacacaaggagagtcagagctggaatcggctgtgacaaaaatcacactggctgcccagcaaaaagacactgtggctacagcattctctgtggcaccaaatatcccaagttatagttctgtgttgggtacattcagccgtcgcaacctcttagctggctttaaaaatactattaaatgtttctattccgaggtaaaaatttaatcaagagtaaaggacaaggagcgaaagaacaggcactcgtgcactgaaaagatgatttttaaaatctggaaacataaacaacttactggtgagctccaatcccagaaggaagcgctttaattctattgtaccggaggtccagccaagtcaggttcggaagcaactgaaagaaatcttgaggaatcacacacagggcattcctttgcagatgcaattgcttccatggaaaagagaatcagagaatgttttgttaaccaactaatttgtaaaacatgatatatccaaaatctatttccaaaagaactactaacaaccagaaccgtatatactaagttaaaaaacaaaaacccaatctcttacccttaaaagatgtaaacagtagacaaaagaatcagaaagaaaagaaccaggactccttccggcggcctttggagccggaactgacttcctgaagagccggcactctgctgctgacccagcacaccactgtttctatcccaaagcctttgacatggtctgaattccggggccccacactcagtgtctcggccgtttctccagtgcctgccgcagcacctggccctcggcagcccccgaaatcgcctgcttactgagcaaatagccagagccatgtctggtctgggggactcagcccaactcaatcattaaaatgaaactaaaagacagggacagagatgtctgccgtggtgttctctacgatcagcagcaaacaaagcctcagcgagcagcatttcagaagcagattgacacatcaactcggtggcgttgtaaagtcgtgacaaataagggaaggtggaagatgaacgtatacacgctgattttagctgtgtaaaatgcatataacattcacacaattttacagtcacagtgtggaaggatcatagctaatttttacaatactgtcattaatgctgctagttgtttatactcacattattatatgtatttatatccatatctgtatttcctgagggagtagaaacagatgttcggaacaatgatctcaaagccagactgcctggatccacatctaggtttcaaaatctattggctgtgtgaccttgagcaagttcctgaacctctctgtgctccagtgtcctcatctgtgagacggggcaatgtgggcaagcactaaagaacagtgcgtggattggctgttgtgattacgttgccttctctatgaaacacacactgcacattgcacagagcaccacatgcctccccattccgccctcaacaccgtgtccctgatccaaatcactgacagattccaactggagaaacactgactggaaaaatcacactcttcagaaaggcactggaaacactatcttatctctgttaggaaattgcccgagtcactgcttgctggcagctggctcggtctccagaaagcatcctggcaatcacaggtcacagtgtgtgcccccacgtatatgggtgtgcaccccccacatacaggcatgtgcatgcctccacgtgctgcctttctcgggcctctgcaggagtggttttacacttcttggtcctgttcttccccccccagggcaagctgattccagtgctcagctttgaaaccatgtcgttctcaatgccagtaaaaggaatctcagaaagataacactcttcttcctccccagcacctctggaaatgcaggcaccacctgtgacttggagctggttatggttgaaggaaataatatatacagtggtccatttccaagacaaagtgccttgaattggcttaggtcagcaaactacagaaaaacaggatgtactaggcccctacttggatagccgatgcctgcttgttggccattccccaccccttagttgccctcacccaaaccaaagaagattagtctaagatgaaagtttactagcccgcaaaatagctcgttttgtccgttcttatcagcctgcccagctacttaggtcataaatcaaatacttgaagagcccctgagctgactgggattgcaatgcattgtgggccacgacaaaataaagcaggacaaccctaaagaaaatacctacagcccctgcccaacaaccaatagggaacgtccaggaagactgcgaccctatagtactctgcctatgaggaaccaggggaggaacctgcaccgtacagcccctacccaacaaccaatagacgacatccaggaagactgtgaccccccccatagtactcagcctatgaggatctgggggagggacctgcgccctacagcccctacccaacaaccaatagacgacatccaggaagactgtgacccccccccatagtactcagcctctgaggatctgggggaggaacctgtgccctacagcccctacccaacaaccaataggcgaagtccaggaagactgtgacccccatagtactcagcctatgaggatctgggggaggaacctgtgccctacagcccctacccaacaaccaataggcgaagtctgggaagactgtaacccccatagtactcagcctatgaggaactggggcaggacctgcgcaccaggggataaatggcttgttgtaaccctgctgggtgtgcctgcccatcagacacccaatcttgcaagaccgtcattaaaaagtctttcttccactgttctctgagtccattctttgggtttggatgggtaagttt

SEQ ID NO: 1884095 - DNA, 4001 bp, Homo sapiens
ctggaggctgagctggggtctcctgctgggctggagaagattcaacctccccagaaggctgagctggctgctcctgctcactgggggaaagttcaggctctacaggaggacctggaggctcagttggggcctcctcttggtttgcaggaggttccatctcttctggaggctgagctggggtctcctgccgagtctgagaagattcaacctccccagaagactcagaaggctgagctggctgctcctgctcactaatggaaagttcacgctccgtaggatgacatggaggctcggttggggcctactgttgggttgcagaaggttccacctcctctggaaactgaactggagcctcctgctgggcttgggaagattctttctcattggtaggctccgaagttatggtaacctccacatctgcaggtttaactgtaatgttgggcaagttataatgagcttgatcctcacctggaggttgaactgtcacctcatgatttggtagagtttgagctagactctccatagaggactctggaggcagagctggggcctcctgctgggttgaagaaggaggtgtggaagctgctctggggcttcttcctggagtgaagaggactggatatcttcaagggtctctggattttgagtttcaggctctagatggaattgagaaagtccaacttactcaggggaccctggaggctcatctgagttcacccggagttctggaggcaggctgccaggatactgtgtatccatactcgaatattcatcctgcaaagtctgtttctaacgctgtggtttggataattgctgtggaattccaacaatatcagcaatgctccaatgctgagctagatctttcttcaggttcctgggtgaaacaaacaataaataaatttggttggttttgaaaccttactgtctagtggaacaagtatttcatctgcctgatgacctgcagccccatctagatctgcagtttgaaccttacttttgaggcgaggaggctgaactagggtctggttctgatccctgtccagcattggaaccacctctgggagcctttcttgcagagtcagcttgtcattgaaatcctggtgtgcaactgagaactgccctggccctaggggcagctctccagctgaatccgtgtccaggaatggaaccaaattttcagttgattcctggggtggggctgacatctgcgaggaagcagagggccccaggtaatcaaagtcccccggatctgctggggcaataggggcatggggagattcccatgggagatgggaggagcggaagaccagggctcaggcggcccccgggggttagaggtcagctggagcagatccttgacccactccagaggctgagcctccttgactagtagccacaatagttgccacgtgagcaggggccataggccccagaaacacagccgggacatgacacatgctggcaccgcgcagtgagcgagagccattctggcagccccgaaacgctcgtgtcccttataagcgtgcgccctgccctgtctttatgacacctttatttaatgccacctttattaggctcgggtctaaatctgctccatgtcaccatggcaatcttatgtcacaatcctgtccaagcaccccttcccatcccgcccccccggaaccccctcccctccccttagcgaggaaggatttgggtcgcagacctgggtggtcccaggactccagggcctgcagtggtggggtagggtggggtgggggcactgcagagcttcccaaggaagtcaggcgacctcgcctccggatattcagaagtgctagtccacttctggcagcctgaactcttcctcctttttttgaaatccgagaatactcttccttccagggagagaaactgacctgtaatcccagctactcaggaggctgaagcaggagaatcgcttgaacctgggagtcagaggctgcagtgaagcgagatcgcaacattgcattccagcctgaagtgctgctgtaggtactatggctcctgaagttgctttccctgcagtaactggagtcctcctcgtcgtcttccagctcctccgggtaagggtaatcgaagtcatcgtcgtcctcctccatctcatcctcctagttgtcctcagactcctgggtctcctcagcgtcgccgtactcctcctcctcgctcttgaggtcatcgtataccactttgttaacggccgagggcctcggtggtgcacgccaggtggctgccccagccccgccgcccccgccgccgccgccaggggcgctggtgtgtgtggtgtggtgtgcgtgtgtgggggcggaaggcagcggcagcttccgccaactactgctgcccaccctggccgagctcagccgcgtcttgggcgccacctcatcctggcggcggcccacctgccccggctgctactgcgttgccgctagctgagcccccgatgggttcggacgtgtgcggcggcggcggctgagaccgggggagaagggaaagcggacgaggagcggcgggcgcagtggaggcagtggggagcgccggggcctgacgaggaggcccgaggggccgggcgcctgggcggtagagacccggcctgccgaagcgggtggagggagaaggctcaatccgaatcgctggggccccactctggatcaccttcagccgccatcttgtttcttcccgttcaatatactaatgattcttaaatccatgtagatttcaagaaaaaaaaatcaatatatatatagtcttaattccagccgcgcatggtggctcacgcctgtaatcccagtactttgggaggccgaggcgggtggatcacgaggtcaagagatcaagaccatccttgccaacatggtgaaaccccgtctctattaaaaatacaaaaattagtcgggtatggtggtgggcgcctgcagtcccagctactcgggaggctgaggcagaaggatcacttgaacccgggaggcggaggttgcagttgagccactgtactccagcctggcgacagagctatactctgtctcaaaaaaaaaaaaaaaaaagccgcagttggactcatggagccctggggaaatcttctcaagatgcaaaggaggtactatgccaaaagagacattctgaaagcaggaggcatcatcttttatacatattcaatcacagatctttatatagtagttcttcataggaagaatctacaggaaactgagaggtagaaacaggagtgtccccagttacaaatgctcccaataatcttctaaggttttcctgtgcttctcatcactgcagctctgggatctggaaggcaggcaagtcctgttctctaaaggttatgggttgggtgctttagattctttgggtccagtaaccaaaagacaagaaatacatcaccactggggcaggattcatatactctgatcagcaggaggaggcggggctgcttttccacaaaagaagcagagataatctctctctctctcacacacacacacactccccacccccatagtctctctttcacacatgcacacacacacatacacacacacactctctccacaccctctctgtctcttttttgttattaatttcctgttggagtgcagtggcaggatttcggctcactgcaacctccgcctcccgggttcaagcgattctactgcctcagcttcccgagtagctgggactacaggcacaggccaccacacccggctaatttttgtattttcagtagagacggggtttcaccatgttggccaggatggtctcaatctcttgagctcgtgatctgccagcctcggcctcccaaagtgctgcgattacaggcataagccgctgcgcccagcctatcttccttaattctattgtgtgttgagaagtttattaactttcccaaatagtcgattatttatttataggttagatttatcttcttatagtaatttcacttggaggataaattttatttctttttattacacttttaa

SEQ ID NO: 1884096 - DNA, 4001 bp, Homo sapiens
tttataagggatctatgtaagtctactgtggttataaatttaagaaaatcacttgtacacctgtgaagcactaaagcatgcatggtgaagaatggtaggaaaagaaatactttttctagtgaaatgattagtgcacaatagtgatcgacttctacaatgaaccaaaatacaaactaatgttgattctttgctttaaggggaaaaaaggttattttttacactcccccttttgtctctgtccttcatcacttgtttttagagacaaattctctggagtgtttataaaacagcagtcctgggaaaccctgatttagtgggtttttagaccttggggctctggggtaccttttcacaccccaaatggcacactgggaaggctagatatcagagatcaatctacatccttgtgagagtgggcctgtatcttttctgtattcaccagtaatgactttaaaattcatgcaaatcagaagtgcacatttggaaaaaaacttccaggatattacatcagagtaactgtcaacctctttaaaggaaaattttgattatactgagctgctttacctgcctattaccttccttcaaattaattattcctcagatttaactgtatggtattaatacttttaatacttttgtatcaagaaaaggaagtaatctgtactcatagccatcaacaagtataactgtgcttttaggagtactgtgtttgccgaggtcatggtatagttcagtataaagtgttttaatgtgactttttgcacagcacgtgaatggactttgaaatagcattgcatgtctgagaattctgtctctttaaattgtctgctttgcttattggaaatgataacaatgattgtttgaagttattattaatttttttagttttaacaaatcctaataaaggaaaacatatctattaaaaactgaaataactactcactgaaataaacagcaaacattatagatatacaactttaattttgaatggtagagaattttattaaatgaagagaggcaacttaatagagtattaaggacagacaccagatgcatttgacagatctgaatttgagtcaggttcttacacccattagcatttttgactttagtcttttcacctaacttctctgagccttaatttctccatgtagaaaatgaaagatgatgtctttcctatctcgtttaggattgctgtaatataataatatgtataacagtattgcttaaagaatattacctagtggccattgcagtgcataagaactggtaagatgccttacctggaaaatataagggaaaagtgttggtttttttaaaatcatgaaaagataagattgaaaatggcgtgtctttgctgctaattaatgattgctttatgttcatggagctgtaacatttttcccacctgcagaacatattatagtaagctctagttatattttctaggatcgcttttaataaaactttaacaaacactcgtgaattccaacaaaaatcttgatcattttacagaagtgtatatccaaaaccaccgtgaagctggaaatacatcaaagacgtgattacatttgtccaagttaagaggacaaccaatgagggcacaatggacagggttctttaggtatgttgggtataaattgtgataatttttatcttcgtagggttcctgaagacaagcaagtaggttttatgttttctaagatgaaaaagaacaatgatgctttttgaaataaagctttggagaaagtctgcagaataacaaaggttttcatcattctaaaatcataaaggcaaatatttataatttcctcacaattgtgagctataacaatttatattatatcaaataatttttaaatgaaaaatcaacctaaagggaaaaggggagaagatactatagagaggactgacctgtaggtgggcatctaggagatctggcaccgaggtggtggcatttctattttctctgggtttcagttctctacccatgaaatgaatgggttggactagatgatccctttcagctctgaaattccgtgaccttgtgacattcttcatactctgtgacataggaagtgcatcacacactgtagggttttccccttctgtcagtacagtgcactgcacagtggataagaatgtagactccagagccagagagagttgtgtttgacttgtatctacggagcttgtgatttttggcaagttaccataatttctttaagtttctgtttcctcatatattaaacctaaagataatgcctatagagttcttgaaatgacagaggaggtaatgttggtcaaaaccatggatgggtactcctggggctccatagtgggtttcaagggcaggtgtttatgaagccaggttctggggcctgatgatctgggactgaattccacctctgccacatgcaacctgtaggtccttgggcaaattacttcctcaagttctgcttccattttctcttctgtatgtatggttgatgataatacctacctcctagggttattatgaggattaaattagttcatacatataaagtgcttagaaaagtacctggtacatgtaagcactctatatatttgctatcgtcatcattatcatcatcattattaaagttacacatagcctagggtgaaattctactaaaaattttagggaaaaaatactcatttatattatcaccaacatgtacatgttatggaatagaatgaaagtttccataaatattgacagtaaagttttaagtttaactccagaaagacaatgcagcactgtaaagcactttctggcttcctaattgcactctatgggtaaatttctgttttttcactagcaattgtgtattctactgaatttgtaaccttctgaatagtttattattaaaaacagaacaggctagcttttttttttttttttttgagacagacttttgctctgccccaggctggagtgcagtggcatgatcttggctcactgcaacctccgtctgctgggttcaagcaattctcctgcctcagcctcccgagtagctgggactacagtcacataccaccacacccggctaatttatttatttattttttgtatttttagtagagacggggtttcaccgtgttagccaggatggtcttgaccccttgacttcgtgatccgtctgccttggcctcccaaagtgctgggattacaggcgtgagccaccgcgcctggcctatattgacatagttgacaaataatcttaatttcagtttaataatatgagattttatagatttatattgtagattctctattatattatagttgtctaagattcatggtaaatgtgtttttgaaaatgtcaattcaattgttaggtttagaagaaataatgttaaccataaaggagtataatttgacaaatatttaattagtatctacaaatatgtcaaactctgctgagaactgggcatacaaatatggatatgctcaaatcctttctgtggaggagttcagcatttggggtatggcaaacattgttggttggctgagtcgaaagctcttgctaacactcttctttcttgcatggctatacaaaagcattggaaaattcctagcagctactgatatgtgagcagaaacttgctggaagtgatagtggtggtggcggtggtaaagatgcttctgttttcttattaaaagaggatgattgtagctagtgctccccccactcttcttcttgccttgagcacagatctaatacctacaggatagcagccatctggggactatgaggtgataagccaaaaataattggagagatattaggcatcattaagtcagcaatccaacattaggtgacactacttcctgactttttattttcaaaggtaaatgataaacccttttatattttaaaacatattttaaaacaattttaaaacattgttggattttctgttactgtatccaaagattattctaactaatgtgggaaggaggtatatttgcctac

SEQ ID NO: 1884097 - DNA, 4001 bp, Homo sapiens
ccgcggccgttaagggttttgatccgttacccaacggctgtcgaaagaggagcacgacgtgaacttccaccgacaatcgtttaaatactgcaggcgaaggacgggttcttattgtgagcacctactgagctctgtttaatatttgggagagggcgagggtaattttttgttgtttggggggttttttgttttttatttttatttttcgtttttttttctgtaccaaaaagtgactctaatttctaattgtgaatcgtgtcctcctccgtctttgctttcaggttccttcaggcaaaccggcagctgagtccagcttgtgaacttgaacttgaacttgctgaagaagctcccggcggccctctgctggccgccgcctttgccagagggagaggctggagtcaccctgttggaacccatttctggggctggcacctgttgggctgcccggccgcgcgtacctggtcccatcgggggctctgcccactccgctgatgacgcgggtagaagggaggccgcagggacactctggggggactgtgccgggcgggcaccccccagctgctcactgtggggtgcggcaccgaggcctggttgggctgcaaggagaccgactgggattcccgggctggtggccggggagacggggtagaggtgagaagcaagagctcaggaggcctcaggccccagcgctgtggggctgccgttgtcgttctgggtggaggtctggccaaaccggcttttgccccgagtgaggaattcctgctcattttggtgttagtggagaggtcgctgttcacagcgggggtggggttcgtcccctccaggctagtagggagctggctggtgcattgctgtgttgctgcccttctgccctgtctcctgatcctgttcagactctgggtggctcctttgagtcttctcaggccgtgaaagatgggaaaggcaggttgttgaaaccactgctgctccgggctggcagagaccctgagctgtacctcctgggatgaaaggagaacccaggagcaggcaggtgaccactgcttcctcatactcctcagcaagtcctggatctcttcctgtctgtaacccacggataccatgaacttagtttgcagggggtcctcccagtgggagagtggctgcacacagcgcttaagttcctcaccttcatgactcgcattcatccatggacccctcacagtgtgctctgaagggcctctcttcctgcaattgacaatgagaaatttcttcagcaagttttcactctccggggacatgggggagggaatggaatacatcctgctcagtacctgctcctatagctccttgaagttctgtccatcgaaaaataaggatccatttaccagtatatagaggataactcgcagacgccatacatccaccagctcatatttgtggccctagaagaattccagggcagcctaaggggactgccacaaaaggtatccagcttgttgcgaaaggcgaatttattcctgaacccaatctgtgatgttcatgttaacatggacaatacatttctggtgacaatacacaatatctgtggacaatgcacttctggtaacagcttgcatagcagacacttttggtggaatttgcttcaggcctctttcctgctgctgtgagcaggtattcacaaacttctcgctagcgtgctttgtgatgaggcagagattcctcactatcgatcacagcaaatacttcactatgttggggtgatctgagccttcatgattcctactttgtggatggtgtctggaggctggaggagatctgctgagtctcatcaatgaacttcacggcggctgctttcccagtcaggatgtcccaggccaaccccaccttagccaggttgtccttgacgatggtctcaaggatcctcgctgccaataaggatccctcctcagcagagatggctgagaggccctgcggcgtgtgggacttactactgggcttggagtcaaggtgtcccaggtcggcttaattttgggaaaagctggtgagaagcttggtccaaatcacctgaaaagaaaatcacttgcatagtttacctgaagaacggatttctataatggaatcaaaacacaatactggacaaaaatcaaataagcaaaagcaacaaactgaaaaggaaatgctgagtaaaaaagaacttaaaaattagaaaaataagagaaaaaagaacaagaagaaccagtaacctcagccaagccagggacttacatacgtgcttggaattccaaagcagcagttccttatgaggaagaactaagcctagtaacaaggctgaggataatctatgtggctttctcatgctttggtctcaagaactctttactcttaaagaaaatatattgaggaccacaaagaggattttttattgatatgggttacagttatgaatatttaccttattagaaattaaaacctctaggatgcttcaatggccttttctagtttgaaaagataacaggctgggtgtggtggctcacgcctgtaattccagcactttgggaggccgaggtgggcaaatcacctgagctcgggagttcgagaaaaggtataaaaatgtttggcttttaaagagcccacaatatctacacttaaaatatttcatttttttctttaaactctaaatgattggtttcaaaatgatgccacaacttagctggcattatgatagtgtataagtatgttctgttgtgtacgacacaatgagcttcattattaccatctgcgacactgaggggaagatagctttcatcatattttctcatttaaagttttgcccagtttcatttgcatagattccctttttccatgagctgctatgtcagtctcagcatctttcaatgtagagtttgcagctatgagttgagaaagcacattttctactctttttaagtgaataatccactgtgcctggtgtacctctccttcagcataggatagggacatccaggtactggacccgtcactggcacctcagtggggagaacccagatgcccctacatgatgtttaaagatgctttatatacataaaagtgcacaaatcatcagcccacagcttggtgactgttcacatattgaactcatctatttatctagtatccaggtcaagaaacagccattacagccccccaagatcccacaccccttttccagtcactttctctgcagtgataaccactcttctgtattttgacagcatagattcattttgcttatttttgaactttacatacatggattcatacagtattggatcctttgtgtctgcttcctttgcttaatttgtttttgtttgtttgtttgtttgtttgtttttcttgagacagagtcttgctcttgttgcccaggctggagtgcaatggcacgatctcagatcactgcaacctccacctcctgggttcaagcaattctcctgcctcagcctcccaagtagctgggattataggagcttgccaccatgcctggctaatttttgtatttttagttgagacggggtttcaccatgttggccaggctggtctcgaactccttacctcatgttccgcctgcctcagcctcccaaagtgctggaattacaggcatgaacaaccacgcctggtcctttgctcaatatttttgtgagatccatccatattgtttattattctaaatgctcattgtgtgactgtaacacaatttgttaatttgtttattcattttactgttactgggcagttgagtagttctcagttttcagatgctatagtgctgccataaacattcttgttcaggtttttgggggacatatatatggctttctgttggatatatataaatatattaagggtgtggctgaacaaccatttgacagtttatgctaacaaggtgactcgtggtaggccccttaggccaggtgatatcagcctgacctccagagagtggggtgggggctggagactgagttcaaccacatggacaataagtctat

SEQ ID NO: 1884098 - DNA, 4001 bp, Homo sapiens
tcaacaaccacaactgaggttgctgagaggattgaatgaaaccatcttatgggaaaatgccacccagcacaggccctggtgtaggacgagcgctcatgaattagttcccctcccacctcctccaaatctagagtgcgctgaagaaaagagtgagagccaagaacacattatgggcagagagaaagctcacgcttcttcgtgtggtccagttctgatctcaggctctatagctttctctctaagttggccagcttagcctcagcaactgcaacgcaatagggagaaggtatttatggagaagaccttaatttggagagcggagcattttgaaaaaagcttactaagaagaatgcttattccaggaaaataagaatgcagaagaaataaaaaggggaaaatgactacattcctccttcccagctatacctccacatcccttcacaacctggaacttcagtcctggacccccgtctccacatatggcttgcatattgtcatattgtaagaattcataagaaaatactcaactcattaccctcctttttgaaaatttttcttgtaattctttctcatttctcattccagatacacttttaaatacctttattgttttgacaggctggtagacaaatatgaataagtggattgtcattattgttttgttcttactgaattttgctctattttactctgaactaagttggctgtgatgttccccatcagccaggggtcctaagaggcagaacattttcgtgccactcttgtgacaatggacgtaaacccaaccccctaaagggccttatttcttccctggcaccccggaggtgcacactgaactgtttccactgaagagaagccagggcccatctgctaaggggcctgatgagggaatggccctacatggcttgaacgtctgcacctgggcacctatgggagtctcctcaggccccaagtaaagttgagagggccaggcgcactgggcctggatgcagagttgggcatcttcccatgaggcagcaggagaagaaggaaaaggggacctcccagctggtccttcagctccccaggcccgggacccccaggccacacatgctgacgtgtgccccttacctgaattgtccccacgatctcctttttggcccctaggtcctggaattccagaagtccctgtgtttcctgggggccccatcttcccaggagggccctgcaaacctctgagcccttgacctgttgcaagacaaagggaagatgacccagtggctgtcactcttttttttttccccaaaagctcaatgctccattcctgttcacccccggcacagccaatgagccagtgatctgacccaaagaagaaagactctcctgcaacctagtggagggcctgcaccaaggccagctccccaaccaggcaggacacccctctgaagggacaaccacacacccccagttcctgtgtggaaatatgggatcccagagagtccacgaacagctttgttttggaggcaatggcattttacaggggttgttctgagtgtagcatgggtcctgatgaaaggggagcctccccaagtctgtgctttaaccctcgtgtggcaggctcaagcacagatttgcttgaacacctgccggaggtggagatttaggaagccacagaaacctgtcccagacctggctctcccttttcccccttgggtctatctcgcccatctctgcctggggtgccattggtgacggggatgccacaggtaatcatggagcaggtcttctgggtatctgcacaggcttttgttttggagcaggaagctgtcaccacagacaggagaaggacagggaatgatggaaacaggaacatggtccttaccttgaggtgaagaaagtgaaggaagggaatttcatcccatctcatttaaatagcatttgctacccactgtggtgtgctggaccctgtgctggggacagtggacacagaggggaccatcacaacccctggctctgaatgactttcaggctactagggagactggtgggtaaaaaatgtgagagttagatcagtgctaaaacaaaggcaggtgcaagatgaacgcgagcccattctccctgaggtcccagagctcctgttagcacaagtcttagcagttaggcacgtcctacttgacagcccacagggcttgaggattatccatgagccctgggtacagtggtccagacaaaggtgaagagaactcattgcctgtgtgagctttggcccctggattgctcggatttctttctaaagtgccaaaggagccatggtttccttcttcttcctttcctatggaaggaaagagctggacttagactggagcaggagacctgaggtcccacaagttccatctcttggctggacttgggcatgtaactcagttccccgagggtcactatactgtctttgtttcaaaggtcccaaggcaaactttttaataattgtggtcccactcaatagtcaagttcacttactttatgggtacatttgtggcatattttaaaatgtgaagttgagtgcatttcacttgaaaaccaaaggcatgtaatgacaacatgttatagaggaaaaattattgatttgtgtaaataggcagatcttgtttgtattctagctccatcacttactagttttgtgatatgggcaatttatatcctatctgagcctgtgtttcctctacaatatgagataatttctactttgaagtactgttatgagggttaaatataaattactttctggtttatgattttggtgtatactatttccatgcgtgatagttatttttatgaataagattttaacagtaagccatagaaaaatacaatgtaagactgattcttagaatctatcaaaacaggtagtaaaaatgacttaaagaaacatctagcatggcagtgactaacattttgaaaagcttaatttttccattgagaactacagcccaacacagtgtctgtgcttcagtgttcctcttgtcaggaaggataatatctgtgatgcatgaactaactctaatgaaaatttttattcttaaaacacaacatatttcccagcgcagtacataaggtctttgtgctcacgtcagcattggagattaatttctgggaaagaagtagagaaactgctcatttctatagacatcaaaacaccaaagtaaaagtgaaaataaaggtacactgcagacttttttttaaatgcctaaactgaaaagtatacctatcaggaaacatccaactcatgaattactttaaatatgtttttaaaacagtgtgcttgttttataaccacagattcatgctattaacctgatattccccagtggttgctttgtggggctcagtgccatccttggagcaataaaaagcatttcttctgcaccagtaaaaaactgactacttctcacataaaccttggagggcttccctcagtgggcttagtgatcagcaaatcatgtcaaataaccctttttgttatttttgacataataatgtttctagcagacagtactctagaattcccagattcttagctttaaattcaatatactctcttgtattaaaagtcaagctatttattcacagtagttcttaggtccatgttacattttacacatatatgtggatgtaatagctttttccttagaactttttaaaaaatagaattcagtaaaagtcctatatttgtattttctatgtgtcaagaacagataaccatcattaatgtgagccaaatatgaactgaggagctgaaattaggaggaactgaaaaacacctgaaataaatcttcaagtaatgaaggggaaagtttactttagaattagtgtgtcaaaaatgggaaaattggctgggtgcagtggctcacgcctgtaatcccagctctttgggaggctgaggcatgcagatcacctgaggtcaggagttcaagacctgcctggccaacatggtgaaaccctgtctctactaaaaatacaaaaat

SEQ ID NO: 1884099 - DNA, 4001 bp, Homo sapiens; identical to SEQ ID NO: 913841

SEQ ID NO: 1884100 - DNA, 4001 bp, Homo sapiens
attaaaatatatagggtagattgatataatatctgggatttgttttctagtattttagcaaaaaagagggaagaaggagagaggaccagagggaggaggaagaagaaaatatagagaaagcatgtgttgtgaagccttaatgattgcagaatctgcactgatggattaatggaggttctttatactgttctctctcctttacatatgtttatgaattttcttaataaaaagctgataaagcaagatatagaatagtatatggagggtgaattgtatagcatataattatatttcaataaagctattattttgtaaaaagaatgctatatagagtttgctacctttggaaagataaatgtatcctacattacatacaatataaacaaagatatattgtaatacgtacaataaaaacaaacaaaaaaaccctaaaaaaaatggcagcctctactgaggttaacactgagagacagaagtggaaatggtgactcacttccttgtgtatccttctaatgtcttagaagtctgtattatgtgtttgtattatctatccaaaaatttgaatcagaaaatttataactgatggggaagcatttcacagcatctcaagaatcacagcaaaaatgttttagatttggtaaacgtggtgtccctcaatgaaatggctgcaatcaaaggttctcaaatcagtgactccagagagcaaagcaaggactgagggacttggtggctgctctcatgggaaatgcaacactgccagtcactggtgcggccactgggagtctgcactgactggacaccctctggtagagccttggccccaaggcgactggtgattcccttcactcattcagccccacagaaacatataaaatagttgctcaaaccagtgtataacatggctacattttcaaattggcactcgctctactccaccaatcaacaatattgaaattgaaatcaaaagtgaaaagtaaagtcagttgctctctcccaaagggattctgatgcctgtgaaaagacctgctgacctgctggctcactccagcaaaaagcacaagaagccagctctgcggaaagtaggggaaagggcatctattgctctgtggggcaagggttgttaccagctgacctttgagagcccatgagtacagccaactacacacatattggtcttggggcttgtttcattacttggaaaaattccctttaaaggttaatgtcaagaaataaactctgttacattgagtcccatgactcaagtggactttgaaaaaacatctctggaatgctcttttctctgagtatcagcctcccatttaaactccgtctgaactgagggcttccaaaaaggtatatcgctgatctgcaggccagtaacatactctgttcagtgttatgcaaggagagtatgttttttgtcaacccagaactcaaaggcagggctaacacccatgtatcataaagactgcctcatacactaacattcaactattcaactgagagggggctcaaggggctttctgagtacctataatgttctatttcttgatctgggtgatggctatacagggttgcttgtgtgtgtaaattaaactgtaagcttataatttgagccttcttctgtatgtatgtcacctctattaaaagctgtatttataaaaactccattacagatctactgtggttctttaatactctcctatgacctgttccatgcctcaactcctctttcctgtctttctaatatacctcagtgtgaagagttctactttatacaccttgtatttcagaaaaggttcaattttttccaaacgaatcttgcaatgcttcaaaacatgttaatacaactttgtatgtcaccagctccacccctttttgtgcctgggactctggctggccttggctgtagcaagctctctgtgctttgatagccctgtacaatgctgcttgaactccatgccacaaggcaacactgtaaagaagctgaaagcagagagaatatcgaatattgcaagtcgagcattttacctgcagttatgtgcaaggatgctcagaccttttcctcacatttcagtggacacatggcaataatgatggttagagagactatgacatgggttgtaattgtatcctgtttccacaggtgaatggtttatcattcattatcatccagtgccttcttaaaaataaagcatatattcctccccctcccccaacacacacccctcctgttctgtaaagtgtgactagagtaaagggaagctttcctaaggatatgtagttgtgtaagagtcaacaggtgttgcactgccaagatgatgtatatgaatgacacacagctttcaccgggttgagtaaggccttacctcattcaacgcgcacatccgagcaatggagccaatgttgttggtgatggtgaccaatgtggcccgggcgaggtcttccttgctgatggaatctcgcttttctttactcatcatgttgccaaagctatgttggaaatatcagcgagagtgttcaaaatcgtcctcaggcagggcccatccttccaccaaagtattgtggaaggctctacgagtaactgttcaaactcaagtgatccaattttgctactatggtttataagcagacagaattatagtatgcatggctgaccgcccttttcttaatagggacaaagtagcatgtccattaatggggggggaaaattaatgcctctagatatctggacaagaatggaacaggtgaaactattgcagttttctagaaccttctttcaaagttgccttattttaagaacaagcatcaagagctaaacatctcagtgcttcatcaagggcaggagatcaagtctgagctctgatacaacaggtatctgcaccaggctggtggactgacattttaaaacaacttagtgaatggccagggtggagaggctgccttgtgtttaatcactactgctcctagctacttaatctctaccttgatgctacagcagatccttgaaggccaaatcgttcatagtctcctccgtaaatgtccttcaccagtttatcaacattggtgctgtcgcctttagctgccatttccagagcttcttcaaaggtctcacaaccagtcagcaagcaacataggcctaggaatgttccacctccaagactgaaggaataataaggtttatttttaaattttactttaagatatgcccatccaagtccccaactacgtcaagactattaatatgggtgaataaaagcagacgaacaaaggggcacttgaattaaagtgctagggtgcaacagagctttagggtagactggatatgaaaagagggcagagactaaaaataaacatcaaggaaaatttgcccctaaatttgagaacaaaaccaaagaaagactctcactgatttctgttgtgagaccttcaactagccactaacctgagtgctttgttcagccttcccacctatgaaatggggccaaatcatgatctcttctatttgggtggtctgaaagcagcaaataaccaagaaataactcctattaaaaaaccatatgcagctgaatataaatacctagaaaaagaatttgtgtgtacataaagcatagttcaaagctatgaagccaaaccctctgatgacaaaactgacccaggattgtgccaggagtggcctgtcttaaaagctgtgttttacctgaccttgcttctctagcagagataatctcatttagcctccttgaatatttctagaaaggaaccactgatctgatactgaattttttcctagtagactctccagaaggtttttagtatattacttaccactccatagtaaaaaacagtaacaaaggtcataaagtggttccaatggttgaactacatttaaaaagctttgacttgtttagagggaaagttcctctaaaacagcctagacaaaattagaaagtaattacagtagccaagaatgaactcaattgtgtattaatatcaaagtt

SEQ ID NO: 1884101 - DNA, 4001 bp, Homo sapiens
ataaattaattaattaaattaaataaataaaagcttacacacacataatcttaactcacgtattccaagaacaccctatacatgaatattaataccatagagtataataatagattgagtacatacctctttatcgtcttcagatttcctatcatcatcctcatcctcttctttttcagatttctctaactccttctgttcttctttttgttcctctactttaagctgttttgtcaatcgggctattaactgggattttaatcctttggaactaagagctcgactttctaattcttttcggaggtcatttacctgaatatatggagcagaaaaacacggaaaaaaaaaaggtggcggggggcggggggcagcggatattgaaataggaaacaaactagctacaattaacaattatattttgtgtgttttttttttttttgttttttgttttttttgaaacagagccaaactctgtcgcccaggctggagtgcagtggcgtgatctcggcttaccacaagctctgcctcccaggttcaagcaattctcctgtctcagccccccaagtagctgggattacagatgcgcacaatcacatccaactaatttttgtacttgtagagacggggtttcaccatgttggtcaggctggtctcgaactccagacctcgtgatcagcctgccttggcctcccaaagtgctgggattacaggcgtgagccaccacgcccagcctttcgtgtgactttttaaaaatgtggtgaaaagaacatttgtacagctcacaaaacacttgtgaaaatgcaaaatgatagaatatttttagaaaataaaacattttaacatgcataaaaatttttttaaatgttctttgacccagaagttctaatttctggctgtctaccctaaggaaacatcctaaatagaagggggaaaaaaccccacaaaactatagatttacttatttcctccctccaaaaaagggaagagtctaaatgtctcataaattagccaggtgtggtggtgaatgcctgtagtcctaaccacttgggaggctgagatgggaagactgcttgagcccaggagtttaaggttccagtgaactatgcactgcactccagccgcggcgacagagaccttgtctctaaaagttaagtaaataaacaaatgtccaacagaggagtaacaccagcagggaatggtggctcgtgcctgtaatcctagcacctttggagtccaaggtggaaggatcgcttgaggccaggagtttaaaatcagcatggggaacatagcaaaaccccatctctttagaaaaaaaaattagccaggcatggtggaacatgtctttagcccaagctacttgagaggcttaggtcagaggaccacttgagcctaggagtttgaagctacagtgaactctcatcacaccactgcactctgtccctttaaaaataataataataccacctaagaaatatctgtatatcaatttaattgaatagtataaaatatttaaaaataattacatggataaaattaatgttaacgcaacaggatgagtcatttttcttttttttttgaggcagggtcttgctctgtcacccaggctggagtggcacaaccatggctcatggctcacagctcacggctcaccgcggcagcattgaccttccaagttcaagtgatcctcccacctcaggctcctgagtagctaggactataggcatgcatcaccatgctcagctaatttttttttttttggtagagagtctcagtatgttgccagggctgatcttgaactactgggctatagcaatctgcccatctgggcctccaaaagtgctaggattacacgcataaagcattgtgcccagctgcaaccttacacacacatatgtatttatttttagacaggatttcattttgttgcctaggctggagtacagtggcacaatgatagttcactgcaggctccagcttccaggctcaagcaatcctcccacctcagcttcccaagtagctgggactacaggcgtgtgccactatgcccaaataattttttaaactttttgtagagacagggcctcactatgttgcagaagctgatctcaaactcctagactgaagtaatcctcctgcttcagcctccagaagtgctgggatcacaggcatgagctaccttgcctggcttattactttatggttgttggttgttgttttttctattcagtatccttgggttgaagtgatcgtaacttttatatacaataagcaatcagccaatcacaaaacttgtacccagaaaaatacaaatggaataaaacacctaacaatgttatgaatgacagcgggccaggggaggaggatcacatctgtaatcccagcactttgggaggctgaggtgggtggatcaattgaggtcaggagttcagaccagcctggccaatatggtgaaaccccatctctactaaacatacaaaaattagtcaggcatggtggcacaggcctgtagtcccagctactcgggaggctgaggcacgagaatctcttgaacccgggaggcataggttaagatcgtgccactgcactccagtctgggcaacaaagcaagactctgtctcaaaaaaaaaaatatatatatacacgtgtgtatatatacatatatatatatatacacgtgtgtatatatacatatatatatatatacacacacgtatatatatgtgtgtgtacatatatacaaacgtgtgtacatatatatatgtatacactgtatacacacacacacacacacacacacacacacacacacacacactgcccaggatggtctcaaactcctggactcaagcgatctgcccatctatgcctctcaaagtgctgcgactacaggagtgagccaccgcttctggcctcttcccagtttagatgtgtatcaatctatgttttaattttaaatatattttaggctgggcgcagtagctcacgcctgtaatcctaacactctgggaggcgggggtggatagatcgcttgaggccaggagtgtgagaccggcctgaccaatatggcaaaatcccatctctactaaaaatacagaaattagcctggcatggttgtacgtgcctgtaatccaagctattcgagaggctgaggcacaagaatcatttgaacccaggaggccaaagctgcagtgagccaagatcattccactgcactccagtctgggaaacacagcaagactctgtctcaaaaaaatattctattttaaaaaccaaattacggccaggcacggtggctcacacctgtaatcccagcactttgggatgccaaggcgggtgaatcacgaggtcaggagattgagaccataatggctaacacggtgaaacccgatctctactaaaaatacaaaacaattagccgggcgtggtggcaggcgcctatagtcccatccccttgaagttacttagtgcagaaatcctaccttcttagttctcaaagttactatagttacactatagaccctcatatattataggcattcaacagatattggctgtactgatttataaaattgccttttaatttatatgtatataaatacaattggccaggcacggcagctcatgcctgtaatcccagcactttgggagactgaggcaggtggatcacctgatgtcaggagttcgagaccaaactggccaacattctgaaaccttgtctctactaaaactagaaaaattagccaggcgtggtggcagggtgcctgtaatcccagctactcaggaggctgaggcaagagaatctactgaacccaggaggcagaggctgaagtgagccgagatcgcgccactacactccagcctgggcgacagagcgagactccatctcagaaagaactttttaattgaaaaaaataaataaaatccatccttatcaaagttaccttcattgtctttggatcaagtttagaccaatgggtaggtgtagaaatttctttagcttc

SEQ ID NO: 1884102 - DNA, 4001 bp, Homo sapiens
tacacatgtgagcccccatggcggccgccaatattagtttttaaaactatttcctgtcttttaactttgcctaggttctaaaacattcaaagttatccatttctggctgggtgtggtgactcatgcctgtaatcccagcactttgagaggctgaggtgggaggatcacttgaggccaggagctccagaccagcctgggcaacgtagtgagaccccatccctacacaaaaattttaaaaattaactgagtgttgtggcttgcacttgtagtcccagctactcaggatgctaaggcagaagagctactttaactcaggagttcaagacagcagtgagcttgatcacgccactgtactcaacgtgggcaacagaattaaagcctatctctaaaaataaaataaaataaaataaaaatttaaaaaagttatccagtaaatatatcccagaaataattcttcagtcctcctcttttcacaattttctaccatctcactggctccaaaggccctctgaccacacataccccctaatcaagaaagagagtctctctctgtaatacccaggtcaatttctctggcctccctacttcccttcctccttccttccctttctttctttctttttttttttctcacttcctttttttctccagcttttaattatgtgaacccttttagctctccttaagaaaaattccttgttcctcttccagcctaggtttcatgtattcttagatttttgcatcacagatatttttaaccaaggaaaagaggagcacttagggatgagggtgggcaggggtgttaagagaaggtgagtgggcaatgagtagattccctgggttgggagactgggtgcatagagagttgatatggtgagaaagaccaggtgccttggctggaacctaaaacaaacaaacaaacaaaaaaacctgtgaaaatgagagtcaggtaggcaccaaataaattgaatatattttaccttttatttgtttgtttgtttgtttgtttgagacagggtctcgatttcacgcaggctggagtatggtaacacgagcctggctcactgaagcctcaacctcctgggctcaagcaatcctcccacctcagcccaccaaatagctggaattacagttgtgtgccaccatgcccagccaaatttgggggattttttttggtagatacatggtctcgctgtattgcccaggctggtctggaactcctgtgcttaacccatccacccatctcagcttcccaaaatactgagattacaggcatgagataccatacctggccatattttgccttttcttttagaaatgtgtacactaaaagactaatttatgacattaaaattcagggaaatcactaaaaatatatatgatgactttcaggaaattttttttttaatgcttaatttgatttcttgactactgtgtgtttttctatctttgttttactttaaaaacaacaacaatagagctgggcatggtggcttgagcctgtaaacccagctacttggaggctgagacaggaggattctttgagcccaggagatggaggctgcagtgagcaatgatcacaccactgcactccagtctgggcaatagagtgaggtccagtctataaaataaaaataaaataacaacaataaaaaatcatttgtgaaaaccagatatactcccaaaacatcaggatatacagtttgggcaacccagtatacgtattacgagctatgcaacattgggaagagagtattcacagaaactgcagtccacatcattgagttcaaatgagttatcgatgatggtttttcctttgaatctagaatatttttctaaatgtaagaaatacctgccagattgattgtattgtacttagcttatatgaatgttaacattttattttattttttatttttagagaaagggtctcactgttgcccaggctagagtacagggacatgatcatagctcactgcaggctccagcttccaggctcaggcaatcctcctacctcggcctcccgagtaggtaagaccacaggcatgcatcaccatgcccaactatttttttaaattttttttgtagagataagggtctccctatgtttttcaggctggcctcaaactcttgggctcaagcagtcatcctgcctcagcctcccaaagtgttgggattacaggcctgagccaccacttctggcagaatgttaacattttaaacaagaaatagcatataccctaaggtacatgctttcaaaggttgatatattcataagtgagcttgttttcctactgagttgtatttttcttccttgaattccattttgaattgtaaatcaaaagtaaaattctaagccctcctaaccatctgaatggactctcctctcagccaagggtgttccatagtaaacctgaaaaaactagttcaggccatgatgggaagcaggagccagacatgcctcattataccctcctcctttttggaattactgatagaacagactctttaaatctgataagaaacatttgcaatctattctctctgaaggctgctacctagagacttcagccgcttgataaaaccttggtctcaacaaccccttttcgtagctcatacattcctttctattgacagtaattctttcaaccaattgacaaccagaaaactttaaaatctacctatgacctggagccccctccccactttgagttgtcctgcctttctggactgaaccaatgtacatcttacatgtattgattgatgtctcacgtctccctaaaatgtttaaaaccaagctgtatttgaccaacttgggcagataccacctaaggccgtgtcataggcatgtccttaaccttggtaaaataaaatttctaaattgatggagatctgtctcagatacttttgggttcacagaatgatactgagaaaataagaacggatctacgttttatcaataaaattttaaacttatattaattcataaaataagatatggtatatctgtctttgtttatagtgcttgttttttcttttaagtttttaatctgtgttttgaaggaaaatgcatgtgtctgttgcaggtttcttatgaagcattgctggcaaggggacatctggctcttgtaaaatgaaatgaaaggcaacattttccaacaattgttaagtatcaagtactttggagtagcttcatcaggataggattgctgttgtgggttgcttggttaattctagagtaggcagtaatgtaaatttatatcagctattttgaacctgtaattttgcaataactagaccttaagacatgaaagcgtagtggttcaaatatgaatcatcattacacttctttctaagatctgttctacagtttgagtagcttttccactagaagtgacactcagcgggtaggtgggctttgagtccttttgtcccactaaagtgaatcatagccataaaagttttgttttttgtttttgtcttttttgtttttttgagacagagtcttattctgtcacttaggctggagtgcaatggtgccatcattgctcattgcagccttgactgcctgggatcaagtgatcctcctgcctggacctcccgaactgctttgggattacaggagtgagccacaatgtccaggctcaaaaagttttaaaatatgactgtatactatttaagattactctttggaaccttcattgttgtttagaaaatctgataattttttaaagctatcaacaaaagagcttagagctcagaatgtaagaactgtgcagtaattgtctcctaaatttggtactaatcatatcctttcacatattatatttaattctcggctttgcttcgaaaagaagacgaaacacttggagagagtttaaaggaaagccataaaaatgattaaaggtttggaaaacaagctctgtgagcttcggcttaaagaggcttttcttattctgccagtggcacagaatgtgagcccaaagtagaggaaagctttc

SEQ ID NO: 1884103 - DNA, 4001 bp, Homo sapiens
gtggtgcatgcctgtaatcccagctacttgggaggctgaggcaggagaatcacttgaacccaggaggcagaggttgcagtgagctgagatagtgccactgtgctccagcctgggcgacagaataagactctgtctcaaaataataaaaaataaaaaattgcaaaagcagagacttgcccacatattaaacatcccaaaagtgattcaatgtttattttaaaactttcttggtgttattatgattacttttttttttttgagatggagtctcaccctgtcacccaggctggagtgcagtgtcacgatcttggctcattgccaagcatgaggctggtctgaaactcctgaccttaggtgatctgcccaccttggcctcccaaagtgctgggattacaggccaaattattattacttttaatggcaaaaactgcaattacttttgtaccaacctaatgcaacacagcaccatcaggtttaaatagaattcctttctttgcattaatggctttccttagagtctctattaaaaaaaacaaatagcacaatagcctcaagaactgtagcctcaccactcttctgaattgcttacctctttgctaattagaactcaactggttccgtctacagcttcatttcttttcaccatacggtgattccttttgaaatgtttgctgatatctggtcctgtctcttgattttagttagcagtgcttgggaaatccaaatccttccattacattctcaggccatactaccttttaaatcggtgttcacatttattattctgccatcatcttgtttttatttgccaaaataaatgttgaagggcggccaggtacgctgcctcatgcctgtaatcccagtagtctgggaggccaaggtgggaaggtcacttgaggtcaggagttcaagaccagcctaagcaacgtggcgaaaccctgtttctactaaaaatacaaacattagccaggcggtggtggcagacgcccgtaatcccagccactgaggcaggagaatcacttgaaccagggaggcagaggttgcagtgagttgagatcacaccactgcactgcagcctgggcaacacagtgagactccatctcaagaaagaaagagaaagaaagaaagaaagaaggaaggaaagaaaagaaagaaagaaaaagaagaaatgttagaggggaaaaaatgccttagggcatcaccacgcagggccagcttcctaggccaaactccccagccttcttcgaacgttctgctgttgccatcctaacattcttaatacttattgaacaaggggcccacattttcattttgtactgggttcctcaagttatgaagctattcctgtcacacccctgacccccatccatttctgagacaagcagaaagctggaattggatggaatgctagaaaagccagcatcgatgtggcggagagcacagcatagatttttgctgtgtttgttcatatttgctgaacatagcatctatggccgtacgtgagggatgtatgggtccctcaaactaccagctgttattccttaaaatatacctgaggtctaagtacatgttcatgcagcttgaaagcaagagagagagagatgcgtacaaaagcgggacaggaagcagcccagaatggttcatgcggctgcacttctttcaaacactgggaccctaccaagcagagtacagtcaaatatttctccttactttgtgttacattctgatatgtagaagtaaattctatccatatgtttctgaattatttatacctaactcctcaaaatattattcttcaagacctttggaggtctaaaaaactctcgaaatgcatttatattttcttgacccctttttgtcgaactcaaaaatagaaaatggaggattacaccaaatatgtggaaaaagttgtagaatatggtttggaattcaaaatgtggtcaagtattgttcctgaacatgccttaacaacacttgaccacatcctgagtcccaaaccataggtcgattagctaaaacaccaaatcaatagacgtctgctctcctacctcccccatcctccacccccctgcagcccagctctatcacttccagcacaaacatggcagctccctctaactctggttgacttgcagtatgtgcaaaccgagataaagcattccttcaagacagccttctctcataaaaacctcaatgatggatctgaacagagagaataatatatggtctctgatcatcgggtgacaggcagcatgcatcctatttctgcctctggtgacattgggtgggcttttatccctttaggacattggtcctcagacccaggattaaaagacccttctgccccaaccactctgtttggcctttggtttctttgttagtttccattgtgtaaacatctgaaccacaaggggctttaattgagtgaaaggcagagttccagctctgttctgtatttactggaggtaccatgggcagaatgatgttgcccggccattgcaacacagagatgatagtattttcctttgaaaccgtggtatgggtggaacccatcaaaggataagttgacagatacgtctcacatatgtttatatcccctcctgcttcttagcacaattccttaccacagaaaactctgcatatatatttctgatatgaacaaaaagctttcaataccataagcagaagcaaagatgaaatttttagtgatggtttctaagggagcaccagaaaatttttcaaaattcttttcttttttcttctttttttaaatttctttttttttttttttttgagacagaatctcgctgttgcccaggctggagtgcagtggcacaatctctgctcactgcaacctccacttcctgggttcaagcgattctcctgcctcagcctcccaagtagttgggatcacaggcatgcgccatcacgcctggctaatttttttgtatttttagtagaaatagggtttcgccatgttgaccaggctcgtctcgaactcctgacctcaggtaatctccccgcctccgtctcccgaagtgctgggattataggtgtgagcctccgcacctggcctgaaaactctttcctaaccctcaatgctgtcacaaaattttctgctaaagaaaaatagccaattaatcgaagaccacctagtcatattttagaattttctccagaaaggaagctgcaggaggacaggctgcttctctgttttgattgttgatgtatcccaagggtccagaacagtacctggcatatatgggtgctcaatagacatttgtcgaatgactatcagatggtagacatttctagaagccatggcttttcactaaggatgaaagctatcatttgccacctattttaacccccttttgccctcatcccaccctgctccccgccaaaaaaaaaaaaaaacccttcaaaaaagaaatctccctctgtagcagaccaccaaacctagatcaactgtggtctccagacctagagtataatagctttgaaaaatattgcaattaacaatgaaacacaacttcttaaattcatagtcacttatagacaatcgcagtaaagagaggattgaagcttttgaaatagatttcattttcaacagggtccaaattatttttttctggtacattttcatttttgtctgaattggtctgctttatacttcatacaaagatagtcactgtggtgtctgaggcaacacatacacattatcatgccatttatgtggttgtgggggtaggtttcttttgcatccttgactttaacctcattatgaggcttttcatttgtcttcccaactagaaagttttaaattccttccatcacgatgaagggatactgccttcaatctagactttaaaaaatccattacatcccagtgaacggactgccttccacctagatttaaaaaaaaaaaaaagtgaatgcacagtgtattgaatggtgagaagagctgtggaaaagaacagataagagaaacagacagtgat

SEQ ID NO: 1884104 - DNA, 4001 bp, Homo sapiens
aggcaacgatgcccaaacctgcagctccagccctctcctgagctccagctccggtgtccagctacccacagatatctccctttggaccctttcttggcagcatcttaaacccaccaccttttccccattctccagctgcttccccttcaatctttcccatcccagtgaacggcacctttcaacaggaggttctgtttccgacagaaatccaggtgtcagccttgaccgctaccatccttccccatctacatccacaaagcaacaccaactcagcctccaaagggctttcaaggtcatcccacctctcagcctctcttctcttccttatgctgctgcagtagtgcccctcattggaccccctctcccacactttctctcctgcaggtcttgtccacatatatcctggagccctatcttaaagcccagctctgctcctgccactcacttatcaccattccaagcctccccggcttggcactgctcttaggataatggccagtcttctagcaggcactccagcctcatccctcatcctgtccccctatccatatcccatcctcctaactaacagaacctctcgatttcctgggtggatcacacgttctctcaaccccagcatttcccctgctgttctgtcggcctgaagcccctccctccctcatcttatgttttgttaactcctctttgtcctttgggtctcagatcaaacacctcttccatgtagaggcttctctgaccctagaccaggctgtgtcccggctgctcctcctagcatcacactcacgccacttcatcatcatcactcgctctgtgtctctcacccatcaggacatctgctccgctcactaccgtatccccagcacctagcacaggcaagcgctcatccatatttgttggaagaattaatgatggaacagattacttaaagatcacaaacggagcactggttaagcctcccagggatccgaagagaaaagggcaggaggccccagctggaagatccagattggctggtagatcacagcttggccaatgtgtggcaactgctgccaagcccccatctccatcgccctgggggaatttggggccggcttaatatgtgttgaaaaaccacttccgagggtgtgctcatcccttgagagaaaagccacgtcgacgccttctagcttctagcttctagctgtatcttctggtgcactggaaacggcccaacccttggctgcattctccatcccaacacacacacacacacacacacacacacacacacacagccttccattcctgcttctgcgggggctcattaagtcagaccacactgcaggctttgctgtgtctgactgccacctctcggattgggctgtcagcacaaaccctcactcataaagaaaaaggcagcttcctgtccatcctgaggtgtctgtgtgagtgtgtaccagagcccaggggaaggaacagtgagagagaagggagaatgggcgtttgcgggagtggagaggtagaagagggaagggaagaggagagaaaagaagatattaattttgagctatcaagcgggaggtgggagagaggcttttcttagtgaagcagtagggcacagtcactaaaaaggaagattttggggagtcagacacctcaagctggaaatcagccttgccacttaccagctgagtggctttgggcaagacactcccttctctgaaccgcagttctcagatgttgctctgagggttaagtggatcgtgtgtgatgtgcctggctcggttcctggctcactgggtgagctctgttaagtggcagctgttgttgctgccactgccactgttgtcctcactcctgttggggaacatgccccactcctgtgtcccacctcacccccctcactcacccactccccggagtgtggggacttgtcatggctccaatcactgcatctgtggctagagtggcttttaaaggctcagactcgaaccactgatccagcacctggacagcacaacagcagagagaagggcttaggagcctggatgggaggagggccctctcactgcctggtcgggcctgaggctggggaaccactcaccttggtaatgggagctgtgaggacctcataatatcggggaagctgggctcccaggatgcggcctacaagagaagatccacaaaacagaagttgaaacaggtgacagggaaaccctccgacctggcctgggggataaaagcatggaggatgctgagacttcctgccaggaggtggtatagcacagccaatgcagggacagatccagcttgagtcctggccacacctctcactagctgcagtgcctgggacacatttttaacatctctgaacctgcttctttacctgtaaaatgggaatcctattttacaccccaagggctacggtgaggattaaatgagctaggtaaagcatttgcaagttcatgggtacttaatacatttaagcagttagcattatttttggaaaattttaaacttgtaccttattcccttatttcgaactctggaaggcccatatcctgggagaaggctggcatggctgatccattcctatgaccctgattcagaccatttcagaaagaaactaggctttaaggccttcagggtagaaatcatggtctctagccttacagcccctgggcctagcttagtgtctgacacatagtagttgctcaataaatgttttttgcctgtttttcacacagagctccttggactggttatctgagagagaggcagtgtctactttttgcatttgtaatagattccactggctccatactctttgcaatgtataagtctgcagtgcctctcaacccaccacaacttggttaacctgcctggctccttggctctgggctcatccatgtgatttggtcagccagtggaatgtttgccgatgtgacacaaacccagaactgaaacaggcctgtacattggggcatgccctctgtgcttgtgccactgatgtgaaaagtccacacccaggtcagcatgtgcttctacaaggaggacgagaggtacctggagcagagctgcctccactgagctgctgcagacacaaacacatgcctgagaccaaaccagatcagctgagccagctggaatcagctgaaccacgaagacatgtgggaaacaaatgattttttttctaggatatagaggttaaactggtctgtataccctcaaggagggtagaaaataatagcacacttaatgagccttccattcgcatactcatggcagacattactaattgatcacagaacttctccttgctgagcccaaatctagcattcttcctgtatgggggcagctcttcaaatctcttggcccctatatcttattctagccacagccatgatgctgagctccaagcaggctttgatcagcttcacacaggcaactccacagcaactcacttcagtcctgaaaagtgagcctctctacttcttccctagggcttctctggcaccagggcagggcactcatgggaacctacttggcacccacagatgcacagcccagaagtgtgggagtcaatgccctgtgaggcaacccttggccaatgggagatagaacccaatggataaatatttccctttccatctcccgagaaggttcctcaaatgcttttcataaggcttcccagagggcccacacaggtccagcatcttgtcacccacagtgctggctagtgcgatcacacactctggtattgactctttctctgtccactttcaccccaactttctgctatttttgtgtcttggggtcacccttccaaatgaactacccacgcataagccttggtctcaggctctattttaaaggcatatcagcctaagatgctctcaacaaagtgctccaggctgcccctaattgatcgcagcatgttaactgatcccagctggcaggctgccatggaggttcaggcttgtgtctaggcatcgagacaatgggctcacctccttgaaggt

SEQ ID NO: 1884105 - DNA, 4001 bp, Homo sapiens
ctcaccatagccttgtactcctggagtcaagcaatcctcccacctcaacctcctgagtagctgggactacaaggcttgcgccactacaataggctaatttttttttttttttggtagggatgagggtatagctatgctgccctggctggtcttgaactcctggactcaagcaattctcccgcctcaacctcccaaagtgctgggattataggcatgagccactgtccctggtctataagactttttaaatacataattctagtgctgatgtaattaattttttttacttaaattttctctacattttcctaaagtatgtacaattatcacttttaaagctgcataatatgccaaaatattaatttaacagcattcacaaattgttgaacatcaaggttgttccatttttcttttcctctttaataagactgcaataaacatctttcttctaataacattaaacctttcatttttttaatctgcagctcccaccacagtgtctaattcgtatgaggtacgtgacaaacattagctaaactgaatacactttttaaaaactgtttttcaagcatcgtttcctaagactagaattaatgaatcaaagagtatgaacttcttatggttcttataacataatactttccaaaagaataatgtcattttataatccacaagatatgagtgtgtgaactcgttcattgcaatacatgccagtattagagtttatcatttaaaaagcttaatattttattatgtataatttgatctcttaaagtgctttaccttgtagagaaataacaatcctgaagttatattgtcattacttccatttcattatttaacaaagtacaaaaagacatgcaactgtttattctaattgtggaaattcaattataaatatgtaaaaactctttaaatgaacatactccaaagtttatttctgacttggaaggtggcatattttcacattttagtaaaatttgcttgaggccataatctaaaccaactttgataactgctggatataaaggtaatcttgtcccaaagagcagtgaactctattctcctttgagggggtttcttttggaacagatagtaagtaaaaagcactctaagagaatattttaaaataaataaattgctaagagtttacgtgtttatgatgtcatcacaattcctggttgaaccagaattgcctatctatgaaggaaaagctacattgagaaaaagtagtctgagtttcctaaaactcaattcagaaattcaagtaaattatcaaagatttgaatatttaagtcaattgtgaggacttctgtttcttcctttaacatctttaaaataacgcatttcaggtaattttacatttttccccttggtgatttcaggaatcaaatttgtacctgatgagaattggcattataagctttttagtattttttattatatattgacatgtttaaaattggtaactcacagttttaccacaattgggtgattctgctttcctgtcctttgatattatcatatgttaatagtcagaaaacttgtgataactcccagtagggttctttttcactagctgggttgcagcacattcatcactttaaaataagaatttactttctgagatgggtaaagcactgtgctagactccaaggaaccatacatagatgactaagacatgactcctgtcctcaaagaacttacaatctattaagggaagacagacatgcaaacaaataggtataatacaaagcagaatgtgctgattgttaaaacagaggtacaaaacaaagttctataggagcacaggatggttatataggagcactggttggggtgatctggaaggctgggccagcggaaaagtagtagaaaactctgccccttagaaaacacagcagtgttacagcccacctgggttagggtcgaagccccactccccacagaaggttttcctaaaggagatggagccagggccctaacccagttaggtaggtgattcgttgatttcaattatgaatgccaacactttctttccctggtgccgataaatgtgctttcacaagtattttactttattaaaaagtaaataaaatttaacaatctattaagtaacttacatgaagacgcaagttacctcagcctacagcattagaatggcctcaagtggtactctgattgtacaggaccaagcaaaaaaagacaccacttcagcatcttacatgtggtgctcccataaatgttttgctactgatatcctagaaagaaagaggaaccagacaattccagagaaggagcctgggtattatactattcatattttgctgaagatgcaattatgttaagttttaaaaaatatactttaaaatatgttaatgagacaacaggatttgtttttgtcttgtcatgatctcaagaaacagcaggtacactgccagtttccactaatttctaggtataagaggtagacaagataacgtaactgatatgtaatattaaacaagtaccacacgaggagtgaaacaactagaaagaagataataaatacaaacatgtttaaatacaaaagaacataaagcaagtatcatgtgcacagaaatagaaacattaaatttgtagaaaattaaagacaaagtattagtttctactgtttcattctattgccatctcatatacagatccctcaaatttctcaaatctgtagatatagtatttcattacgctgtaggaattttaaaacgcttaactttataattgctgtttatagacatccttaaagaagccaaattttaatgaacaaaaaaggaaacaataaaatctcagtcatatcaactgtatataaatgtttgcaaaatgcttatgaaacttaaattgactattttcttaattattacaaacaagcattctcacttcacttgtttattaatttttacaatctcctaaaacaaaagaaaaaaggaaggaaggcaagcacacataacctgactactggaattaatgacaatatcccattgcatagactttaaaataaacatacaattcaaaaagacttactatcaaacaactggctaagcaaactatgaaatatgacaaaaaggttataatatctgtaataatataaagaaagctcataacaaatataaaaaactcaaaaccctaataagtactaaataacaattcactaaaaatacaagttgctcataaacatgaaaaaaattcaccctattaaaggaatgcaaattgaaacaacgaaatattattttcaaatatccaattagcagagaaagagtaacattcaatgctgcatccccttaggatgtaaaactcctcctgttttggccaaatatttgtgttttaaaacaagataaactgcaaataaataattaatgcttacaagggtgtgatgagtgagataaaaacaccccaacactgactgaggacaatggcagtcagtacaacctttacacaatttgtgaagagtgtcaggagatagatttttgtggctttcaagttcataccctgtgattattaattctactactatgaatatacattttaaaaaatcagagatgcagacaaaggcttgcaatggtatttatcccagttgcttataatgctccctagaactggaaactacaatgtcaaacattaaggaaatgggtcattataagattaaatattatgcagccattaaaaatgatcctaaattactactcatgaagagaaatgtagaggatagatgttaggcaaaaaagcaggatctacaattttaatgcagtgttagctaaaactatgtttaaaagaaggcagagattttgtacttgctaatttgccaaattcatttattagttccagtaggctttgttgtgaagtctttatggttttctaagtataagattatatcatctgtgaacagacacaattttacttctttctttccaatttaaatgctatttgtctttttctggtctaatttctggactataacttcaaatact

SEQ ID NO: 1884106 - DNA, 4001 bp, Homo sapiens
aaatattttttaataccagtgaactggtattgcgcatcactttctggacctgccatgatttcaatcttttaaaaaaagaaagaaagcaacattaaattggtttggatgtaatttaaaagtaaataaattttgtcttgttttagtctaaaaactcaaggtcactgcatataaatactgtaaatttttatctatatctcacccaacacagtagtagcaaagatggtggaaaaagccttcctgaaagaaaagcttttggaagtaggattttaccttgatcgctatttcatgaacacctcagaatacatcaaatcacacaatagcccctgctaagttcattctctgacccaatacagcttaatattttcattcctggctccatcacaccacagtccattgaattaatccattttaaggctactcaaaaattggagctggtatttttcaaacattcaacgggtgaccatcaactaaacagctcaattacaacccctacttatacaatttttcttgttataagtaatttaggacctccatgggagaagggagaagggataatttattaaatggagttaataatagctactggtggtagtaaggaagctggaatccttgcaccaccaccaaaatagataaaagatttaaatgtaaatagtgaaaccaaaaagtcctggaagaaaacatggggaaatatttaagtcatctcagggaagggaaaatattaagaaaaaaagccaaaaaccaaaaaaaacataaaacctattagtcaaagaaatgtaaaatgagatcaatatttaatcatcaaacaagcaaaaataaaattatggtaagtagtagtattaagtatgtgagaaaactaagaattctctctctgttgcttggagtataaactggtaaaaccagcctggcacggtggctcatgcctgtaatcccagcactttgggaggccaaggcgggtggatgcgaggtcaggagatcgagaccatcctggctaacacggtgaaaccctgtctctactaaaaatacaaaaaattagccgggcgtggtggtgggcgcctgtagtcccagctactcgggaggctgaggcaggagaatggcatgaacctgggaggcggagcttgcagtgagcctagattgcgccactgcactccagcctgggcgacagagcgagacgccgtctcaaaaaaaaaaaaaataaataaataaaaaataaataaactggtacaaccttcagaaagtgcaagttggcagtatcttatcgaattataaaatgagtataccctttcatctagctggtgtttttctccaggaatttacccttattgaaatattacaaagtggaaacacattgtgtggttcaaagatggtcaatgaaatactgtttatgaaaatcttaaaagtccatctatagaagactgattaaaaaatgatggtttccattaaacgacacacaacaggcacagatctttgtgtactgacatgggaagatgtcccaagtaacgttcaattttgtaagaaaaaatcttatttctggattttataaagcacgtcaatggttctgggtcttgtccctagaccagcagcattagcatcactggaaacttgttagtgcaaattcttaggccctacctattgaatcagaaactctgggtccaggaatctattttaataaggcttctagataattctaaagcatgctaaagtttgaaaaatactgcagtaaatgaaatagaaaaatagtaagtgtattaaaaaaaactctggaagaatatatagcaaaggcagcttaatctatagtacctgtgtattttacaaaggcatgaatttcttttatagacaagacgtattcaaaaggtcaccagaacaagagctgaaaattcgtatgcatgaccgcctatctaccacgaccgacgccacgccgagtcgattggcaacacagacgagccggtcgaggtccggtcgagattggtaggcagtgacagtgactcagctgggtcttgatgaaatggaagagggagatatctgtcagggagtcattactatggaaactggaactcccccattcaaaggctttcagaggcattcttgtgtaaagaattggcaatgaaaatttgagaaaaatgaccttaattttcaagtttcaagaaggttcttggagcaatgaaggaaatccaaacttccttaggcctcttcagagaccttggccagtctagcccaagtaggaaaatctccattaaaaataactttatacacttgatcttagccaacagaagcgataaaagcaactttataatgtagctatcaactgttccactttactaaacttactaaagacatacttccccccgccccccgcccccccaccagctccattcatttcatgatacatttttggattcacttcttagggtttgaagtaggtttttaggagaaacgctacagaaaataagggcttcactttgaccattaacgaaaacctccactacattacatctaactaaactttttaggaggatatgcccaacaatactacagcgctttaaatttccctttaatttacacacaatatgggaggaaggctgatgttttgtgatatcccacagaagactaattctgattgcagggaagtgcatggttcaagaactgaaatcaatcactcaagttagtctgggtcttaaaggaggaggactcttgagaggctcaaatggagggccaaatggggaacgggattgttgctggtgagataatggagtaaggtcgaaaaatttggttctgcactcttcagcacggtgcaggttactttagggcaaagataaaggaacccttgtgtttacagtgccctttgtaagactcctagttgtgatttaatgttgttaaacggtggtatgttttaattaagttgctaactgcccttcttgagacaaggtctcgctctgtcgtccaggctggagtgcagtggcgcgatctcagctcactgcaatctccgcttcccggggtcaagcggttctcctgcctcagcctcccgagtagctggaactacaggcgcgcgccaccacgcccggctaatttttgtattgttggtagggacggggtttcaccatactactcaggctggtctcgaactctggacctcaggtgatctacccgcctcggcctcccaaagtgctgggattacaggcgtgagccaccgcgcccggccactaactgctcttaaatgtaactaatccttccgtgcctctctccacctgtgagatgggcactttattaaaggtccaaagtgaccagtagctcttgttactttctctgttcctcgatattgctattttcctttctaacttaacacctacctggaatggtgagatcacgaggtaaggaaggcaaagatgagtgagaaccactcaggtaacagaagcagcctcttgcattcacggagtttacagctctctgttctggttacctcctaggaaaggccttcccactgatcgtctatagactgaaatctaacccttttacagcgggcctggcgaactgtaggggccgggccacattcactcgctttgaaaaaggctgcagcgcacctaaaggaggcccggctggccagcttcctaaagcacagctcggtgggaacaaacagctatggacatacagaagaaaagaggttaattcggccggtgatggggatcagaagccctagtcctcgtccaatattacgtcactgggtgacctcgagggacgcttcgcggagggcctcatttttctccactggcgaatgcaatctaagggtcttcggaaactgtgggagcccttgggcgcacctatccgcctcacctcgaggcttctcacccgctggccgcccccttgcgcccctcgttttttctagctcctttcccattccccaccgtttctctcctccaaagctaagaactcgagttgctcctcggccagaaacggcgggcggtcctgcaacgtgcaggcgccaggtccaagcccggactcccctcttc

SEQ ID NO: 1884107 - DNA, 4001 bp, Homo sapiens
gatgcttccttgtttgatctttttttttttcaaattaacttagaagctcagaactcacaaaacatctgggctgccagggaccttgccattcatctggttcgatctcttcaatttacattatgctgggaaaccagagccatcaagaaggagtgcttcaccggagctcaaactgtaggcaggaatccaggactcttagctcccagcggggcctgggcctccaagccctgacctgatggcctcctcctcctggccctgccccagccttacctgtcgcccaatccattttgtcaggaccccctcagtcaacaagccctgactgaccaatttcaagccctcctccaccccgcaatgaccttacctttgtctggctcacattctactcaagggaataaaataggaatcataacattacatacttatgagaacttgctctatgccaggcaccacgttaaaaccctgaacagaaactatcaacacatttaatttaatcttcacaaaaccttgatgtggatataattacatcccatggatgcaattatcattcccatttgcagatgagaaaactgagggccattgatgttaacaacttacccaaggctataccccaagaatgtccctgggaaatttgattgtaattttcttatctttttttttttcttttcttttctttttttttttttttttttctttttgagagagagacagggtcttgctctgtggcccaggctggagtgcagtggtatgatcttggctcactgccacctctgcctctcaggctcaagccatcctcccatctcagcctcctgagtaactgagactataggcacgcatcaccatgcctggctaactgatcgcagtcttaacctgtaggtcaaactgtctcttcatacaggagacaaactcaacaaaaatgcaaggaatatttattgaacagctactatatgctggacgctggactagaccctacagggctcatgaagaggggtgtggaggatctgtaagagatcatatgcactgttggggagttgagagaggcttcttggaaaaggcatctggctgggcacagtggctcacgcctgtaatcccagcactttggtaggccaaggcaggcggatcacctgaggtcgagagttcaagagcagcctggccaacctggtgaaaccccatctctactaaaaataaaaaatcagccaggcgtggtggtgtgtgcctataatcccagctacttgggaggctgagacaggagaatcacttgaacccgggaagcagaggttgcagtgagccgagattgcaccaccacactccagcctgggcaacagaacaagactccgtctccaaaaaaaaaaaaaaaaaaaaaaaaattagccaggtgtgttggcacacgcctgtagtcccagctactcggggaggctgaggcaggagaatcacttaaacctgggaggtggaggttgcagtgagctgatattgcgccactgcactccagcctgggccacagaatgagactccatcccaaaaaaaataaataaaaaggaaaaaagaagaggcatctgagagaggctttgaagaatgtccaggattccaacagacagtgacaggcaagaggtgtccccaggagcactgaggaaggaccagcatgagaagtgtggagccggagcagcaggggttcactagtggcaggttatgagcaggatgcgatggaagatcaggcgtgaaagctaagtggaggccgtactatagaagactttctggcagggtaaagagatttgggagagcccctgacgtctttgagcataagagtagcccgagtcaaagttatttaaaggtttggccagtgggcaagatgtgggcctgcagaagcacctggctgggaagttgggagcccaaaccatcagctgccccacggccttggcattgatgttgtagcactgccgggcaccagaactgagtccacagggcattgctagagctcacagcctatggaattcagttctcagtgccaggtggccaaagttctttcagcctggacgctgctcttgcatgctttcttctgtgaatcgtctcccgttcccaggatgagtaagttgaggcccaggatgggtcacataaggaacttgtgataccaagagaactcctattccagggagggtctgagcttggagctgaaaatgggggcccacagctaaggaaatggacaggagttccataaattccaacaggaattggagtaggttaagaggggagggggctcagggccatggcagggatccatctgtcgcttcctgcccagatgtgttcctggtggggcctgatgtggggctggaggggtgaggggctggggaaagagccagaacacgcacactgagaagggcatctctatgcaaaccaaggggctttctgagctaaagggagtccccaagatatggatccccaagataggagcccagcccaggagtcctagctccccagaaatctccccaaaaccctgaataaagatttgaagtacctgggatagtggagtggaggagaaagagttccctgaagcacactttcattttctggagagttcagccgagggctgggtgctcccctcactcacatggcaaagctgcagcctatcccagagagggaaagccaagcctgcgcctcaggggcaccccatcccgacccctgcttgaatccagagagagggacagccacttacccacgaaacctcctctctatggctcctggggctggatctgcaacgatgttctcagccggtgctccttaaataaggcccccacccccgccccagccgcctcccgcccccgccccatgctggctcttctgagaaaggaggaaggtgtgggagggccaggaaccctgcccagagagccctttctaacctcaagccagagcgggaccccgcccccgccattctttgaagcctccccttcctcaccttggtctctaactgagttcttcccaccccttgagaccagcccgctgggctctctctctactctgcctgaaaaatctgccctttatgccaaattcaagtccagtttctcattttgaagcaggatgatggggaatggaggtgctaggggaagcctcagcgtaggtttctagcttttcccaccagctaaggcgatccaggcacccaaacaccagctgcaaaattcactggaaggaatggcggtgaaaaggcatccctctgcctcctttagctctgtgccgcttcaagcagtaccaaagggcagtggggagtctgttcccattttggggagagagagactgagacctgaggggaaagaaaatcaggggctgaagttccagccagcttcagaatccctcagggcagggatcccgggagcccctaccttacagtatgtgtgtgtccttgtgtctgtggggttccctctcctcagcccaccttctgtcctcgaccccccagaacttgactcctgctgcacagagctgggactccccagagtttgagttgggaaaggagggactccccctaagaagtcttttccatcctcctcccttgaaagctcaggaagttctttctgataccaagtcacatgcagctgccatccagcaaacaggggataggggagaggggaaggcacacagtcagaaatggcttgcaggggtcttgggccagaactcagggcagctctactgaggaaacttgaaagttccgggaatggagggtggtagggagagaagagtcatcagtattgtgcaatggacagggggaagcaggaaaggggacgggggaggaaagggatggctggtctctggaggacaggcaaaggcctggggctgtgggctgcccatcacccccttcctaggggcctgcccggccagagttcaaagtcgctgtcaccccacccctcattaaccctagtatcaccaggctggagtggcagtgtttttatgggcaaagcgacgcgaatgtgccccttccttccctgctacctcccccaagcagccaacatcttgctgtctctgag

SEQ ID NO: 1884108 - DNA, 4001 bp, Homo sapiens
gtaaaacggatcagagggaaagctccagcccctctcgactttcgcttgcggtttgcaacccctggggtgggtctgaccccgcgcggcacttgcccaggcgagcttccctcgtcgcggcccgacccgcgcgcggactcggcttccccaggtcaggacccactaggtgggccgctcggccccaagcctggcagggcggagcctaggccgcgcgccccggggttggaggttcccacggagccgggaaactgcgcgccccaggtccgcaggccgcctcccttccctcgcgccctcgcacccgccctctgctctgccgctcccggtcctgggtgtgcgggagtcccgggggtccctctcctggacgcagaggaggaatttggagcaaaaggaagggaatttactgcggatggcaccggaacctgaattgacttgtgcgtttcctgctctgggcacgtaggtttcccctaggaatctggagttcgctgaggacacttaattccaagagatgatgggttcacataaacataccatttagttaagaaaaatatttaaaataaagaaaaaagaaaaactgaacttcgatcttcttctccacgttccctggtgtcaccaaataaacaaagcattcggacgagagtgggctgctgggggctcgggaggtgcgcgagacaaggttaccctgcgggtccgccactgcccccggcctccagcactgcactgcccacgagtttgcggggtgtgagcgccgaaggagaaccccggaccgcccagtctcagcctaaaaacttggatccaagagtcctacggttgtggatgtgccagtcctccgcgaccctttcctgctggccttctgctttttataaacgaaaataaaagtttgatttaggcttaaagaaatgtcattctggtcgttcctccctgaagcgggacttactcaacctcatatactcgcccggaattttcaatctcgcctgtcgaaatcgctagctgcgcatccgcggaagaagtcctggatgagaggtagggtgaagggatcaagcagatagcagcaggcatcagcacactccggccgttccggacggtcaggcccgccgctacagggagaagtgcggcggatggagccagggctgcgggttgcgcgcgggctgggaacccggtggtgccaccttaagagtcgggtccgcgcagcggctgcggaggcgcccggcacctgcagggggcgctgctgccccgtggtttctcccgcgccgccgcgtgcagcgggcctggcagctccggggccccggtccccggagggggtggggacgctgggggaggaagggagcgaagtgcagccgttaggtaacgaacccgaaccctcccggattcagaagcggcctcagtgaggcgtttgctggagggagctttccatcattcggccgcgagaggaaacgtggggaggcgccctcccctgcccccaccgcctgccttcctgcctccctccacctccgctccccgaccccgaccgtgcttcccagaccctttgttctcgaggttgggaacggctgggtgggggttccccggggaagaggtcccccgcgccgctcggaggggaagggactgtcgcctgccccgcaccccagccctccccagtgccgtccccctttcccccggccccttccatcgcgtccacgcgcttccgttctcactcggactcccccaactcccgagctccggctccccagcctgcacggtctgcaagcccgcctcccttcccacttccccgccacctctgaggtccccgggaagaggggaggagagggagacgtgtgggggaggagaaaccacagagccttctcggcgcggagcattcccagggacccttccaggccccgacccctgggacccgctgcagaggcagggctttcccggcgccgccgcaggtcgctagggccgcccccgccgcgtcgccctggggcccacgggtgcacggcccgggcagcaaggcaaggtgcggcctctcagcgccaggacccgagacccccagctggagagaaggggacaccgtggtccgcgccctggggaggctaattgcacacgaacgcccccctcttccccgccccccaccgtaccctctgcagcgccacccgcgtcgcctctccgccgtgcgccaccctgagggctcccgcgattgcatcttcttgagcacagttaccaatgcgttcagcttcgtttcttactcggatggagacatcgcggagggaagcgaggggacagggatgcggtagtaggggaaaggtggggcgggaaaccgagcagagaggtgggagacttggctgaggcaatggcaccaggcagggccgcccggagtcccgagtccaggtccgcgaggcaggccccggtgcagccgcgccccggccgaaccctacatgtcctctgtactgtggacacgagtccgcggagcgccagtcacacccccgcacccctgcaagctcccgccgtagagggggctcggcaccatcctggtcacaaagtacgtgcccccaccccccacccccaggtgaagaggacgcagcccggcgccgtcagctccaggctgcctggagccccctccggcctctcggcgcgaccctggtcctcaatggctcgtcgcgagctgcgctagctgctctctcggcagcgggttccccaggacacacccagtccccaccccccgagagctggcggccagctcaggatgccaggcggccaggcgggcgccctgccaaattccgcgttcctctccaggagacggggagttgcgtcccaggctcgggaaagcccgcagttcgggcttgggactcgcttacaaagccccccaaggcgccagggacgcctctgcaggttgaattcctgctccgtatcacttcaattttaattaatcttttaaaacaccgctgtcacgtcgcttgcagaaaattaatcaaacttgaatccttgttgcatagcaagaatttcgatccgagtcttttaaaaaggacttgactttgcaaagtcacgtcttttacagttccctcattccccctttagcaagggaaatactgcaaaagtcaagacatgtttgtttggttctttctatcttcaaaatgaaactttgcttatttctgatctttattttcctgtctttgaacaaaaaaaaataacgagataaattgcctacctcgattaattcaaagtataattactttgaatgatctttgtttaagagcccagataaactaagataatcttaattttaatgtgacacgacccctatttttccttgtgaataatgagaataaagcagtcattaattaataccaagatatctccatagaagatggtatctgttctcgctgagacactgaaacatcagttgtattagtaattgatactgtataattgaacatgaagatagccgtctatttttaacctccaagctcagagtttatttggtgattattgagctcctaataattaatttttttccttcttactgcataaataattcttacgactcccagttcccatgcaatgcagaggcttctcattaaaacctacccctcaaaatataagattgtgaagctatattgtgcagcaactccttctatttcattatttgtaacatatttcctctatttcatatcttcctggtgcatttcctttgctgtgattttcctactaaatctatgagaatataactataacatcttttaccatagctttgtctttctgtgatctcttggttcagtttaatacacaatacttaagacttcaatttttcaagttactaaaatttgaggatgagttccactgaagaatcaaaaatacttgtatagtgaagttgccatggattatattcccaacctaacacacagtccactttaactcacacttttctgttgttaaaaatagactttgctcaaacacattccctttttccaacttgagttgaagagagttctcacaatttcctgggttaaatgtacatgctaacacaacctttg

SEQ ID NO: 1884109 - DNA, 4001 bp, Homo sapiens
ctttaaagccctatgttcaggtgtcctgtggagagtgactcgaaggcctgcaagagactccccagcagggccgacctccaccgttccctagggggcagggggagcagccgagctcgttggggtggggggcgtggctgcccttccacatgtggcctgcggccccccggccggaagcaccccacccctctgcctgctgcctgatctttcccctcggacaccccagctgcgggctgtgagggaggtgggaggtgactatcagatgagattagtgctaggcttggagaggaggcgcagcctggggaggcagcccctgataaccggcctgggggcctctcagccagctcattgctccatttgctgggctcattggtgataaaggctgtggccttcaaagacctgggcgtggccctgccggctgacgaggactctggctgaagggtggggcctccccgactcccgttcaggcctccttttaagacagcagccgactgtcattctttaaacagggctgatgagggaccccctgtccatttttcttcagtgggaagtcaagaccgcagtcccaccctggccattgtggaggcctggaagctgcggggcccccgcccaggacagaccagtgccccccaccctcacaagccgtccctctgggctctcccaacactgccggccggtcccaggctctggtcatcagaagggtggccccagaccggtgcccagcccaggcccccaaccgaggccccaggagccgtttcatccccccgtgtttatgcatttttaactaagttcccccaagtccacacgtgactaatgtgacgtccaaccaccgtgaacgagaggagaccagcacgacagagctgctttgtcaaaatttgtatttattgtcaaaactttaccacatctcacacatttaaatgaaattagctctactgaaatttctgaccagaaaatcaactcatacccatgattacaaaagtaataaaggtgttaagaagcaacagccagccgggcgctgtggctcacgcctgtaatcccagcactttgggaggccgagtgaggtggatcatgaggtcaggagttcaagaccagcctaacaaggtgaaaccctatctctactaaaaataaaaaaattagccgggtatggtggcaggcgcctgtcgtttcagctacttgggaggctgagacaggaaagtcgcttaaacccgggagacagaggttgtagtgagccgagatcgcgccactgcactccagcctgggtgacagaacgagactccatctcaaaaaaaaaaaaaaaaaaaaaaagcagcagcagcaaaagtgcacagacccagcgtgcacgcgtctccgccacgcctcactcccgtctgcgcctggatccaccgccacccgcttgtataaaaagtgggccccacacggtgcagcttcgtagtctgcaaagaaaatgtccaaagaatgagttgtggatcctcccagccagagcccagatcccaggcaccccgccccacttcccccgaccaccaggcggccccagagcccaggttgtccctcccgccacctcctgtaatgggtccacccccaactccggtcagactggtcacagagcaccgcccagctccagccctcctctctgcatcctgggtcccagctcaggggctgcagagatcaacccagggcagaggcctggaccacgtcctccccagacacttccagaacccacacaaaagcacacatccacgtttcccttgttttagaatatttggcccctttctgccccaaggatgtgggggtcaaagccccggggctcccggccgaggagaaaggaagcaggtggagtcccaagtcaggaggcaggtgctgctggagcaggtgcaggtgcactggtgcaggtgccgctggggaggacccgaccgccccgttttcccatgccctatacctctttaggccagatcctcaaagaagtatatgcataggaaaaaggaacggcgggcggctctgaggcgggccggctcttcagcactgggaggtggctgtcctgggggagggtcccgtgccgggcagcagggagaagtcgggactgaggcctggtgggcacggagatcctgtgggagtgaggagggcagagccaagccagggccgagttcccagaggcaggccttgggcctcgtcttacctgtggtccagcctcctgggccgctggcgctgggtagcccgtgagcctcgtgagcctgggaggagcggtggagaactctctgagccgggagttctgctgctgccgagcgagctccacatttatgcgcaggggagaccttggccgccgctgtcacatgcaaccagagggctgctctgtgccaaggaccccgtcgcacccccgcacctgccagattggggcacaaagacctgctgtgagaagagtgctgagccagggcccgccgggcgggcgggcggcgagggctgtgggccgggggctgctggcccgggagctgggatggggccagcctgtccccccgcctcctccaacccttatctccccacgcgcttctgcttgcgtcaggggcccggaaagcacacgtgagcaagaatcgcttgtccagggaaggggccgactctccttcctgggcctgcccagctcagcaataagcagcaccttgggctgcacccgcagcctcctggctcacagggactctcagaacccccagccagcgtgtccaacactgtcctggccactgggaaccagaccccacccccagggtaggtggccctgcttggcctggggcggcctccacagctggggctccctgaggattcacggcatcaggcggacactggtccagtgaggcccagagccttccccgggccacagagcccgcgagcacgtggagaggggccacgctctgcagccttgggggcaagagtgcagggtcggagggagagggcccctcagggacagctggccagacccacagctgcccacacagagcgagaccacacaggcaggcagacaccctctcctagggccagggagcccccggccgaagggcccaggcaggcagcagaactcctgcaggtctggggctgtccctgtgtcccaggctcaggacacaaggaagaggcccagaggaggccagggcacagggcttccacaggtggccagggacagggcttctgaaccccagccagcggtctctccccaggacgtaggcaagtggaggctggtgaaggaacaaggctgaggcctcagaggcctcttcagtgaccatgtcctcggggagactcaacgtcgctaggcaggcccgtgcgggcgcctggccccagcacctgtgatctgtagggccagagtctcaggactgacccgacgcagcacccacatgcggcagggacacacagagacccccatagacacacgtagacacatatagactcacatagacacacacagagacacacacagacacacatagacacacacagagacacagacatgtagacagagacacactcagacatgtagacacacagagacacagatgtacacagagacacacacagacacgcacacaatggacccacacaccccccaggtgcagcgggccttgactgttgtacgcgagagtctcctgtcccctgagtggggaggggcgtggggggcatgaggggccaggtggggctgcaagactgtccagcgccctcctgatggcccccgaggcggccaggagccccgtctggggaaggacgagtgggccctgctgggcaggaggagccatagggaccatggggatgatggacgatggatgatgacccagccacctgccaggccactctgcagaccccccatgggagcagcctctgcccccaccttgtgcaaaccgttgatctgcacgccaggccaagcaggtgattgtcacgaccagcgatggccacagaggggtgggggggagcacatcagtcggtcacaagccctcctggtggggacatggggctggggacaggccctgctcagggct

SEQ ID NO: 1884110 - DNA, 4001 bp, Homo sapiens
ttagtgctaggcttggagaggaggcgcagcctggggaggcagcccctgataaccggcctgggggcctctcagccagctcattgctccatttgctgggctcattggtgataaaggctgtggccttcaaagacctgggcgtggccctgccggctgacgaggactctggctgaagggtggggcctccccgactcccgttcaggcctccttttaagacagcagccgactgtcattctttaaacagggctgatgagggaccccctgtccatttttcttcagtgggaagtcaagaccgcagtcccaccctggccattgtggaggcctggaagctgcggggcccccgcccaggacagaccagtgccccccaccctcacaagccgtccctctgggctctcccaacactgccggccggtcccaggctctggtcatcagaagggtggccccagaccggtgcccagcccaggcccccaaccgaggccccaggagccgtttcatccccccgtgtttatgcatttttaactaagttcccccaagtccacacgtgactaatgtgacgtccaaccaccgtgaacgagaggagaccagcacgacagagctgctttgtcaaaatttgtatttattgtcaaaactttaccacatctcacacatttaaatgaaattagctctactgaaatttctgaccagaaaatcaactcatacccatgattacaaaagtaataaaggtgttaagaagcaacagccagccgggcgctgtggctcacgcctgtaatcccagcactttgggaggccgagtgaggtggatcatgaggtcaggagttcaagaccagcctaacaaggtgaaaccctatctctactaaaaataaaaaaattagccgggtatggtggcaggcgcctgtcgtttcagctacttgggaggctgagacaggaaagtcgcttaaacccgggagacagaggttgtagtgagccgagatcgcgccactgcactccagcctgggtgacagaacgagactccatctcaaaaaaaaaaaaaaaaaaaaaaagcagcagcagcaaaagtgcacagacccagcgtgcacgcgtctccgccacgcctcactcccgtctgcgcctggatccaccgccacccgcttgtataaaaagtgggccccacacggtgcagcttcgtagtctgcaaagaaaatgtccaaagaatgagttgtggatcctcccagccagagcccagatcccaggcaccccgccccacttcccccgaccaccaggcggccccagagcccaggttgtccctcccgccacctcctgtaatgggtccacccccaactccggtcagactggtcacagagcaccgcccagctccagccctcctctctgcatcctgggtcccagctcaggggctgcagagatcaacccagggcagaggcctggaccacgtcctccccagacacttccagaacccacacaaaagcacacatccacgtttcccttgttttagaatatttggcccctttctgccccaaggatgtgggggtcaaagccccggggctcccggccgaggagaaaggaagcaggtggagtcccaagtcaggaggcaggtgctgctggagcaggtgcaggtgcactggtgcaggtgccgctggggaggacccgaccgccccgttttcccatgccctatacctctttaggccagatcctcaaagaagtatatgcataggaaaaaggaacggcgggcggctctgaggcgggccggctcttcagcactgggaggtggctgtcctgggggagggtcccgtgccgggcagcagggagaagtcgggactgaggcctggtgggcacggagatcctgtgggagtgaggagggcagagccaagccagggccgagttcccagaggcaggccttgggcctcgtcttacctgtggtccagcctcctgggccgctggcgctgggtagcccgtgagcctcgtgagcctgggaggagcggtggagaactctctgagccgggagttctgctgctgccgagcgagctccacatttatgcgcaggggagaccttggccgccgctgtcacatgcaaccagagggctgctctgtgccaaggaccccgtcgcacccccgcacctgccagattggggcacaaagacctgctgtgagaagagtgctgagccagggcccgccgggcgggcgggcggcgagggctgtgggccgggggctgctggcccgggagctgggatggggccagcctgtccccccgcctcctccaacccttatctccccacgcgcttctgcttgcgtcaggggcccggaaagcacacgtgagcaagaatcgcttgtccagggaaggggccgactctccttcctgggcctgcccagctcagcaataagcagcaccttgggctgcacccgcagcctcctggctcacagggactctcagaacccccagccagcgtgtccaacactgtcctggccactgggaaccagaccccacccccagggtaggtggccctgcttggcctggggcggcctccacagctggggctccctgaggattcacggcatcaggcggacactggtccagtgaggcccagagccttccccgggccacagagcccgcgagcacgtggagaggggccacgctctgcagccttgggggcaagagtgcagggtcggagggagagggcccctcagggacagctggccagacccacagctgcccacacagagcgagaccacacaggcaggcagacaccctctcctagggccagggagcccccggccgaagggcccaggcaggcagcagaactcctgcaggtctggggctgtccctgtgtcccaggctcaggacacaaggaagaggcccagaggaggccagggcacagggcttccacaggtggccagggacagggcttctgaaccccagccagcggtctctccccaggacgtaggcaagtggaggctggtgaaggaacaaggctgaggcctcagaggcctcttcagtgaccatgtcctcggggagactcaacgtcgctaggcaggcccgtgcgggcgcctggccccagcacctgtgatctgtagggccagagtctcaggactgacccgacgcagcacccacatgcggcagggacacacagagacccccatagacacacgtagacacatatagactcacatagacacacacagagacacacacagacacacatagacacacacagagacacagacatgtagacagagacacactcagacatgtagacacacagagacacagatgtacacagagacacacacagacacgcacacaatggacccacacaccccccaggtgcagcgggccttgactgttgtacgcgagagtctcctgtcccctgagtggggaggggcgtggggggcatgaggggccaggtggggctgcaagactgtccagcgccctcctgatggcccccgaggcggccaggagccccgtctggggaaggacgagtgggccctgctgggcaggaggagccatagggaccatggggatgatggacgatggatgatgacccagccacctgccaggccactctgcagaccccccatgggagcagcctctgcccccaccttgtgcaaaccgttgatctgcacgccaggccaagcaggtgattgtcacgaccagcgatggccacagaggggtgggggggagcacatcagtcggtcacaagccctcctggtggggacatggggctggggacaggccctgctcagggctggtcccccacaacgaggcccagagtgggcacggggggctgctgggctccatccacctgctggcaggctgagggttgccttctgggggaggagggaacgtggagctcagacacacgcatgctcacactcaggctcacgcacactcctgcaggcatgctcacatccacacacacgtgcatgcacaattcacacactcaggctcacccacactcactcctgcaggcacgctcacatccgcacacgcatgcacaattcacacacttatg

SEQ ID NO: 1884111 - DNA, 4001 bp, Homo sapiens
tgttgcatgaatttgagaaactagtgcagattaccagtccttcttcaaagggaaagattattttctaaatctccaaataaagctgctttgtgcttcaacctactgtctcttcctggagtcagtatactgcaatgcttttatcttcactctgtgatgtcagcataaagctgcaaatagatgtttctaaactgaacatactaagcaatcattagctatgctgtcactgcatagcattaaaggacaactctactttatgggtgaaagaactaaaaggttagagtggtcactgtgatacacaccagccaaccctttccgttagcaataaataggactcaaaagccaatgacacactatggaatctccactgtttaaagaaaccttaagtttatatgcagttattctgaatttaacagggcctttaaaaaacaaacacaatccatgcatttccagggagaatcttcagtaatcatacgtttgcctattatgctgtaaaaagttttaattcttaatactgcaagattcgtgatctaatatcttcactgcattaaaaataacatgaaaagaccagaaataaaagagaaaaatgaacctagccaatcattactgttttttatttgtgtaatgttggataaagaattgaagttacacagggaacagtgtacattacacacagagatagttcagtttcactatcaatctctcttgaacctgaatccttcccacgagatgaacactcggtaaatattaaggtgtacttgatagttgggaaagccacacccacaactagcatacctaaatagataatagcagattaatttcttctgaatgactaccagcacacctcttgaaaccctgatttactgaacaccttagaagacaacacccggcctatcgttttggaagaaaaaaaagctgggcatcaaaggaacatgacacacatgcagagaaaacggccaagtacctgggactgtactgcgtatttttactatattctctcttctgatttccacaggtaacaagattatcaagtgaaagaagtaggattctaatccagatgttctgactcgaaatccaggactttttcctctaaacaaaatcaagatgggaatattaggtgaagttgttaaactgttaacagctaagcaatactcacacctgcactgtttcccaagattgctacttagggacacgtagaagggtttttgttttgtttttgccatttttcattactgatggagacataaatctgaaaccccttccttaccaaccaaggtttatgaaatgccttgacgtccttgaaagacaacataaagaacagtatccaccactccaaagaatcacttctaaggaacttagaatcacagtaatggaagtgtttggaagagggtaacaagtcttcacaacagtaaatataaaacacccacatacagtcaacttgagacgaaaaacgaaataggcgattgagtctaggaaagattctcgagcaggtagggcttggctgcagttcacacgcagcccaggcaatgggctcgaattcagacgctctcgaggcacagcccccacgacccccgctgacccctctttgccacctccaaggtcccggaaccgaaggaggaaggcagggagaggaaagggcttgaaacccgttccccagccctccccttcctccgcgccctcaaaggagccaggcggggagcccgctcgacctcgacctccacctcgcactcgccctcgcccccgccacggaacgtgcaggaaggagcggaaggctggcagccccaccgcaccgccaccgcgactcaccggtgtgccccgagtacccctcagacacttaccccacttatccaagcctcaggccacgccctaacaaggctgctggagctctggctcaggggccaacttttccatagcggggtccaaccagccaagagtgggaggaaaagaccgcggtgagaaacacagccgacgcctcactcagcggccgtttccccaaacccctgcggagctgacacatcaacaaagatggcggcgacactgaagccggcccggttacagctgagggggcgggggctccctggaggaaccaatcagcgcagcgcgggcggggtgacgcagcacaccttgaggtcctgggtaacctgtctgcagtgggctgggctggcggagctcacctcccacctcccggcccaggaggccccaccttgcggcccgagaggccccgccccgcactccgcctggctgggcacccacgcctccgcgacctggagagccgggtctcctgccctttggtcgggttcttcctttcaagctcctccggacccacgcagcctgtttctttctgcaggacgctcttgttggctattactcctcctcaccctttggcctgcatgagtcagggacataaagcaataaaagagaatttgaaattgtggcttcccggctctcatgcggaaaccttgcaccttacgtgggcggagtcggctggagcaggctacgatgggggagacctctgggggttccataacagcgcgttcgtgtcttcagcgtggcgctgctgccattgtttaataataaactgtcggtgccttcgtctctggcttcaagctgagcgcattgatggtaggaagtgtcctctcccggctgagtaacctggcacgcagcatggcaacaaaaagtgtattgggtacagttgcctcgcccggcccagagaaggaaggtcagcagttcagtctctggaggtttcgcaaacctcctcagtccggggaaacgatgttctttggtttaggtcttacacatatctcatgaatgaaaatagctgatgcagacgattctgcaatgtaagaatttgtaaagcaaaacttactactgttctgttaagcgtcttcgatactgttggcaaaacacacacacggaggtgtaatggcacctcactcctccttaaatgaaggtactacactgaagcacattttgcagttaaagtgtcttgtcatagaaaataaatgatttgactttaaaacaataaatcgaccaagccttcctagggagacattaatccaaggggaaaaaactgaagaaaccttaagctgttttcggtactcgtcagtaataacataggtattactatttctgaatatttctgaatttataattagtataaagtatataaatatatctttgtgaaccaagtttttcaccataagagaaaagaaatacaaatataaaccaaagacattatattaaaattctgcaatcctatatttgaatttacaaatatcagaattaactcatggtacatttttttcgtgaaaaaaaaggtgtgtccactgaaaactcttagaacagtgaccaacccattgcacactcctattccccagattgtgatctctaaagagcattgcccaaaaaaagttaccttggcttctcttggaggttaagtgctgattcccagtaggggcaagaaatatgcaagatagcctaggacatattgcttgtagcagaaagcaaggaagaaaagcaaagataacatgaactgtacccaaaagactcagaaggcagttcaaagatgccccaacttctcaaacaggacaaatttagcattcaaaaataataacagcaactggttgagacgcactatgtaaaaaaatcagtgagtgcatttattttttttaatgtcattgaccctcttggaaagatgccaacaagtcattacaatctgagaactgataaagaatcaagcattcatcctacctttcctgttgcaaactgaatgtcaatcaaatagtcaatgtggggaagctcttctctgtagaactccatgtaataattgcagaaagaaagatagatgatcaccattttgcaaaccctgatgaaataatggatctaggtaatggtcatctgtgaatctagaaccattagatgaaaaactgataggaagcttcgtattgtaatggatggatggggctggcaccacttgaacctactagatcaatcttaatatcctc

SEQ ID NO: 1884112 - DNA, 4001 bp, Homo sapiens
ctgagaggccaaacaaggccctaccatgggagatgaggacgtgctgagccgccactcccttcctaagcctgtgtccacctggcttccaccctctcaccctgcagaagcggtgctggcccgcaggttcctcctgcactcagccgctctggccacaggacctttgcctcgcacttccctatttggacatgctcctgagctaatggtactgtctgctgcctcactcccctcaggctgtctcactcccctcagtcttggtccaaatgtcccctggagtgaccatcctgtgtgcaaccacaatcctccctcccggtccctgactccctctcccctctctttttttttttagatggagtctcgctctgtctcccaggctggcgtgcagtggcgcgatctcagctcactgcaacctcacctcccaggttcaagcaattctcctgcctcagcctcctgagtagctgggattacaggcacctgcctccacacccagctaatttttgtattttcagtagagacaggggtttcaccatgttgtacaggctggtctcgaactcctgaccccaactgatccgcctgcctcggcctcccaaaatgctgggattagaggtgtgagccacctcgcccagcccctccccctcctctttcctgagttattttcttcttggcattcacatccattgacacatgcagcgttcacctgctcaccaacccagggaggtcaccatgacctcctaccagccactcaaagcatctaccaaggaccaagccacacaggcttaccccattcacatgtaagctccatggccgaggtttgtctgttttgttcactgccgcagcctctgcacttacatccgcccctggcctactgggcactgctgaaaggaccgaagagcttatggaagtgacttcagttgcatcataaatgagggtaggcacccgcaggacagggcagcccatcggcctttcaattacatttcttgcttttctctgttcttatttctttctttctttctttctttcttttttctgagacagagtctcgctgtgtctcccaggctggagtgcagtggcatgatcttggctcaatgccttccagttcaagcaattctcctgccttagcctcccgagtagctgggattacagacacccaccaccatgcacagctaatttttttgtatttttagtagagatggggtttcaccatgttgatcaagctggtctcgaacttctgagctcaggtgatctgcccacctcagcctcccaaagtgctgggattacaggcgtgagccaccgtgcccagcctcttcttcctttttttaaagacaaggtctctttctgttgcccgggctggagtgcagcggtacgatcaaggctcactgcagcctcaacttcccaggctcaggcaatcctcccacctcagcctcccaagtagctggcactacaggcacatgcctccacacctagctaattttttaattttttatttgtagggacaggatctcactatgttgcccaggctggtctcactctcctgggctcaagcaatcctcccacctcagcctcccaagtagctggggctgcaggtgtgtgccactgcacctggcatacatttctcgcttttctactgaatttcctcagctaccagatccgcagccctcctctattcatgggttcggaatgttcctcgtgcaaacgtcccagagagatttagcccttgcaggtggctagttatcgtgatgccttccaccctcctaccagacgcttcctcccctgctgcctggcttggggagcctccatggaggctcagaggctccacagcagtgtggacgggtaaagcctccagcaaggcttctgcctcacttggaccacctagaacttgccgcaggacctgaatcacactggagaccggctgcaggaactgttccaggcatcagttcccactgcagagcctgggaagggagctgtccggctccccaggctctgcagtgggaggtgatgcccggaacaggcatctcaaaagtgtgggtcaccacccattagtggccttgaaatcaatttactggaataagaccagaatctttcttaatgaaatggaacagactagaaaacatcagcatgtacagtattgtctgaggtgaagtattgtttcaggacattttttgtctaggcatcaaggcagaaactatcaaatcagaatttctggggcatcaggttttttttttttttagctccccagttaattctaatgtgaagccaggaacaggagctgcaggagggcggttctgtccttccgagaaacaaggcgtccccaccacggctgtgagccagtgcctgccgcccgacagccacagcactgtggcactgaggaccagctttccctgaagtccgcctgcatcaaacaggtctaccccatgcctaggcaagaccttcctctttctcacttccttttgaaagtccacacttctcagggagcggggagggtaccctcccgacttcccgtttgcccctgcctgcctgattggatctttctccactgctgtggctggacaagcctctgggacgacttcagcagcctcaggagaggacttccagaatctgatcgccaggggtcagtatctcaagcagacagtcacgacagcagaccaactccaccctaagaaagcacagttgtcagtcacccctcaaacagaggtagcaccccagtgtcctcaccaatgcaaggggccacagcctctgggaaatctgcttcttgcttctctggccgaggactggggcatacaggacctcactttctgacaagtgagtgttgaagcccaggccagggggaagtgtgtttttgaactgtcatgtcagagcaccttccggagctacagctggaaaggctgcttgcggaagtgccaggacgaccaaaccccgctgctcttcagacaccttgtggctgccccaaccagaaccttggatgctcctggggccacgccccctagctcagacccgcacacaagataccaccaagactcatacacactgccagtggggagctacggtaagtgggatggtgttccacagactggggctccctccctgtgtccgtctccctgctgtcctggtccaccgtctcaaccgcccagctggaaatcttggaactcttcccctgccgtcatgaatgataggcaatttttgctttttgttgttgttgttctgagactgagtttggctctgtcgcccaggccagggtgcagtggcaggatcttggctcactgcaatctccgcccccccaggttcaagcggttctcctgcctcagcctccggaatagctgaaattacaggtgcccgccaccatacctggctaattgttcatacttttagtagagacggggtttcaccatgttggtcaggctggtctcaaactcctgacgtcaagtgatccactcgcctcggcctcccgaagagctgggattacaggcgtgagccaccacgcacagcctgggtattgtctttattttaaattacgcatggggaaatgccatcatctttcagcatttagggtttataaggatttattattattgttatttttgagacagtctcgctctgtcgccccggctggagtgcagtggccacgatttcagctcaccacaacctccgcctcctaggttcaagtgattctcgtgcctcagtctcctgagtagctgggattacaggcgcccaccaccacgcccagttaatttttgtatttttagtagagacagggtttcaccatgttggtcaggctggtctcgaacgcctggtctgaagtaatcctctgaccttactcagccgtccaacgtgctgggttacaggcatgagccaccgtgcctggcctataaggatcttaatgtggctctgcaactactcattccaaaagaaaatgacagattaaccaagtagaagaatttatgaaacacttgctaccaccaggtccaatataagcatgaggtatagaccgtaactcaaatagctctcca

SEQ ID NO: 1884113 - DNA, 4001 bp, Homo sapiens
ataaattcttctacttggttaatctgtcattttcttttggaatgagtagttgcagagccacattaagatccttataggccaggcacggtggctcatgcctgtaacccagcacgttggacggctgagtaaggtcagaggattacttcagaccaggcgttcgagaccagcctgaccaacatggtgaaaccctgtctctactaaaaatacaaaaattaactgggcgtggtggtgggcgcctgtaatcccagctactcaggagactgaggcacgagaatcacttgaacctaggaggcggaggttgtggtgagctgaaatcgtggccactgcactccagccggggcgacagagcgagactgtctcaaaaataacaataataataaatccttataaaccctaaatgctgaaagatgatggcatttccccatgcgtaatttaaaataaagacaatacccaggctgtgcgtggtggctcacgcctgtaatcccagctcttcgggaggccgaggcgagtggatcacttgacgtcaggagtttgagaccagcctgaccaacatggtgaaaccccgtctctactaaaagtatgaacaattagccaggtatggtggcgggcacctgtaatttcagctattccggaggctgaggcaggagaaccgcttgaacctgggggggcggagattgcagtgagccaagatcctgccactgcaccctggcctgggcgacagagccaaactcagtctcagaacaacaacaacaaaaagcaaaaattgcctatcattcatgacggcaggggaagagttccaagatttccagctgggcggttgagacggtggaccaggacagcagggagacggacacagggagggagccccagtctgtggaacaccatcccacttaccgtagctccccactggcagtgtgtatgagtcttggtggtatcttgtgtgcgggtctgagctagggggcgtggccccaggagcatccaaggttctggttggggcagccacaaggtgtctgaagagcagcggggtttggtcgtcctggcacttccgcaagcagcctttccagctgtagctccggaaggtgctctgacatgacagttcaaaaacacacttccccctggcctgggcttcaacactcacttgtcagaaagtgaggtcctgtatgccccagtcctcggccagagaagcaagaagcagatttcccagaggctgtggccccttgcattggtgaggacactggggtgctacctctgtttgaggggtgactgacaactgtgctttcttagggtggagttggtctgctgtcgtgactgtctgcttgagatactgacccctggcgatcagattctggaagtcctctcctgaggctgctgaagtcgtcccagaggcttgtccagccacagcagtggagaaagatccaatcaggcaggcaggggcaaacgggaagtcgggagggtaccctccccgctccctgagaagtgtggactttcaaaaggaagtgagaaagaggaaggtcttgcctaggcatggggtagacctgtttgatgcaggcggacttcagggaaagctggtcctcagtgccacagtgctgtggctgtcgggcggcaggcactggctcacagccgtggtggggacgccttgtttctcggaaggacagaaccgccctcctgcagctcctgttcctggcttcacattagaattaactggggagctaaaaaaaaaaaaaacctgatgccccagaaattctgatttgatagtttctgccttgatgcctagacaaaaaatgtcctgaaacaatacttcacctcagacaatactgtacatgctgatgttttctagtctgttccatttcattaagaaagattctggtcttattccagtaaattgatttcaaggccactaatgggtggtgacccacacttttgagatgcctgttccgggcatcacctcccactgcagagcctggggagccggacagctcccttcccaggctctgcagtgggaactgatgcctggaacagttcctgcagccggtctccagtgtgattcaggtcctgcggcaagttctaggtggtccaagtgaggcagaagccttgctggaggctttacccgtccacactgctgtggagcctctgagcctccatggaggctccccaagccaggcagcaggggaggaagcgtctggtaggagggtggaaggcatcacgataactagccacctgcaagggctaaatctctctgggacgtttgcacgaggaacattccgaacccatgaatagaggagggctgcggatctggtagctgaggaaattcagtagaaaagcgagaaatgtatgccaggtgcagtggcacacacctgcagccccagctacttgggaggctgaggtgggaggattgcttgagcccaggagagtgagaccagcctgggcaacatagtgagatcctgtccctacaaataaaaaattaaaaaattagctaggtgtggaggcatgtgcctgtagtgccagctacttgggaggctgaggtgggaggattgcctgagcctgggaagttgaggctgcagtgagccttgatcgtaccgctgcactccagcccgggcaacagaaagagaccttgtctttaaaaaaaggaagaagaggctgggcacggtggctcacgcctgtaatcccagcactttgggaggctgaggtgggcagatcacctgagctcagaagttcgagaccagcttgatcaacatggtgaaaccccatctctactaaaaatacaaaaaaattagctgtgcatggtggtgggtgtctgtaatcccagctactcgggaggctaaggcaggagaattgcttgaactggaaggcattgagccaagatcatgccactgcactccagcctgggagacacagcgagactctgtctcagaaaaaagaaagaaagaaagaaagaaagaaataagaacagagaaaagcaagaaatgtaattgaaaggccgatgggctgccctgtcctgcgggtgcctaccctcatttatgatgcaactgaagtcacttccataagctcttcggtcctttcagcagtgcccagtaggccaggggcggatgtaagtgcagaggctgcggcagtgaacaaaacagacaaacctcggccatggagcttacatgtgaatggggtaagcctgtgtggcttggtccttggtagatgctttgagtggctggtaggaggtcatggtgacctccctgggttggtgagcaggtgaacgctgcatgtgtcaatggatgtgaatgccaagaagaaaataactcaggaaagaggagggggaggggctgggcgaggtggctcacacctctaatcccagcattttgggaggccgaggcaggcggatcagttggggtcaggagttcgagaccagcctgtacaacatggtgaaacccctgtctctactgaaaatacaaaaattagctgggtgtggaggcaggtgcctgtaatcccagctactcaggaggctgaggcaggagaattgcttgaacctgggaggtgaggttgcagtgagctgagatcgcgccactgcacgccagcctgggagacagagcgagactccatctaaaaaaaaaaagagaggggagagggagtcagggaccgggagggaggattgtggttgcacacaggatggtcactccaggggacatttggaccaagactgaggggagtgagacagcctgaggggagtgaggcagcagacagtaccattagctcaggagcatgtccaaatagggaagtgcgaggcaaaggtcctgtggccagagcggctgagtgcaggaggaacctgcgggccagcaccgcttctgcagggtgagagggtggaagccaggtggacacaggcttaggaagggagtggcggctcagcacgtcctcatctcccatggtagggccttgtttggcctctcagctggagacaggaaggcctgggagggttttggtggaggtgtgggctgaattaattttttttttttttt

SEQ ID NO: 1884114 - DNA, 4001 bp, Homo sapiens
tcccagcattttgggaggccgaggagggtggattacgaggtcaggagatcgagactgtcctgactaacaaggtgaaaccccatctctactaaaaatacaaaataaataaataaataaataaataaaataaattagccgggcatggtggtgggcacctgtagtcccagctactcaggaggctgaggcaggagaatggcatgaacccaggaggcggaggttgcagtgagccatgaccgtgccactgcactccagcctgggtgacagagcgagactccatctcaaaaaaataaataaaaaataaaattagagataaggtctcgctatgttgcccacactggtctcaaactcttgggctcaagcaatcctcctgcatcagcctccttggtagccggaactacaggcatgtaccaccatgcccccaaaattttcacaatttctaatattattttggtgtaattaaagaaccaagaagagaaactgagaaaaagctctctcctaaaaactacatgatatcaaaataatacgtgcaaaaaaaaccctatatgctatgtggcacagttttggaactgaacagtatcagagagattccttgattactatagtaagtaactggatccattaaatataaatttaagcatgagttttttaagtgacaatagaataattttaaaagtcacagtaagtacacttatccaaataaacctttaccagattttatatattctgtattgtggaaaagttttttctaatataatgttcctatcactatgtattctccagtccattccttttgttggcactcacaccctcaaaatatttaccaatcatttgttatttactaaagtaaaaaaaaaaaaacgttaaatcaactactcatatttccataaaatgtttttatctgaccaactttatattaccaacatgaaataatggtaattacaccactgctaaacatgaaaagtaaatactatacagaactagattccaactgagaaaatcaacttcacaagagaccattttacattggtagcaagattaaagtcttccttaagttttgtagactgtgaattttcaatagtcagtttgctgaacagattttagagaaaaaaagatacaacaaaaataagcaaattcatatatttaaaaagaaaatctgctagttcatatcttggtgctcactccaaaaaatgaaaacaaaaaccaaaatctgggaaaaatcagtctttgtatattaaatcatgcttcttggtataattaaaatatgccctctgtttttaaaaaagattttagttacctatttttgactctacctccccaacctataacatccaatgaagactgactcttagttccataataagtagtgacagccaatataattggcataccctgagtataattcgtcctcacaaactgtccttaatgattaactgaaaatctacttaatggctgacataacttttgatatctaaactggaacaaacttgataacctaaaatgaggtagaaagatacatttaccttgtttcttctccattatctatctctgattcaaagactaatctgtgtcactggaaaatgacattctttgtttttcagcataaaaaccacttaagaaggccctgttgcttcccttcaccctaaaacactgcagagagtgccctgaaatatttgaaatgttgaaaagctgaacctacaaatgtcaaaacacaaatgtatatttgttattgggaatgtttttctcaacaaaaattgaaacattaaaaataataaaatctaattacttattttgtacttgtctttccttattcaggtctacataaactagaaaagccttaaaaatcttcataggtacttatacccaaggagagagactgctagaaaaactgagtcctgatagttggatttctctaaatactatatttacacagagagaaagatctggaagtgggagccactatatatagtaaaagtgtctcccacttccagatctttcttctgcagagcttcatggcagtctccaacctttaaatattctgctcatcaaagcacagattactgaaaagataaactcaatgaccaacctagaagctctgtatttacctgttcctggaaaacaactaaatggagtctcagtcagtcattcacctccagcgtaagcatgttatcaaaaacccaactgaaccatgacttatttgacagccaatcttacccctgctttacatgtacatgggtaagacatcagaggcttggaaaaagaggcaaaggggaggggacacctgccctgggccacagatctatgtaattcagcaaccttcaatcccctagcactcaaggggctctaagccactcctgtgagatttggggtgaaagaacacaataggacatttctatctgcttgcagagaatttttgcagtggcttttttttttaatctttcaatagaaagcatgaagtgtgtccatttctccaattaaagaagcgaaaaagcagcgacctattcaggacttcctttgaaccctattttagtatgagtttctagataactcccaatgtcatctgtgtttttgttcctctaatttatcttcatcaaacttgtcataagatccaatattctgatctctttggtaaaatccttactcctaccagtcctgggattgtttctcttcaaacttggcctttccctggtaattccattcttatctacttccactgggttctccagctaattccattcttatccctttccatttgtttaattagacccattcccttttctttctattattcaaacactcactcacatgatgttataaaaacaagagtaatgggctttgaaatgagtttaaatattacttctgctacctctgatatttaaataagtcactttgagtttcagattctccatctgaacaaccatttttccaggatattaaatacagattgaaatatgaaagtattttgattagtctccaagagtccttacaatcctaaaattccatgtgcttttaattttagctatagaaaaatggggctggtggaaagaataaaatcatacacgaaaagaacaccgaggaaagcagagaagaaagtaaccaggaaaagactatagaaaagtcatggaagaagaaaaaagactctaaaaaaaaatgaagagtgcatgcaactaggcagggtactgctttgaagaaaaactaaactgggaagtcagtaaatagagaaatctataagaaatagcctctaaatatgattaatataacatatctatatgtagatattctccactaagagtaaaataattcatctataggattcaccaggtcttgcttatgaaacaaaaacctatgtcttgtggccacagctaagtaaggtctgctctaaaaactttggtaataaaaacaaggtactggttatcactttgactattaaacatattagaacaaagtcttggattaaccagtgttctaagggaaaactctaaaaagaggtaacatataacaaaatgtgactttgtgaattgatcccatctggacctgtaccttgattctagtgatgcacaggtctccatcaatctatgccttggggcaagagaagggatttgggagcaaggtaggctgatggcaaactcaagggtcagctactttttagctgtgaaatcataggccaattaatcaacctctctgaaccacatttgcctggttaatacaaagtaggtgatagtagcacagatgctttgcaaaactgtgtgatgactatgtgagataatacatattaagcacatgttgtctatcccagagtagaacactcaaaagatactggtttctttatattttctgagttaacatacatgttttaaaaaactggaaagtcttacctgaatatagactctacagaactcacatccactattaaagaaaaaaagtaaaatatattaaatcaacaaatataaataaaaaatacagaatattaaaaacataagagggcatgatggcacatgcctgta

SEQ ID NO: 1884115 - DNA, 4001 bp, Homo sapiens
aatactcaggactgggtaatttataaagaagagaggtttaactggctcatgcttctgtaggctgtacagggagcatggagctggcatctgcttggcttctgggaggcctcaagaaacatggcagaagggtaagcaggagcaggaatctcacttggtgggaacaagtgggggtaggcgaaggtgccacacactttaaccagatctcacatgaagtgaactcactatcacaaggacagcaccaagccatgagggatccgcccccatgacaaacacctcccactaggccccacctccaacattggggattacatttcaacatggatttgggtggggacaaatatctaaactatgtcaaacatatcttccctctgtctgccaggctggagcgcagtgttgccattatggcccactgcagcctcgacctcctgggctcaaaaaattctcccacttcagcctcctgagtagctaggatcgtaggcatacaccaccacatgcctggctcatttttacaattttttgtagaggtgggggtttgccatgttacccaggctgtcctttttttttcttaagatttttaattttagaacagcttagatgtacagaattattactaagatagtacacagagtccccatatagcccacagccagtctctcttcttattaatatattgagatggtacatttgtcacaatgcaccagtactgatgtactattactaacagaaatccatgctttattcaaatttccttagtttttccctaatatcctttttctctcccagattcctatgcaggatatcacattacctttagcactcaggtcttaggcaactctgggttgtgacagttactcagactttgtctgtgatgacctcgacagttctgaaaatccgtggttaggtatttcatagaatgaacatatgtttcttgagagcagggattttgtcttactcatcttacgcccctgtgtgtgatagggatctgatgtatgatagcacatcataggctcttgggatgtaggtaacaaaaaattggccagcacggtggctcacaccagtaatgccagcacttctggaggccaaggtgggtggatcacttgagctcaggagttcaagaccagcctggccaacatggcaaaaccccatctctacaaaaaataaaaaaactagctgggcgtggtggtgtgtgcctgtagtctcagctacttgtggggctgaagcaggaggactgcttgagcccaggaggtcgaggctgcagtgagccatgtttgtgccactatactccagcctgggtgacaaagtgagaccctgtctcaaaacaacaacaacaaaaatgcagtgtaaaagtaggcagtgactaataaacaaatgctgccttgggttgatttaaaaagtagagtactctgatcataggaaggcacagtcccatcagattcagcactggttagatcgtatctacaaaaatcttgtgaactgaattttaagtggaatggtgataaacccaagttttgccacaagctggtgatgggtccaggaatcatgttatatgagtaacaactgaaggaactggtggtgttttcacctggggaagcctaaggaaaggtaaaatgcttgtcttcccagatgtgagaagtcctattactgcaaagggcagaattaagtcagtggtccaaagtttctcacatttcaatgaataataagccagaatgttacaaacagagtagtgctgctttgagagttcctgagttcctagttaacagaggcccctgacatagaccagaaatgggatggaagtaatccttgaacttgggtgtaaacatcttccaattctcaagagcttctgaagctctaaagagtttctgaagagtttctaaaggttttatggacctgggacttgagctgggtgtagaaagaagggaaaagcttcagctagactagggcagtcatcaccccagtgttggcacaaagcagactgcactagcctggctgaagcccttcccttcttatattctcagctcaattgttggacagtgagggcagactcattgagaagttgtagaggaaataaagttgagtgagtagaatgaggttgagttacggagttttgaaagccagaagagaatacagactttgtggggtcagagatatcgctgaggatttgtgatatgatactggtgattttaggaagaatgatgattttaggaagattggttttagaaagaataatgattttagaaaatggtggttttaggaagaatgatctgacagtatcagggtaggttagtaagagaagatgggagtcagaaagctttctgcaataatgacaaattgagtaagaatggtacatggatatttaatggtacaaaggtaaaccctaagaaagaaaacaaaattgatagaattgagggatagaataaaggaaaggaaatatactaattctgttattacttataaaagtgaattacagatactgagatactggctaaatagaaaacagaaatactgattatacaatctgtattacaaagttaactacaggaacaaaaacacaaagctttctaattatgaaaagaaggaataaaacaaagcaaactttccatatagtaaactatactttaaaggtataaatagcaaaagtataacaaaataatctgacagaactaagtccaaacatatcaaatcaataaatgaaaacaaactcaactattaagggaaaaagaacttcagactgaatcacaaagtgaaactcaaatctatgttgtatgagagacaggtctaaaataaaatgattaagaaaggttgaagatcaacgaaaaagtagagataccagaaaaactcaaacaaaaagcaaggatcaagatcttaataacagacaaggctgaattttggccaaaatgtattaaaccaaattttaaaaagggcactttataatgctaaaggttacagttcatgataaggatgaagttattaatacttctggatcaaataactgtagcaatattatgcacaaactataaaggttttacagagaaataaaagaaaaacatggggcagggtgcagtggctcacgcctgtaatcccagcactttgggaggccgaggcgggcgaatcacgaggtcaggagatcgagaccatcctggctaacacggtgaaactccgtctctaccaaaaatacaaaaagttagccgggtgtggtggcgggcgcctgtagtcccagctactccagaggctgaagcaggagaaagctccaggaggcggagcttgcagtgagccgagatggcgccactgcactccagcctgggtgacagagcaagactccgtctcaaaaaaaaaaaaaaagatggtaggtaagaaactaatttatttctctaagtccatgacagatcagtaacattaaaaaaaaaaaaagcaaggatatacaaaaccctaacacaccattatggttcatctaatggacacatattagatattctgagaaggaaatggtgcagacctggaataacaaagacggcagagaaaacaaagtacaccgccagatgtacagagatagcctgtcacgcatgccaacagcaaaattctgtcttctaaagagtccttagataactgaaattgctttctttgttgacccatctaggtgcctgagatcagaatatccttactggcctctttgctagctaccagctaatctgcagcttatctagagaaaataaaattcatggtttccaaactgcaaaaacacttccacttttgcctttgttagatgaggtcaatccattactggatttcactttacacaacagtatactaataactgactatatttctgtaagttttcttggataatatcaaactctaatgtgaggttttacaaaacttgactatgtattaatccaccaaaaaactgcaacaattccaaaaagtagaattactacagaagacatattctgatgaaaatgtgactaaaaagaaatatgtaataggaccaaagaactcaaataatc

SEQ ID NO: 1884116 - DNA, 4001 bp, Homo sapiens
ctatgcaggctgtaacccctgatgagaaataaatctctcccttccaaattaataataataataaaggaatacccattgagttctatataattaatgggagtaaaggtataaaatacattcttccaggtagaaggtaaaaatgccactaggttcgggaacgatctggctaagggttcagcggcctctaggttacctcccaacagagagacctgaggagggcagggatgagccaggctgggacactggaccagaggctcagtgtgggttccaaagtgggccctgaaacactcctctgtcctctatgggaatccaaccctcagccctgcccctccaggggcatcactcccatcccacctggcctcacccatcatttcaaaaatgtccaacaacccctgcttgccttgagagctagcctgggcctccagccatggagctcctggccaacagcgccacctatggctggatgtgcgcaggagatgggacccagaggatatgctggcagatgaattttttggtgagctagctagcctctttcctcactccctggtaatcacatttctgtctgatatctgtattcgacagtgacctctgggggacaaaaaagaggcagcagccagcttcacaaagtgctgggctgcagattcaagtgctatcagaagcacttttgttcccagtttggacccaaggcctcttccaccaaggaatgcttgctgaagcatggagtttgttctcctacaggcaatttctctgttgtctgaaattgctaaattccactttaggcagtgactcctgttaatgatgagaacaataacgggaataaactgcctcttatctgagggcttcaaagtgctttataaacacaaacccttattattatgactttatatttatagacaaggcccactgcaggggctgctggctgcatgtacagcaataatcctgaaattaattcatccatctccaccctttcccctgtcctcttaaccctgccaaagcaatgggatatgggggtcacaagaggatggcagcacccagggctgcgatgggggagtctgggagctaccctgcttccctgtgggcctcgtgagcctgagggagatggaaggggagactggcaccacatcacctgaggagatgcacaaggagctgtgtccccattactgcatgtaaagcaagagatgggtgggggcatccccatgaggcatgttgaatggcttcacagcttgcagacaggtaacttataaaacctcccatctcaatgcccaaatctattttgtgggagttgtccctagactgtattctctctagcccaggtcaagattgattcatttcagggtcattcccttcaggcctcacacagggcattgttctcctgtgatcagtcagggctccagaaacctaaatgagatcaatgcatttccaaaatggaaatgcactgtggccaccttctgtcctttcaacccctgcagtttgcctcccctctaggggaccacaaagggaagttgagtaccccttttgaagcattatgcaagagacttccaagcggcccaagcatctgccccactgtcagtctggggagggattaggtttactgctgcccagtctgctttaaactgctgtcaagtactgctttaaaggactgtcactcccacttcagacaggggtgccttccaagctatggctccctgccagctctgacagtgatgtcaccaggccacccttaccaaggcctggctccagtcaggagaccaaggtcataataacctttcagcagaaccacctgagaccacaagttaatggtcctgtgatttccctcatcatctcattcattcaacaaatatttactgagcccctatctatgccaggtactatactagatactcattcaagtttctcttccccgatggagctgattacattattcaggccggtcctgcagagaggaagcccttccaatacctgtaagcagaagggcttcctctctgcaggaccggcctgaataatgatcctaacgccagatcaaaccccaccctacaccccgctcatacacaagcacacagggtgccttccacgctactcacttcttgttggttgttctgacaatgatgcagcgctccttctggtccacagagacactatagacatccttaggataggggaggtttcgaatccgccactggaaactcatcttggtgtccttgcgcatgaagataggctgcagaaggcaaatccaactcgaggactgttcctggggaagggaaggctccaccctcatcagagcgctaccccggggcacaacaagaccctcagctcttctccactgctcccctctgacgctgctattgctacagcactccaggccctgagcccccgccctgggacgatcaagccaaaatgtctgtattcattcaaacaaacatttatagagtgctgtgtccaggtggcacactggaggcgaggaggtgaacaagacatggtccctgccctcaagagccagcagcccacagcccacccccacctcagtccgtgcaagacacctggacagatggacgtacattggcattgctttccttgatgagttcaggccccaggttccctgctcctaggggcgctgggtctcctacttcaagctgccactggcccatggctcccagggcacttttcacacgccactttctcactggggagagaagcaagcatcgggatgagaagcaagcatcaggatgagagtgaagagagggtctctgctcttttctgctgaatcaccggcaccacactaggtaactagcacaagatgaaagtgggagtgttgggcctttactctcagctttgttaatctaaggagggacctcacaacttctgaaatttcagtagagcatttcaacattagacaaccctcaaagcgcatctcatgggtgctcaggcaaaaggaactggaatgaagctctgagaagagccaagtggagtcaagaaaccctcaggtgtggcttcaagcaaggagaagatgtgaagattaggaaaagggttgtttctggtaatggagaaaatttggatcccaaaaaggagttgaagcacactttttccctcaaaaacatgcagaggaaaaaataattaagagggtgaaagctgttcggcaggtctgtatcatgattcagaaagtccaaatatagaaattcactcttttcaggtataccttgcttaaaaaaaaagaaaaaagcaaaaacaaaaaaacgctccaaagctgcatttaaacaaaatcgtaggcacatgccatattttaaatgcacggtttataaaagatctaatgtgaattttttgtaaaagggaatccttctagaatgcaaataaccatctctattttaccttgtttcataacccagatgcttgcataagattttaaggcacatatattatgaaaattataaatcaagaaactagttgaatggactacctgaaaacccctgctgagattttcattttcaggaaccatgcggtccatcactgcagggggatcttttctgagccatgacctcctatcccccagttcctttcccttcctgctgcatttggaatccggggctgcccactatggtatcctccagcctgaggagcccagctggtgctaaagaccagcagcctctgtagctgtttaaggagctaaacaactcaaaaagtgcacagtactcagttacagttgtttctgtttgtgtctttttccaggtaggagttgagagctacagtcaggttctcagcactaggcagccggcggttttactttagaccttttgagcagctgtgtcaaatccaaacgccctcaccggtataagtaaggcacacaagctgaacacaaaagtgtgctgtaaaattagaattttcccttaaatatgtgcttttataaggtctgctgcattctgcagtgtgattttattacctcttagggccaaaaattctccctagaaacacatttccaagtttataatgaaaattaataaggaagagta

SEQ ID NO: 1884117 - DNA, 4001 bp, Homo sapiens
acactgcagaatgcagcagaccttataaaagcacatatttaagggaaaattctaattttacagcacacttttgtgttcagcttgtgtgccttacttataccggtgagggcgtttggatttgacacagctgctcaaaaggtctaaagtaaaaccgccggctgcctagtgctgagaacctgactgtagctctcaactcctacctggaaaaagacacaaacagaaacaactgtaactgagtactgtgcactttttgagttgtttagctccttaaacagctacagaggctgctggtctttagcaccagctgggctcctcaggctggaggataccatagtgggcagccccggattccaaatgcagcaggaagggaaaggaactgggggataggaggtcatggctcagaaaagatccccctgcagtgatggaccgcatggttcctgaaaatgaaaatctcagcaggggttttcaggtagtccattcaactagtttcttgatttataattttcataatatatgtgccttaaaatcttatgcaagcatctgggttatgaaacaaggtaaaatagagatggttatttgcattctagaaggattcccttttacaaaaaattcacattagatcttttataaaccgtgcatttaaaatatggcatgtgcctacgattttgtttaaatgcagctttggagcgtttttttgtttttgcttttttctttttttttaagcaaggtatacctgaaaagagtgaatttctatatttggactttctgaatcatgatacagacctgccgaacagctttcaccctcttaattattttttcctctgcatgtttttgagggaaaaagtgtgcttcaactcctttttgggatccaaattttctccattaccagaaacaacccttttcctaatcttcacatcttctccttgcttgaagccacacctgagggtttcttgactccacttggctcttctcagagcttcattccagttccttttgcctgagcacccatgagatgcgctttgagggttgtctaatgttgaaatgctctactgaaatttcagaagttgtgaggtccctccttagattaacaaagctgagagtaaaggcccaacactcccactttcatcttgtgctagttacctagtgtggtgccggtgattcagcagaaaagagcagagaccctctcttcactctcatcctgatgcttgcttctcatcccgatgcttgcttctctccccagtgagaaagtggcgtgtgaaaagtgccctgggagccatgggccagtggcagcttgaagtaggagacccagcgcccctaggagcagggaacctggggcctgaactcatcaaggaaagcaatgccaatgtacgtccatctgtccaggtgtcttgcacggactgaggtgggggtgggctgtgggctgctggctcttgagggcagggaccatgtcttgttcacctcctcgcctccagtgtgccacctggacacagcactctataaatgtttgtttgaatgaatacagacattttggcttgatcgtcccagggcgggggctcagggcctggagtgctgtagcaatagcagcgtcagaggggagcagtggagaagagctgagggtcttgttgtgccccggggtagcgctctgatgagggtggagccttcccttccccaggaacagtcctcgagttggatttgccttctgcagcctatcttcatgcgcaaggacaccaagatgagtttccagtggcggattcgaaacctcccctatcctaaggatgtctatagtgtctctgtggaccagaaggagcgctgcatcattgtcagaacaaccaacaagaagtgagtagcgtggaaggcaccctgtgtgcttgtgtatgagcggggtgtagggtggggtttgatctggcgttaggatcattattcaggccggtcctgcagagaggaagcccttctgcttacaggtattggaagggcttcctctctgcaggaccggcctgaataatgtaatcagctccatcggggaagagaaacttgaatgagtatctagtatagtacctggcatagataggggctcagtaaatatttgttgaatgaatgagatgatgagggaaatcacaggaccattaacttgtggtctcaggtggttctgctgaaaggttattatgaccttggtctcctgactggagccaggccttggtaagggtggcctggtgacatcactgtcagagctggcagggagccatagcttggaaggcacccctgtctgaagtgggagtgacagtcctttaaagcagtacttgacagcagtttaaagcagactgggcagcagtaaacctaatccctccccagactgacagtggggcagatgcttgggccgcttggaagtctcttgcataatgcttcaaaaggggtactcaacttccctttgtggtcccctagaggggaggcaaactgcaggggttgaaaggacagaaggtggccacagtgcatttccattttggaaatgcattgatctcatttaggtttctggagccctgactgatcacaggagaacaatgccctgtgtgaggcctgaagggaatgaccctgaaatgaatcaatcttgacctgggctagagagaatacagtctagggacaactcccacaaaatagatttgggcattgagatgggaggttttataagttacctgtctgcaagctgtgaagccattcaacatgcctcatggggatgcccccacccatctcttgctttacatgcagtaatggggacacagctccttgtgcatctcctcaggtgatgtggtgccagtctccccttccatctccctcaggctcacgaggcccacagggaagcagggtagctcccagactcccccatcgcagccctgggtgctgccatcctcttgtgacccccatatcccattgctttggcagggttaagaggacaggggaaagggtggagatggatgaattaatttcaggattattgctgtacatgcagccagcagcccctgcagtgggccttgtctataaatataaagtcataataataagggtttgtgtttataaagcactttgaagccctcagataagaggcagtttattcccgttattgttctcatcattaacaggagtcactgcctaaagtggaatttagcaatttcagacaacagagaaattgcctgtaggagaacaaactccatgcttcagcaagcattccttggtggaagaggccttgggtccaaactgggaacaaaagtgcttctgatagcacttgaatctgcagcccagcactttgtgaagctggctgctgcctcttttttgtcccccagaggtcactgtcgaatacagatatcagacagaaatgtgattaccagggagtgaggaaagaggctagctagctcaccaaaaaattcatctgccagcatatcctctgggtcccatctcctgcgcacatccagccataggtggcgctgttggccaggagctccatggctggaggcccaggctagctctcaaggcaagcaggggttgttggacatttttgaaatgatgggtgaggccaggtgggatgggagtgatgcccctggaggggcagggctgagggttggattcccatagaggacagaggagtgtttcagggcccactttggaacccacactgagcctctggtccagtgtcccagcctggctcatccctgccctcctcaggtctctctgttgggaggtaacctagaggccgctgaacccttagccagatcgttcccgaacctagtggcatttttaccttctacctggaagaatgtattttatacctttactcccattaattatatagaactcaatgggtattcctttattattattattaatttggaagggagagatttatttctcatcaggggttacagcctgcatagacattcttttttatttttatttttatttatttattttttttttaagagatggagtcttggctgggcgcggtggctcacgcc

SEQ ID NO: 1884118 - DNA, 4001 bp, Homo sapiens
ctgccagacttctgcgttgtccacacaactaaaggtttgctcctttaccatggaggcttggcgacagagagcccaggagccagaagccctgagcccgcccccgcaggaagctccctgcgcggcgttcccaggccggcatcgcccgccctccctcccccgagagcataggctgcgtttgtgggaaaccagggctcagcgcgctgggagggagtcaatttattctggagaaaacatctttgttctgcgagtgaaggggagccatttccaacaatttaatgctctgttcgcgggcccgggtgctggggttgcagcacgaggcttgttcttcgaggcagagccgcacataatgaggcttctcactactgctccccgtcatcgtgccaaaaaccagaacggttatttatccattaatctgacattacaccccctgcattttatctgcttaaataaatttggtggttagagtgtgtgcctggcggagaagctcccgcattcaattcccttcgcgccacggcgcgcaacgttgccattgtaaaccggccttggagtggcggggccgcggtgggccagctgggaaatgagacggcagcggggaggatcccgcctctcccagctcgtcagaatccaggcccaacgggacggttccccagacactgacttcggggttccagcgtgcagcaccaagtcacgtgggcgccgtggcctttcacctgcagaacaagccgcccccttcgccagcacctacaggcagcgagaacagaggccaaaccccgtcctagaccccactgcctgggctggaatcctgctgtgccactcactagttgtgggaccttgagatgtcacctcacctctgatgcctgtttccccacctccctccccctcgggttgtgagaattgagtcactatttataaagtgcttagaacagtgcctggtacatatcaagtgctcaataagagttggttttaaaatattaatttttaaaatctaggacaattgtttatgtttggaagtaggctttggagatgggctagaccactgggtttccccacctcaacccacttcactaagttaagaaaagtgggtttcatggaatatttcatttgaacaaagagtgccactgcttgaaaatatttggctcacattttgcagaggagcaaacagaaagccagagaggggaagggacttgtccaggagcctctgcaagttcacagcagagctgggagccgaatccaggctgcccacctgccgggtcaggtgttttattggcagcatgagctcctgggatgttcattcacctcattttcattgccagtcacgctgacccacagaaggtactgctgggcaccctcctctcccatcccagcagctgcagtaccaccccacgctggagctaagagcccagccccaccaacaggtgagacccatgaccctcagacttcaacacgccccactctggagcctggccaggccttttcatttgtccttcatttgttctttcctatcatcctctggttctctacaacatttccttggcccggaaacttgctggaacttcctgcctgtcctccctacatctgtctgccccttgtaccctgtacccctgccccataggctggagactaccccagagggaggaatcccaccaccactcagtcccttggatgtgggccccccttggaagcagttttgcccagctcagatccagcctgagctcaccacactctctaggagcccattcctgaacacctcccagaggctggccactccacctggagagcaaggtttccacaatcttctctggctcaggagggcctggcctgatgccccacgctgactgtggaggtaggttgggagcgaagtggtgagtctgtaaccagagagaagagccatgtcccatgcaggagccgctctgcccaggcagctgcaggcccagcccctgcctccttcagagcaacagagaggcaggcatgcgggcagacagacgcccaacacagagacctcccacacgctcgtctgtgtcaccgccgccccttcctggttggccctgcagacgaggaagccctccaacctgcagccaaattcactccttgctgacaagaggctcctagaggagaagggctactccccggcccccaggaaactctctgaacatagctatctgccatcaaggcctggatcagccaagcaggagctgcacttgcccagccttttccttcctagccacacttaagcaagacaagtggcatgggcacggagaggctcccctggccacacactgggcagggacagacctgggctactcatcctttctgagcagctagcctggcccaggcctgcagactgagtggcccaccctgcccggccccccataggcatgagctcccatacccccacctcaggcatggttccattataacaaattatcctcgttcacctcccactccacttctctgacggctccctctcttgactcttgtcctgcctttgtcccatccttgcccccgaccgatggctgctattgcaaaagtgatccgagttctgaatttcagcagcatttgatcatttcaactggacccagccctgataacctgtgccaggcactgtgccaagtgctttaaaatctaggacttaattaggtatgacccttctattttacagatgaggacactgaggcttgcccacaggcatagagctattaagtggcccagcgtggatttgaatccagatgtgtctgaatccagagccccaggtcttaccaccagccctgccacgtggctggcacacccacagatgtgttctcaccccatgagtaaaatcagacactcattcttgctcttgcagccatagaggttggagggaagagggctgagcccctcaggggatggtttctgcaagttctgttcagggatctgtcttccttcagtgccactaacactcacctgtcattgcaggcaagaggaaatcaacattttacagcaataaaaggctgctcctggttaggcatcaaacgaatcaatcttctctgacagttaattttcattttgcaactttccccagcaacaacagcaagtaatgaccctgaggatctgcaaagtcgctgatcagcagcccagcctcccatactcctgactcatccactgccctggctcagccccttgccacccatgcccaccattcacctcccccttcagccctctgagatccaggggtctctctgcccagtgacccctctcagaggctcaggtctaaacttccccgtggagcgctgagacaagaaacagacacaccagagctcacagttgaagccaccctgctggggtagtcactgaggaccccctggccaacagcaccattccatcctcgctgctcccacctcccacctcatcagtgatcctccccctcctgataacccatcatcactgcctccctaacacacctatgaccccagctatgactccaggacctgccaccaacccccaatgcacagcaccagtgacgccatcagaaagctcctccagcaaatccctctaattcctgcaaacctcctcccagagcattcacacacggcatccctgcctacccccaaattccatcaataaccccaaaactaccacatctgacccccaaatacaccatgccttcccagcacttctacacagctgaggagcccccaggctctgcacctgtccccagccctgccctaatctggttcgaggcttcctgatcttttacacaccacagtcagatgagaggattctttcccaggggagggccctcctgcccaactcccatgatcccaggtcagtgatgagtgtcagcccagctcagagccgccaggcccaattctccagaacctactctgtggcctggcaagagagataagaaaaggcccactgggcccctggactgtggctccatggtggcctctacaccaattgcagcagctttcacaggcttaggaaaccctcttggtcccctgaaccctgggattcacaggcag

SEQ ID NO: 1884119 - DNA, 4001 bp, Homo sapiens
gtggcacatgcctataatcccagctactcaggaggctgaggcaggagaatcgcttgaacccaggaggcgggggttgcggtgagtcgagatcgtgccattgcattccagcctgggcaacaagagtgaaactccgtctcaaaaaaaaaaaaagaaaagaaataaaaataatattaaaaatatatatttacagatgtaatgatatgctgtctgaaatctgcttcacaattaaacagcttgctcatgagttgataactgttaaggatgaataaaagggacatggggatttattacaatattctttttttgtatgtgtttacaattttccataataaaggaatttaaaaatcctactcctcataaacattaatattttcataaatttaggggagaaagcacatcatctctaactgaaagccgttactaaccttcccttctgagaatcttaactttcctgtgagttttaggtttccaaagttgtaggagagctcacaaaacacatggtactgtccctaaatgtgatgtgttaacatagcctgacaaaatgtccacccctaaaaaacttaaattactaatagcagaaataaaaaatatatatgtttgttaagatcaggtgaatttttttttttttttttgagatggagtttctgtcttgttgcccaggctggagtgcaatggcatgatctcggctcaccacaaccttcacatcccaggtgtgagcaattctcctgcctcagcctcccaagtagctggaattacaggcttgcgccaccacaccggtgtaattttgtatttttttttttagtagagacggggtttctccatgttggtcaggctggtctcaaactcccaacctcaggtgatccccctgcctcaacctcccaaagtgctgggattacaggcgtgagctactgcacccagcccgacatttttcatataaagagatttgttcctgtgaactcacttgctggagcaaaaaaacaatttagataatttcagcaggtaaaagttacagtatctcaaaagatgcattttggtgttttgtattttacttaccttctaaaagtataattatcaataatgtaaatggctaaccacttactattttgattctctttatagtgaacaaaactcctgaatgacgatttatttcagtactgatcagcagcaccaataaaaatttggcatccaaaaattatcagtaagatacaatagagtggtctaagttgacttcagatagttaagacaccataattagttttttaaatgccactcaataggcttagagcagatttccttccaaatgcataaaatgagaaaatactgaagacccaataaagagccttacagcagtcccctgccttatccaaggggatacgtttcaagatccccaggaatgcccgaaactatgttttttcatatacatacatacctatgataaagtttattatataaatcaagcacagtaagagattaacaaaaactagcagtaagatataacaattataacaatatgctataataaaagttacatgaccatggtctctcagaatatctcactgtgctgtactcgcccttcttgtgaaggtgtgagacaatacaatgcctatgtaatgagatgaagtgaggtgagtgacacatgcatcggaaggtcggcattgggctacttactactgaccttctgtattcctgaatatgtgttacagtccctgacttagagtaaatggtttggtgtcattcgtctctggggatcccttgctgagtcttcaaataggctcaatgctttctggcacagtatgttgccatcaagtggaacttgtctctgctcatgtcttccacccaccagtgtaatgccttttccaaattaactaagcacttattacacgatataactatcacttttacagattgagatttgacagcaaaactagtaagaatttctttcttcacaatttcttttctttcataattgtgaagaaaaagaaattcttattagacctgcttacagtaggtcttagcaatctcagtctattatttttttctttcctcattgagaactttcaacttttcgtgtaaaggaagcactctatggcagaagcctctctggtgtatccatattgctaggatcactactcctgtactttgggggcccttactaagtaaaatcagggtgacttgaacacaaatactgcaaaactgcaacagtctatctgataatcaagacagctactaagtgactaatggcaggaggcatccacagcgtagagatgctggacaaagggatgattcacgtctgagcaggacagtgcaagatttcatcacactactgaggacagtacagaatttaattatgagttatttctgaaattttccatttaatatttgcagaccccattgaccgtgggtaactaaaatgcagaaaacaaaactgtgaataagggaggcagggaagtggaataccatattaacttggcattattttccatttccataggtgggcccaaagctgccaatggtgcacaatgaccaaatatgttgccatcatttaatattaaaataagctccaagaatgcatctaaacattttcatcttgctgtatcaaatgagcaagccactggatgtaactaagaatgccctttcttatttggaggttaagggtgcaatgttttttgttgcactaaggtttgacccacagagctctaagtactccataaacaacatttccatcatgactttctggctttagaattcctatttttatttatttatttatttatttatttatttatttatttatttatttttgagacagggtcttgttctgtcacccagtgcagtggtgtgatcctggttcactgcagccttgacctcctgggctcaagtgatcctcccgcctcagcctcctgagcagctgggactacaggcacacaccactgcactgagctacttttttgtatttgtagagatggggtttcactatgttgcccaggctggtcttgaactcctgagctcaagcttccaccagccttggcctcccaaattactaggattacaggcgtgtgccaccgcacccagcctagaatttctagtaggttttttacaaaaacaaatgagttggggaaaaaagagtgaacagacatatggtgtgtgccaaaatgtatactgcaggaaaacatcttgaagtctcaaaaagggtgacacggtggggagtagggaatgtattcataatacaataagttacagaagccatttgcacccaggtgtggtggctcacacctgtaatcctagtactttgggaggctgaggtgggaggatcacttgagcctgggagtttgaaaacagccttagcaacatagacagacctggtctttaaaaaaaaataaaattatagtagctgggccctctggtaacatgcgcccgcagggagtcccagctactcaggaggctaaggtgggagcttggcttgagcaaaggagacttcaaggttacattaagctacaatggcaccaccacactccagcctgggccaaaagaccaagatcttgtcacaaaaaagcagctacctgcttccaaaaataaacccactgcaccagaataaaagacccctctctgcaatgaactttagactcccataagactgcacagcctatactttgtttcttaagttttcacatcgctcttatcagcttgaagtttaacgccattttcacttgctttctcattttttgttcaataatctagtcaacgaatttaagaaactgacatttttaaaaaaaactattctcatatatgtatccccgatctcaggtaaattagagaatttgaatttctgagtccttcatgactaggcaagcccatcgtgtatgaatactagacaaagctagaaccaaccagcctttacacaaattatcaaaacattgagaacaaattttttggctgtgtgcagtggcccatacctacaatcccagcactttgcgaggccaagatgggcagactgcttgagc

SEQ ID NO: 1884120 - DNA, 4001 bp, Homo sapiens
gcaacgcgcggacagagaggaccgtgccctctttcgcatgttacggggcgagggggctgttggcgtcaggagcgccctgggaggaacttcgtagcggattcgagagacagagggaattcagcaaacttgctgccccgggctgccggctggagcccggcagattcgctgcgcagcactgccccctggtatccagcgccgaaagtgcccccctccgcagctgcaaggctcctccctgggctgcgcgggacagattttttctcctttcctggctacacgcctaacagagaagctatcccgagggacctcaagaagtccccccaagccgtactcaaaagcctttctccctcctcctcaagcgctcacttccccaaagaggacccggacccctgactgcctgagccaggtccccagcatggtccgcaacccttctcgactccggcatccacctccaggctgacgtctacccgggagggggctggggacccaaggagacttcgactacaggcccaggcgaacggaaggaagaggcttgcgttcagagagacacgtttggagctgggactgttcattctttaaggaacaccagcttccagggcatctttcgttggcaccttggctttccagagaagaaaggaagtgggtatcagggccagcccctcctcgcaccccaggctggagaggtgccgaggtgcttagtcactcagtccaagggcacctgagagatgggggcaaacttggcaggagcttgagcacggaggcgtgatccgcggggggcgcaggcagggcggggcccagagcccccttccgccagcccagcctgccccttccaacccaacttgtctggcactggcttctacgggtgccgagaagactgctgtcgtgggcacagggtcctcgaccccaggacgtgcgtggcctttcccaccccaaccggatggtttgtcccaggctttgagactgagcttgatagagaggtaggaaggaagcggcgccagctccggagccagagtgggttggagtcccagcttggccaccctctagctgtgtgaccttgagtgagttacttcgcctctctgagcaccagtttctttgtttttttttttttcaggaatggtgtgaggattgaggtaatgtccttaggatgcccacatgtgttcagtcaaggtcggtcgtgatggttgccggcgtccgctgcaggaaaggcccccaggaatcagcttgtagggtgggcgccagccggtactgcacaggggcatcgcggcctccggttttagaaggggcagaaacagcgcagtgtcctcagccctgagggctgagtgttggaggtcccgacgctcctgggttctcttctgcccgggtgcagactacagcaggtgcgcagggcttcgcacacctctgctgtgggaagtgagtcatcttcgcttatgattgcatctggccaggccagctacgagaacactgggcctcacagctgccacgtatccagccttaacctgtgccaggcactgtgctaagagctatgcacccacaatcccacttcttcacaacagcctcgaccgaagtagatgtttaagtttttaaatttccattttacagagcaggaaacagactcagagaggttaacttcccccaagatcacacagctggtaagttggagagcggggacttgaactgaatcttccttggaggccaagctctgaaccactaagttgggtggcattagagagccaagctctcgcccttcggtttccattcacgctaccctctctgagccgcaattctctctcctgcgttggcactggcagaagttgagacacgctcccaggaatcgcgggccgtggcgcgtacttccacgcaccccagctagttccagagactcagcttgttctgagatcctcttgtcgagcccccttggtcccggcgcccggcctgtgtggtgctcagatcagacttatccacccgagcaccacgcagaccagcgcctggaccaaggtcccgggaaggaagccctcctccccttctcctgtggcttagctcagcgatcagggaggagccagttaagaagtcacagtcgaagccatgactgctgtgtcccggggaggcagtggaaggcgaggagcacggagcggggataccgccggacaacccctccccgccgccccgtcggcgtcctcgctgcgcaggggctcccttgctgccccaatctaaaaggaagccgtcgcggcccagggcacggtaactaaaaggccgtcggggagggagacgggaatgagtgggcttggacttgaggtttccgagccagctgctccctagagccgttcctgagctcgtcagccagcacgtatttaatgaatggccactgggtgctaggccttgcacgcaaccctttcgtcctcccccggggctgagccgagggtgacccaacactagtcggaacgagcctggagacatggcgccggggctgcgctctgcaggcctggcctggtcgctctccacgcacccctctctctgtagctgccgccccgcccggctctgcctgtgggcgccccctggcggcaggaagccgagcgcgcaccacgccctcggggctccatccccactcaccccggcgcctctagccgctccacccgcacccccagttcgcgctgcggcggccagcctcttccccgacggccgaccgaatgtccctcagagctttccgtgaccggccagggcgcgtggctgtccggagcccctccacgttccccagcagcaggcccggctctctctgatcagcgagcgcggatgccggtctcctccctccctctgccgggctccagcccgacgccaggccgctgggggcaagcgctgtgctttggaagaggagaaaagccccaaataaacaaaaacccaaagcccattcaagttcaggggtggagaactgttggcatctgaattttaaaaagatcgccgggactcccaaccaccaccaaacaccctcttgtccacccccccccgcccccgacaccatcccaccccacacaccccacgcccgcgtcccgtgaaccgaaccgccaatgcgccgcaaccttctcggcagtcacacctgtgtccccgatgccatctgcccacgtctgtgtgtgaagcaaaccccgctggcagacgggatggagagagatggctcctccaaaccagaattaggaggaaaaccccgctgagggcgtttcaaaaacccaacaggcgagcggggaaacctgcattgtcagacctgctgggccctgagttctagccccatgcaccgcgccgagctaattctcccggcgactctctgaggggttattaccacgtaataattgatgaggacactaagggctaagaggagtcaattaacttgtccctagttacagagttggaagtcagggatggatcttaactggtggggctgttccgagggcctgtgagagactgggtttcagcccagagcccaacacagcgccggtagagaaagtatcgggtacatttttgcctgctaatccggcggtaggaagtcaattacatctttgatgactcagatttttgaaacagccccatacaacttccaattacgggggcaaatataattgtgaaagtctatgggatttggagatgaaggagtaggccatcaaaacataacccagaacttaacttgttttggaaaaaaacattttatggaaaatttccaacatataggaaagaaaagagaatattatagtgaactcccatgcacctgtccccaacctccaaataacgaaggcaaatctattttatggtcaatctatttcctcccctccttcccacggactctgcctccccagctgtcaaaacctacacacacactgcttcccctattcacacagattatttggaagtaaaacctggaccttgccacacttaatctgcaagcatttcagcatgtactgtcaagagatgaccacattaccaaaactacaatagcatcaacacaaccacaataccaagatata

SEQ ID NO: 1884121 - DNA, 4001 bp, Homo sapiens
agaaacagcgcagtgtcctcagccctgagggctgagtgttggaggtcccgacgctcctgggttctcttctgcccgggtgcagactacagcaggtgcgcagggcttcgcacacctctgctgtgggaagtgagtcatcttcgcttatgattgcatctggccaggccagctacgagaacactgggcctcacagctgccacgtatccagccttaacctgtgccaggcactgtgctaagagctatgcacccacaatcccacttcttcacaacagcctcgaccgaagtagatgtttaagtttttaaatttccattttacagagcaggaaacagactcagagaggttaacttcccccaagatcacacagctggtaagttggagagcggggacttgaactgaatcttccttggaggccaagctctgaaccactaagttgggtggcattagagagccaagctctcgcccttcggtttccattcacgctaccctctctgagccgcaattctctctcctgcgttggcactggcagaagttgagacacgctcccaggaatcgcgggccgtggcgcgtacttccacgcaccccagctagttccagagactcagcttgttctgagatcctcttgtcgagcccccttggtcccggcgcccggcctgtgtggtgctcagatcagacttatccacccgagcaccacgcagaccagcgcctggaccaaggtcccgggaaggaagccctcctccccttctcctgtggcttagctcagcgatcagggaggagccagttaagaagtcacagtcgaagccatgactgctgtgtcccggggaggcagtggaaggcgaggagcacggagcggggataccgccggacaacccctccccgccgccccgtcggcgtcctcgctgcgcaggggctcccttgctgccccaatctaaaaggaagccgtcgcggcccagggcacggtaactaaaaggccgtcggggagggagacgggaatgagtgggcttggacttgaggtttccgagccagctgctccctagagccgttcctgagctcgtcagccagcacgtatttaatgaatggccactgggtgctaggccttgcacgcaaccctttcgtcctcccccggggctgagccgagggtgacccaacactagtcggaacgagcctggagacatggcgccggggctgcgctctgcaggcctggcctggtcgctctccacgcacccctctctctgtagctgccgccccgcccggctctgcctgtgggcgccccctggcggcaggaagccgagcgcgcaccacgccctcggggctccatccccactcaccccggcgcctctagccgctccacccgcacccccagttcgcgctgcggcggccagcctcttccccgacggccgaccgaatgtccctcagagctttccgtgaccggccagggcgcgtggctgtccggagcccctccacgttccccagcagcaggcccggctctctctgatcagcgagcgcggatgccggtctcctccctccctctgccgggctccagcccgacgccaggccgctgggggcaagcgctgtgctttggaagaggagaaaagccccaaataaacaaaaacccaaagcccattcaagttcaggggtggagaactgttggcatctgaattttaaaaagatcgccgggactcccaaccaccaccaaacaccctcttgtccacccccccccgcccccgacaccatcccaccccacacaccccacgcccgcgtcccgtgaaccgaaccgccaatgcgccgcaaccttctcggcagtcacacctgtgtccccgatgccatctgcccacgtctgtgtgtgaagcaaaccccgctggcagacgggatggagagagatggctcctccaaaccagaattaggaggaaaaccccgctgagggcgtttcaaaaacccaacaggcgagcggggaaacctgcattgtcagacctgctgggccctgagttctagccccatgcaccgcgccgagctaattctcccggcgactctctgaggggttattaccacgtaataattgatgaggacactaagggctaagaggagtcaattaacttgtccctagttacagagttggaagtcagggatggatcttaactggtggggctgttccgagggcctgtgagagactgggtttcagcccagagcccaacacagcgccggtagagaaagtatcgggtacatttttgcctgctaatccggcggtaggaagtcaattacatctttgatgactcagatttttgaaacagccccatacaacttccaattacgggggcaaatataattgtgaaagtctatgggatttggagatgaaggagtaggccatcaaaacataacccagaacttaacttgttttggaaaaaaacattttatggaaaatttccaacatataggaaagaaaagagaatattatagtgaactcccatgcacctgtccccaacctccaaataacgaaggcaaatctattttatggtcaatctatttcctcccctccttcccacggactctgcctccccagctgtcaaaacctacacacacactgcttcccctattcacacagattatttggaagtaaaacctggaccttgccacacttaatctgcaagcatttcagcatgtactgtcaagagatgaccacattaccaaaactacaatagcatcaacacaaccacaataccaagatatacccacaaacttcacattcctaaacaccctggagtatccagctggctgaagctttattttaaccacaattcctggctagagcttggttttcactgagtttcagctctagggccagaatgacctgggtttggatcttgatttttttttttcttttcacttattagctgaatgactcgggggcatgacttaccttctctctgagtgtcagtttagtgcaatctcacatggttgttacaaagataaaaaaacaaaacaatgcatgtaaagagtttggcataagccagggaatagtatctgttatttctcctaaagctggacttcggtgagattttagctaacgaaggcttgaaaattaggtttgagttggggcatcagaagttttcacgttgcatggagggtaagactagagccagggatgcaccaccacacccagtgatcattcatgagttcacccctcccaggattaacaactgaactctcagtgatgtcttatcttataaggctctagtcttatcctccatgcaatgtgaaaccttttcaggttctccaaggatcctcctaggtccgacagtcatcgtgggcttttcttgggggcagtgctggtctttctcccctgtattcctgcctctagcatgcggctgggcacacggggtcagtgctgtctgctgaaagaatggttgatgacatcatcccatcacgtggcctttgcatagccaattccttctgcctgagacatttatgccttttcccttagcttaattaaccctctctgaatgggtcaaattcccctggcatatgctctcagaggacctcagtgcactttctcttcagagggtttatcactggttaaaacgttagatttatttgttacttatttgtgtgattaccagatagtctttcttctgttctaaacttcatgagggcaggaatcatggctgttttctcatcattgtatctttagcacttaatgcaatggctaattgttgaatgcaagtggtttttatggtaggggggagtagctagattcagaaactggtttaaccctaaccctcaccctaatcagcagtcatagtagccaattcacaatgcactatttcaatatgttgtataggaaattaatctccaggcaaactattgcgctaccaggcaaactattctggaggtaatacaatagaaagatctagttaagatacttgaatcatacagattgttgaataaattttaaacacacaatgagaagcaagaggaaagagatggggtaggttaacacatataccacaga

SEQ ID NO: 1884122 - DNA, 4001 bp, Homo sapiens
ggagtagacgtggtggcctgtggaccaaagcctcaaagccaatttgcctgtggccgagaattgtgcctccaagacctgttcttgcactgtgtcctcgggttctgtcccagaggctaaggctgggtattgggggcagatggtggcaatgccatcttctggaaggcatgtggcatgatgcacttaccttgactcactttgtgatgctcacgtttggccttggcgggagttcagtcagattctgagcttctgctgaggcccaatgtcactgtgtagccacttcctcttcttccgattgaggccttagctgggccccctctctctgaggggttcacacagaacacagtctgtccccccaaaacctgatcctcccacatcctgaagcaggggtatcagtgggggaatgcatggcaaagctaatcatctgatttttatatttctaaagctggggagcacctcaaactttccagcagacccagctagctggtaatggcacttgactttgccatggccttatagctcatctctgtctttcagcagatgtgacacaagtcaagtcagcatctgtccaccctggttgtctttacagagctggtcagtggtgggtgccaggggcaggcctctgttttcaccctgtttctcccctgaagccatgtgagttggcatgaacatacaagaatagaggtctgagagtgtccctgtcctggtcgtgacctcagtccacttttctagctggctcctttatttggacaatgatcatttctcaaaatccaggtgagacatgacaatcccatcacgtttcatcatgatgcaatggcaggaattctggaaaaccccagtgagactgattcactttctaacccatgtttctcatttcaggtagagagagccacagcttgcccatcagcacaatggtgagaattaactaaacatgtgtatcttgaggtacatctgggaggtgggtgacaatgcaaaagaccctatcaggagacacccagacacttagaatctgtcttgagggtcacaaccagtgtgagtggatgtgataaatgcaggtgcagcttagatgataaataccttaggcagtcccccaaggaagagaccagtgcatgtgcagatagctcggggaagagaaagtctggggtggggtgggggtctttctgcacagtgctctggctgtggagctggaataccaggattgctcccactggagacagaggcactttgtcatggcaccttgcatgagtggatgtgggcataaccaccttccttgaaaggggggttgagattcagaggcagacactgagcccctccttggcccctcctatctgccctcctcctatgagcatgagcagcttctaccccatctctgtgtgcctcgcaggttcacagcttcctcagctcccatctctcgtcttggaggttgtcttctgtgctccctcatctcgcctcctttgtgtgctcattgacatctctgcggacagagtgtcagtcctgtccctccaagcccttcctgagaccccagtaccactccctcttccctgagaccagggtcctcctctcctgggcacacctgctcctcccctctcaatgcagctgggggaactggaacctcttggttgcaaacagcattggctgatgctgcacccatgggcctgggcatcctcgagggccaggaagctgagtagtgggagtacccacggggtgagtggagccaacattcacccttgcccgaggctctgatctcggcaatgggaacccccgctggtcttggaggagaggccaccaagagatgaaatcactcgtgcttggtggcatggtggcatctgcggtgctcacttttccatacttgctgtcttccctggtttcatcctcccagggcagttactttttatcctcaccatgcatgaacgtttgagtttgaggcactcaccaccttcaaagtcagagttgaagtctgacccgactccactcttctgactccaagtccagtgatggcctccgagtggagggtggaggattccgtgggtggccctgggagctacagcaggaggggaggctcctgcactgaggagcagtaaggctcaggggtggccgtgtacactgagacgggagctcccagggcagcccagagggaagtgaccacctcacgtggtgacctcatgtgagggactggtttccctagaagcagagctggaaacaagggctctggttcaagcgcataaggcagtgtctcaggagaaacccttgacggagggagagaagcagtgaaaataagagaggaagctgaagaatgcagcttagggtcaagggcagcctcaatctgccccgcggggaccctggatcatccacattgctgtggcgtctgccctacctgaatgctctgggccaccctggttgggctggggtgtcctgtcatccacaagccttcaggcaaggcagctccagcctcccagggcagcctcggtggaggctgcaggtgcgagctgttagcagcatccttcaccaggaagcagctggcaaagaagatccttgggtccccagcagggcccagcagggtccatccatgggcgaagagaagactagaaggctccacatccccacctccagctctgggcagacgggcagctgggccaggcagagctaggaagctatgaagggcgttatttattttaagtttggacacgtttaggttagaagatgaattgtcggcagggcgcggtggctcactcagcactttgggaggctgaggcgggcggatcatgaggtcaggagatggagaccatcctggctaacacggtgaaacctgtctctgctaaaaataaacataaaaaaaatgtaaaataaaaataaaaattagccgggcgtagtggcaggtgcctgtagtcccagctactcgggaggctgaggcaagagaatggcgtgaacccgggaggcggagcttgcagtgagccaagatggcgccactggactccagcctgggggacaaagcgagactctgtctctgtctcaaaaaaaaaaaaaaaaaaaaaaaaaaagagagagagagagaagatgaattgtctcccagtcaaccagaaatccaggttaccaaaggcaatggatggaaccagagaggaagccttaatgtagaactgaaggggggcaacccagggtgcagttgagtgactcaagagaagagggggaaggccctgcgagggctgagccagccatggagaggaaggcctggctaggaggcagaatgggcaggagctcaggccactgaagaggagccgtcccctggctgatcccagtgatgcagagaagccagggagggagggagaacggggagatgacccccatctccaggagagatactcctctggggagagggctggtgccactttccctctaatgctataaaatagggagcctcactgggccatgggccatgcagatctctagccaaaagtgagttcggatgtggctattggtagtgggggacttggaagttgttaggggaccagaaaaggctgggtgtactggtcctaggtaaggagtatgtttgtcacatgaaggggactacccgtcagcccagtgcagaggtaggagcctgcagagtgagactgggcaaggggagggctggagattgcaggagaaagagccactaagtcagcgagagcatgcacggtgaggaagaaggaagccttgcggggaacagcccagctggcctcgccaggaaggcccttccgcgtttcctcctgctgattcacaaccaggagtaggaaagtgcagggggcagagggccgcacctcagcgtgaccaccatccatctgtccttcctggcggctccatgctccggggagacgtctgtaagcattagcccatgaggaggaaaggagacgatatattcacagacactttgggaataaaagtgctccataaatacaaagagttagcaccatgtcaaggcagaatttatttcagaaacacagcctgatgctctgggatgctgaaatgccagg

SEQ ID NO: 1884123 - DNA, 4001 bp, Homo sapiens
ctgcaattagttctagcaacaattggtagtacctgagaaataaatccctgcttcaaaagcacatgcacacgtgcactcaaacatctgtaaaattcatgccacacacacacacacacacacacacacacacacacacacacacactgttgtcttcacacctttattaaatgactggcttttgtggcattgagcttgtgatgtcaggaataaggaatcacatagtttctgatggagtagggagggaaaagtcaagagaaagactgaaaggagatgtgtgagagctccataaacaaacagccttctttataattttgtgagcaatactcttcaattgtttggaagcagaaactagctggtttgcatttgcagagagcagacaatttctccctcaaaagattttaaaaacgttgtatcaaaaatgaattagtctgttatttcaatctttcttttttcttctttgtttgatgaggagttgacttctttttaccaggctctgtcctctcaatttagtaagtctacttatggcatatagtgcactgaactggtttattgagagcatttctattatcataaataaatggtcattcttaattcaaaccattaaaccaggttggcaaccatgtcattgtagtttgtgcataaaaatattttgctaggtgaggacagccaattctttattagcatgaaagctacaaaagaaaaaaaaaagataagtgacaggtatttccttaaatgcaaagcaaaagtacaaattctacacagtacaaaatggagaagggatatgagatgtgaagaagcaaacgataattttattttacactggagcatagagggagcttattgacaaaggcctggggttgtatttgcatccttgcagtacactatttagtcgtgaagatttacttagtggaaagtcactaaccagcttattaaaagtcaaacaatacctggaaaaaaattcatgtatgccattgcaattacataaggccattttatttataaaataaaaaatttataaagcaaataatgaatcaatataaaaataaaagtttatatttgcaccgtgtttttatttctgttataccagttgattttagtctaataaatttatgaggaaaatttaaacaaaaatgtgtttcccaagaacgtttatatttgcctctaccaagtggcctctgtgtttcccagtagggatgctgactcagcaaaatcagcattcatgactctagttgtccaatatagggagacaaaatggccaatttaagtcattgtgctttgtctttctctcacagacagacagacacacacgcacacacaaacacatgcacacaaagaaatgataaggttcaatgaaatactccatacatttccttcaattttactttataattttataattctaagggttttttttaattaaatgatcttgtccatatagggcactggtaaataaagtaaagtctagagaaatcacaaatgcaagttgaactagaattttgtttagagatttctagggtaataagcagatgaagtaaatcttttcttgcatctgtggcccccaaaagaaataacttgtcactctaaattatctttgagacaaaacaaatttgtcagctatagttgtcagaaaactgtaaagtgatgtactttaaaataaaaattttaacacctttttcctccctaatctccagatatattggaagtcatgaaattaaaatgcagtgttaggataatatttgcctttttggtaaatataatttataatcttaaattcaagtgttaaatattgagtctttccttggctttaggattaaacaataggtgatgccaaaatatgagaaaagcatcttccaaggtacaattgcatatctgttacatacctgcatacatagaaaagagaaagataggggtaagagaattaaacaaaaaagtagcagtcacatatacatatctgtatatatgacatagatctgcatatttgactactactttttcatttattttaatttaaatacatatttatgtacacatatgtgcgcatacatgtatctctctgtgtgtatctatatatttgttttggaaaatatcaggttcaatcagtttaaccaggtttacttttcacaggacatttcagagtatttaaaaactatactgcattaaaaatctccaggaaatgatgtatgtgaagagctccagagtgttgtttctcatagaaaacttttttcatagagaagttttttcatagaaacatttttttttaatttccaatttttattttaagcaggggcacatgtgcaggatgtgcatgtttgtcacatagataaacttgtgccagggtggtttgttgcacagatcatcctgtcacccaggtattaagcccagcatccattagctactctttctgatcctctccttcctcccaccactcactctccaacaggctccaatgtgtgttgttccctcccatgtgtccatgtgttttcatcatttatttcccacttacaagtgagaacatgcaatctttggttttgtgttcctgcattagtttgctaaggataatggcctctgcctccatccatgttcctgtgaactcctctctaactcattctatgaggccagcatcatcttgataccaaaacctgacagagatgccataaaaacagaaacctttaaagccaatgtccttgatgaacatagatacaaaaatcctcaacaaaatactggcaaactgaatccagcagcacaccaaaaaccttatgcaccacgatcaaatagtcttcatccccaggatgcaaggctgattcaacatacgcaaatcaatcattgtgattcatcacataaacagaactaaagacacaaaccacattataatatcaatagacacagaaacttttaagatgtcaatcttccagagtcagtgactgtctctattacttgggatttgtagttaatttgtttctattcttactaatttagaaaacacaatttcaagttcttgcaaaacaaaacacctgatgtttttcaataattttgtttgtactatgatgacatgcaagaaacaaaaaataacaattttcaaaaacccatttaaatgctttcatttgctagagtttacttctctggaaatttcatccttcaagacaaatgagaaccagagaataaagaataaagttctccaagtagtcaaataaaataactacaagcgacgtttacaaaaaaagtaatggttatacataattcttaggtgggccatttagacaaggaaaagtaacatcatattttaatctcttaactcacagacacgtagaaattgtcagttttctggaaatggaggaataagagaactgtctcaagaagataggtaggtccactgacaacattgtgaggtgccctaaagataaaaagaagtaatacaaagctgtccaagaaaacataaaaaatcaaagtataatatcttggactagttaggagataaattaccctcagtgttatcaaagaacaataatcaatattgtagatatgtttatgattaaaactacattgtcaagtaaaagttgaaattcatttaaaacattttataaacacaggacaagttagacaagcatggactctacatggaaacccaggtctaattcaccttaaactccttctagatttgaccattagacattaatgacctcttaaagcatcaacctcctcatctgtaaaatatccataataaaatatcaccaacattggagtcctggagaagattaatcattccttggttcctagtgtgtgctaatagaaactattatgccttctatttctgttacaactattaccagggaaaagtacacggaagtttcattaacagatttataacatattgttaataagaacaaaattcccaaactttctttgttgaaaaacaactcattctctcatttacgctgtgtgaatcacacgtgaactcaaaatgtttttttctattttctcactcaacaaccaataacatgcat

SEQ ID NO: 1884124 - DNA, 4001 bp, Homo sapiens
ccagcactcaacagctacatgtagctagtgcccttggacaatacagatacggcacatttccatttgtgcagaaagttctaatggacaatgctgttctggtgacttcattcaaacaaagtataagttcccttctcaaagatcccatacaaaaagaagacgtaggatagacatttatactacagaattgcattcaatgtctccaataagctatttcaggactcagatcaccctacaatattttaaataaggatgcaactcaaacaaggcgaagagggaatttcaatttctgattctaccttcagggaagataaaaacatcttatgtgaagtgatttatgagtcaatgtgaaataggtaaagaaaatctcaagagaaagaaatacagagggttaaatattgacttttacagacagaattctttacaccactttcctcactgtaatgttactctttttccccttgtacaatacttaatacctattttagtagataggtactttgaaactatgtaaatatctcattcctcatcatatatacagatatacattcattcaccaaaaagtattgtttctctgaaaagacttggcttctattatacttaatatagttcctgattttataaatcactgtgtatgtgaccattctcccatctctgccaccaccccttccccatgtggatgcccttctctccctactccacgtggggctaaccccccaagaggacagcccctttagaggaaatttatagactagaggattctgagatcttcagatctttcaaggtggaatgctgctttgaagataggatctttttacttaaaaatgtatttaagaaaaatatcattaaccaaaagcatcacaaccaaataaactatatttacctctaaaaactagacttattctgaaactacagaacagtacaagaaattatatataatcactacattgcaacacttttcaaacattcttatagcaacatttatgacgtaacaacataccagttcagatttgaagtagcctattgtgttttcatccaattgaaaatatcttctcttccagtttttcatctaccagagatgaacacagacataagacttgtgtttctaagaatgtcaaatgttagtcaccacttaattaccctgatatgaacccacaatcagacatgccaagcagtgaaaaatctcattacttcccttagagatgcgataaattaaacctcatccctctctagctacccaggctttgaattcctaattcaatttctggtgcctggctttcatcttttattgtatgattttatgtgttttttttttttttttttgagacagagtcttgctctgtcacccaggctggagtgcaatggcgcgatctcggctcactgcctctgccttctgggttcaagcaattctcctgcatcagcctctcgagtagctgggattacaggctcccatcactatgcccagctaatttttgtatttttagtagagacagggtttcaccatgttagtcaggctggtctcaaactcctgacctcaggtgatccgcccaccttggcctcccaaaatgctgggattacaggcgtgagccaccatgcctggcctatttcatatttttaatgttgaaactttttttttttttaaaagcacttccccttcctcctactcctcgcccccgccaaccccatgtaaagagcaaacacaggaaatgttattaaaccacatcaagtttctccatctgtaaaaacatatgaattcttccacaagtactttatacatagtagtaaagcactaaatatttaataaagtaaacctattttgtacaaatattttttgtcaataaaataacagtttttgcagaagcacttaaatatctctgactggtattttggacttaagagtaaaacaaaaaggaaccatcaggctatgatcctcagttgtgtgtaaaattagggctttcaatctacacacaactgagcatcacagcctgatgagaattctgactctacctgcagacattgtacagtaagaaacccctgccctcaccatcattttcctcagcctaaagcaggtcaaacaggtgaaaggacattcccctggctgccctaaaaaaattaagagttgccaaaaagtgatgagaagtcaaacagaaccaccaaaataattttaagtatttctttactcacagacttaaaaaacattttcaaactttaaagttaattttctcatgaaattctaaagatttagttcacatagaaagaatggcttagatactaaggtatgttgcaaccttagaaatattggtaaatttacttgctcttgcaaaaaattcatcatggaactgattatatgggaatacctgggctaacccataacagcttttactaagtaccaggtgctgtgcaaagggaaacacacctttcttatttacatctcttaaaaaacaaaaacaaaacaaaacaaaaccctagatggtaggttttatatgatattccttaagacagaaactgagggcctgagaggttaagtaagtagcccaaggtcagagagcttaccacggaggtcaggccaatgcctaaacaaggaagagacctcctaggcaccactccttctcctgccgctggcctgccatctccccacaacagctctctttccctgacccactcctgagtatgagtaaagatgaatagaaacactttctaaaacattaaactgttaggaaagctcatttaaactgaaagtcagtggtaatgggcattaactttcctggccccctgcaaaccaagcaaataacagcattgaattataaacagagaatatcccctattttatctcctgactctcctcagcatgccggtctctcactttgggtctttcataaaataaagcaaacaatttccatgttaatttgagtttgctagaacgtaatcctttttcattatttcatgtattttgttaagctactcaccactgctccttgttttacacaatatccagctttgataaccgcactatcttgaggtggtttaggagtaaagtaaggaagatggctttgtgaccgtttcagattatttctgtcaatactttcaccacattcatttacttcttctttctaaaatgaagcaaaataaataaattattttcttgcttgtttagcatacttttatttcatattatcccagtagaaaatcttaaaatccaccttagattagtcagaaacagatttttgaagagttttctaattaatctgagatacttactcttaattttcctgtcactgattaaagcacaaatttccattcctcttgttttgcacaagtcctgccaccagtgctcttttttggggaaggagttaactttttattttgaaataattataaggattcaccagaagctgcccaaaaaaagtacaacaggtcctatgtaccctttcactagtttcccctcaaagggaaacggcgtaacattatcaaaaaacaagaaatggacattggcacaacccacaaactttattcggattccaccagttttacatacattcatctatgtgtgtctatacagttctatgcagttttatcacatgtgtagatctgtgtaactactaccacatttaagacccagaattggtcatcaccccaaggctcctttgtgaactttagagttcctacccctaaatcccctggcagccactaatctgttctccaagactataattttgacattttgaaaatgtaatgtaaatggaagcatacagaaggttatcttttgagattatcttttttcactcagcataattctctagagattcgtccagactgttccttgtatctagagttcattcctttttattgctatatttccatggtatggatggatgaccagttgtttaactgttcacccattaaaggacatttgagttgtttcccacttttagctattaggaaaaaagctgctatcaacattcatgcacaagtttttatgtgaatgtaattttccctttctctac

SEQ ID NO: 1884125 - DNA, 4001 bp, Homo sapiens
ccccaccctggaagagaggcttgctggggagaagctgtcaggtgaacagccacgaaaaaagcagatgccaggaggtgtcctctccacacagttcctggctctttagcaccatgaggcaggaaaggaggctgctggcctgggaactaaaggcctcttcaaaataaaaatctgttatgctgtgtatgcacagcacggttccttcaaccacgagaggaggagactcttggcagcaacactcacggcatagccattgacagcagcgatgactggcttcttgacctgggtgaggtggtcccagtgcttcaagaacttgctggagtaacagtcctggaaactcaggttctgcatttccttgatatcagctccagctagcaggagtggaaaggaggttccagttaccagagagcagagagcccacccatcctatatctctcagaccaacaaggaacttcagagcacaccagacacaggcagtggggttgctgggcacggctgacaccaggccacgtggacagctgtagggacgctgtaatgccagctagaacagaagtcacgcagaggggccctgaggcaggcagcaggtgcaagggaggcgcccacagaggctaggcatatttgtcagggcataagcccttgacacacacaaagcctgactgccaaggacctaaacccctttgaagaagctgttttgctggtggagcacatgcagctctctggcatacacaaagctgctcatgcaagccgttcccatgaccgtcttcactcgatatttgaggaagtccccagtcgcatgcctctgccatcacagaggcgcaaatctgtctggaggcttctcccaaggccatacgtgcctcccacatctgcccagacacaaaggcctctgctgccgcgcgtacctgcaaaggccttatccccgccggtgaggacaatggcccccacggccgggtcctcctcgaaggtcttcagggcctggttgagctcgtcaatcaggccatcgcaaagtgcattgagggccttggggcggttcagttggatcaaccccacggtgttattcttccctcttttttctgcgatgatgtactcaaagttagcacctggagcaagaaggcaaaaaggggtatctattcacacaggtatcaaactggggagagtgggggaagggatgtggccccatcggtggatacagtgtgaccccaagaggccctctgagggctccctgccgagtcctcagtggctccaggtgtagctctcagccacaaggatagatggtagccttggtaccattctctctgctttcacatgtgtttgaacatgtcctaaagaaaatccccgggccgggcgcggtggctcacgcctgtaatcccagcaatttgggaggccgaagcggtcgaatcacaaggtcaggagatcgagaccatcctggctaacacggtgaaacgccgtctctacctaaaatacaaaaaattagtcgggtgttgtggcgggcgcctgtagtcccagctactggggaggctgaggcaggagagtggcatgaacccaggaggtggagcttgcagtgagctgagatcatgccactgcactccagcctgggtgacagagtgagactccgtctcaaaaaaaaagaaaagaaaaaaagaaaaatccccagcacagaacacagcccacagccgctttccttctcctaatatgccttggtcagctcttcccaggacaccactctggagacagccctggactctgctgagacaaggcaccaggaaacaccttctttcaacaaatgccaacaggtgagggggtgtaaggcagctccttgcacttggtaccgccccagtgccaagacctctggccaactggacgcagggtgggggatgtgaaaatcctgggtgttcctgcagcattaagatcaggcacaggtccggagcagcaggccagcccgaaaatgggagacgcaggcgcttctcggttggcctgctgcacaggacctgcgcctgctgggtggacagcaaggtgggaaggagacaaaggacaatggcgttccaggggtgagaaggtgaacctgaaaagacaaaggtagcctgtgtgttggatgcttgcctccgttagtggcagagcagggatcatagtccctgtgctatgggtttcttttttttggagaccgagtctcactctattgcccaggctggagtgcagtggcgcaatcttggctcactgcgacctctgcctacagggttcaggtgattctcctgcctcagcctcccgagtagctgggactacggtcacacaccaccacacctggctaatttttgtatttttagtagacatggggtttcaccatgttggccaaggtggtcttgatgacctcaggtgatccacctgcctcagcctcccaaagtgctgggattataggcattagccactgtgccccgccgtatcctgtgggtttctaggggtaactggaagatcacaggtgaagtgtctggcagcagtgcccgccatgcaagatccaggaaagggctgctgtcagggtggagaagccgaaggccaaggagagcatggagatgaaaccaacacaactcagtggtccactgctacacagggtgagggaggaagaggaagcaagagttcttccccagcccaaggcatggcccaagattcctcagatactagagccggtgatggccgctcatgagtggggccccgggtgagccacgagggaggaagagggcagccccctgtggctggggaggaggtgtcagcttttcccttaggaccctctgaggggtggccctggtcaggaggcacccaggacaaaatgcacctgcatctcctgttctcgggctggccggctgcacaggagctacgcctgctcttagagccgagggaacaccccggatttttacaacccccaccctgcgcccagttggccagaggtcttggcactggggcagtaccagccagccgccgggcctcccgcaggacgtggcctggtgagagtggcctcctgcagagccaggcagggggtgggggtgcgggccagggtcaggtgggtggtgtcggtgcggggtggcgggtggtgggggggtgttaagcctgggtcaggctgtgggtgcgggtcaggtggggggtgcagcactaggcgaggggggtgttgcaggcctgagccaggcaggggctgcgggtcggggtcaggtggtaggtgcggggtcaggcaggagagtgcggagtcaggccctggggatgcgggatcggacggaagaggggtgcggggtcaggccggggggtgcggggtcaggtgggggggtgcggggtcaggcggagtggggtgcgggtaggggtcaggccggagggtgcggggtcaggtgggggggtgcggggtcaggcgggggggtgcggggtcaggcggagtggggtgcgggtaggggtcaggtgagggtgcggggtcaggcggaagaggggtgtgggttggggtcaggtgggggatgcggggtcaggtgggaggggggtgcggtctgggatctggtctgggcgtgcaggtcggagtcaggaggagattcgggccgccagctctcaccgcgcactcacccgaggcgaagggacgccaggcgggacagcgaaccgggggcctcagcgggccgcggacgcaggacagcaggacacgcagggcggccatggctctctggactcctcgcccggccccgcggagccgccccctcgcctatagcctttcagggctcgctccgcccacaggccagcgccgcgagaccaggcggccctcgcgagatcagcccgggcagagtgagcgggtcgctctccgccaggccccgcccccaggcccgagctgccgctcgcggatctaaggccgaggggcgtccccgggaccccgccctgggctgggaccagcgccctccaggccccgccgcagtcgcccgcgcccccgcccccgccccagccctcggggtcccagctggccccggggagaccgcgcggaggcggaggcaacg

SEQ ID NO: 1884126 - DNA, 4001 bp, Homo sapiens
tcagccttgatctcttatctcctatctcccatccaaaatatggtaaaccctgttggctcttccttcaacttatctccaaaattctaccccttgtcaccaccttcactgctacatcctcaaaccaagtttcaccttggttattgaaactgcatcctaactaggcttcctgattccaccattactgccttatattcaccctccactcagcagcaggaagatccttccaatatgtaaacaccctcttaggcttagtatcctccagtgactcccactaaatccttacaatagcttacgaggtcctacacaatctggcccagatcacctgtctgaactcatctctcccatctcctcttcctcatgaccctacaccagccatacctgcctcttggctattctggaaatgctaagaatgctctcacctcagggcttttgcacttgctgttccctctgcttggagcactcttcctccagatctccatatggcttctttcctcacttgcttcaagcctatgctcaagtgtcaccttgttggagataattccctgaccactatgcatgcacacatgcacgcacacacacacacacacacacatacacacacagagtaattccccccatagcatctattggccatggacatacaacacatttacacatttacttttctgtatgtttctttcttttctctgccaccagaaaaaaaaggttccacttgatcaggaacttactctgttttgttcactgctctgtctccagcacgtgaaacagagtggcataaagcagatgttcaattaacatgtatttaatgaactgaatgaagtcacaggttttaaggagtgttaattcccatgcacgcctgagtaagagaaacaatctcacttttccttttgatcacatgaaagaaacaatagaaaaacaataagtggtttccccccagctgtaacagcgccagggacttcccacctgctgcttctgcttagaaaagcagtggtgtttgaagaattcttggaggttatgagctcacgtgtctgtgttctgacacatacacccccacacgcccttgcacactgcagtacagaaggaaaccctactgagagaggtaggcagtctatgtccaggctgtagaaacagtggctgccatcactgctatgttacggaccctaaattagcttatttcatgaccccacagagttacactgattgttttcacacagtgtttctcaaagagtgggccagagcagcagcagcagcagcatctgcaaacttgctggacatttgaattcttcaacccatcccagatccactgaatagaagctttgcagggctcagcccagtgctctgtgttttaacgggtcctttgggtgttctgatgcagtgaagtttgagaacttctgcttcagtggacaaacaagaatgtctgggaggaagaaaaagtaccaaaaaaaactgacaaaattttttaaatgccatgtaaaggctgagtgcagtagctcatgcctgtaatcccagtactttgggaggaggaggcaagaggattgcttgagcccaggagtttgagaccagcctgggcaacatagggagagtctatctctacaaaacaattaaaaagttagccaggcatggtggcgtgtgtctgtagtcccagctacttgggaggctgaggtgggaggatcacttgagaccaggagatggaggctgcagtgagccatgatcctatcacagcactctagtctaggcaacagagcaagaccctgtctccaaaaataaataaataaataataaaatggccatgttaatcctaatactgagttctagctttacttatcaagctgtgtgaaactgaaataaggacatcagggtgagggaactggctctctcgggagaggggaaatcctatttcttcttcatcactgaccgcttgcttcagtcaggctgttcctgtcaggctggtgtgaaatgaattagcaatgtcaccagcttcccaaggaacaggtgtctctgccatacctccggcaaccaatatcacgactttcactaattgctctgcccttgtcaggccctttgaggactaagtgggccctggagatggagtgaccctttacctgctcagagctgcctttaatcccaaccacatgcccccaccccactggagccccggagcatgggaaatatggagcaccacagtagcaatgcagaagcatgagtcactgctgaagcttgtgggaggaaaaatagaattcaggccttctgctctaattacacttgattgttgcccgttgtgaacaaggacttttagggttgacggtatcctcaccatcggcccactctgttggcgggacccaggagctggtattgctggagaaattcacacagaaggggaatcacttcttcttaaaatgaaaatttgggccaggctcagtgtctcatgcctgtaatgagagcattttgggaggctgtggtgggtggatcacatgaggccaggagttcgagaccagcctggccaacatggtgaaaccccgtctctactaaaaaacaaaaattagctgggcacggtagtgcatgtctgtaatcccagccactggggaggctgaggcaggagaattgcttgaacccaggaggcagaagttgcagtgagccaagactgtgccactgtactccagcctgggcaacagagtgagactctgtctcaaaaaaaaaaagaaagaaagaaagaaagaaatataaagaaaattggctcatgtcactcctctgcttgactgacatctggattgattgacaatgcctttccattgagcttagaataaaatctcaaacccctcaatgacagtaaaaaaaaaaaaaaattttaattatgagcaagagacttgaatagacatttctcccaagaagacacacaaatacccattaagcacgtggagagaggctcaatatctctaaccattagagaaatgcaaatcaaaaccacagacttcacatccactgggatgctattatgaaacccacacattcagaaacttatgagtgttggcaaagatgtgaagaagctggaagacttgtgaacagctagtggaaatgtaaaatggtgcaatcactgtggaaaactgtatggcagttcctcaaaaactgaaacatacaattaccataggatccagcagttccattcctggatatagtcttaaatggaaagcaatgactcaaacaggtatttgtacacccatgttcattgcagcattattcacaatagccaagagatggaaacacctaaaatgtctatcactggatgaatcaaccccaaatgtcatatatccacacaatggagtattattcagcctaaaaaagaaaagaaaattctaacacatgctacaacagggatgaatcttgaagacattacgctaagtgaaataagccagacctaaaaggacaaaaattgtatgattcctcttttgaggttcgcagagtagccaaattcagagaaacagaaagtagaatagaggttaccaggggctgcagggagagaggaatggggagttagtgttttaatgggtacagagttgcagtttgagatgatgagaaagttatggagatagccggtggtgatggttgcactataatgttaacatacttagtgccacttaaacataattaagatggtaactttggtattatgtatatttttcaacaataagaagttttcaaatcccaaacccctctcttatatggccccttctcatttgtccaccactctctgacatttcttgatctcttgcttctgtgcttcagatatcctgtttttatttcagttcctcaaaaaggccaaactcgttctcaacctcagagcctttgcactatcacttcctctgtggggaacatttttctctctattctttacaaggataaatccttttgatgttttgtatgtgtggcagagactacctagacgctcacaccaagctgtttcctcttcctcctgggcatacgtgtctcactgggcatacctgttc

SEQ ID NO: 1884127 - DNA, 4001 bp, Homo sapiens
aaaggaaatccacctgcctttttaataaagtcaagctcaggtggacacatagggacttggggaggttaagcttgttagcttcaactagtctttcagagatctcccttctaggggccaggtggggatcctgatcttccccatgtctccaaactctgcaaaggccctgaagggggtccccacctaatttagcccaggcccagggatagcaggaacatgcacttcatgtcttatgccccatgggtcgtctggcctccagggggcaacaagttgattaaaagataaatattaagaaagtggaactggtgtgcagccatgtcaaaaatagtgagaggtggttagcataccttgattcctctgtaaactctgaggctttgcaaaggagaagatggaggagacccttctcaggtccggagcacccctccccgggtgagaagcacttgtgtctgaccccagagccaaggatcacaccacctcccacaccatctgcacacactattagcagacagcccatttgcaatcccctggttggtctgggactgcactgaaggaccataaatttaagagcagagagcaccactccccaggaaggccaagaagcagggtcataaatatcaaggctgagcctgctggcatttttcaaaacacatcacagcattacccaaggctgacaaggtctgctggccaaaaggctgtcttcgattccttcatttaagtgtttttgccttttcttcccctcaaatcacggggaaaatgaggaggcagtgttgggtcttattggtggggtcctggtgatgtggtgtctgcaaacaaatgtgacttgaggtgaaagggctaaaaaggaaatctcaggccctagggaaggcaaaggggacactcagctatatcagttgggtggggctgccataacaatattaaacagaaattcatttcttcaaagttctggaggctggaagtccaagatcaaggtgtcacagggttggtttcttttgaggcctttctcttgctttgcagatgaccaccttctccctgcatcctcacctcatctgtcttctgtgcacatctgtgtcctcatctccacttataaggacgccagtcatatgggattagggtccacccatatgaccccatttcaactgtctccaagtacagtcacatttggaggtactgggggttaggatgtcaacatagaaccactccagggacagaattcagccacctatggcactggctgaaggaggtggccctggagccaggcctggaacctgctgagacagagggacggggttgcaggaagactgggctgcatcggccaaggtacagggtgagtccggctgggtgtgggaagaagaatggagggcacacgggatgaggctgagaggtagaggggctgctgctcctggctgtggagtagactctggttactggatggagtgagtgcaagtgaggctggcagaggtgggctgcccacccgcagagcttcattctccatgccagctcccagaatgtgccccacaagagtcagctgagtaaacggacatgtagacgtatgaatgagtcttggtggcagacatgtcagaaagggtggtcctgggatggcagggtcaagcagcagcccctccgtgggcagggtgaagcaaaatggagtgaagaggtgggaataatgagaggaaactgtaaatgtcatgccctgggcccgggacatgtcaggggaagaagccaggagcttgggagcttgtggtgaaaccgtgaacgccgttgtcagaagctggaagctttagaggcatccatgaagcagggacgggctgtgggtgagaatgccccatggaggagctggggagactgcaggagacaggctccatgctgagctgctccagtggggtcctccaggattagctcgcattgctgggaggagggaagccgctctgcaccgaaacctgggagacacatgcacccttgggccctcacagacatggccctgctgtagactcccgaggcatcggaagcagagtccgctgctggaggcgagggcaggggagcagtcaagccaggatggggctgcagaggaaagcaccaggcacaactgaggcccaggctccaaaagctctgggcaactccagtgacaggaggcccctgctggcccgagtggactacgatgtctggccagcagggttggggctcctgacagttgtcagtggttgggggagcccagggcagaggcctggggtgcagggagaggagagaacaggctcagcacccaggcccacagcagaggcagcagaggtagccagggccgaagccaggggcacagcctgcctggggcccagaagcaggaccatgcagacactggcctcaccagcacaccaggtccagtggggaccgggggacccgtcccagtgccacatggtatctagaggcctagacaggaggacaggcatatgcggtgagtgggtaaggaggccaggccacctgagcaccaggcccagctccacaagtcccgccagccttggccacagcttctgtatctgtgaaatgggatcctggtgtctacctcagggctcctcaggaaagtaacatcatatcttcttattttataataaaataaaataatagtggatgaggcaaacaacagactgcctattccgctgtgacgcaagctcttggctgcttcactcaccagtgttttccttgctcagccagtccctgagccagggcgctggggatggaggaaccctgaacctgggacacagagaacatgggacagcaggctcaagacatctggcaggccccacgcccagggttaaccaggctggagcagggcaggcacgcttcaattgtgcttcttcagaaatgtctgggaaaggaggtccagctctcaggctcccccgggcccacagactttgtgcctgctcatggggaacagaagcctcaggctgcatatgtcaccatctcccagggagcacaggtcccggagtctccactctgttgggaggaactccagcactgacagcagcaggctggggtgaggatggaggcaggcgttgctgcccaccctgtggtctcgggacagatggcctgtgaagggcttccccagcctctggggtcagaaacccccatatcccactcacttttcacgtctgagatcagctcctagacagcagccatgccccactctcccccagcagaagtcccctcacggaacacccaccttgggtctctctgcattttctacatcctctaagaggccagggaagggcagcccagagcaattgatgggcatccctcccacagcaggcacccaggaaagcagggatcccgatcgggcaccactgtgcttgcctgagaccagcatccaggcgtgctggagtccctctgggagacgagttcacccacaaggggggccgcacgctcaagctgtgcccatctctccacctggacaggcctggccagactgggacatacttatgctaacaaagtagtcgttgctcatcggagattcaactttttccaggtgtcttgcatttgtgtttgctaagtctggccgtcctgctcccttgacctcttaggcgcaggaaggatggtgccttgtcagcaggcctggcagaacccataagtactcagtgtgtgacccatgaattgcttgtattcagtgaactgaaatgcaacagcagaagttcttggagggaccatgtgggactctctgtgccactgaccaagtttccagggctttctgtgtccctccatggcgacctcatgagaaccacatccccctaccccaggctggccttcttcttccattcctttgagctcagggatcctgggagagaagttctgtcccctggaagcccctgtgacagcaacttcctccccctctggggcctgcagagaactcaaagattggatttaaccacattaaaatgcagccaatcaggacacatacggggaggaataggctcttcatatgaaaatcctgatgaaatttgtttagcataaaatcaaatctc

SEQ ID NO: 1884128 - DNA, 4001 bp, Homo sapiens
tattcatccacaaatgcatctgtgcagagtgcctactgtgagcaaagcattcagagcccaaccctcggatctctctcccttgcaggtgctgcctcatctcaacccataattattggcagttcaagttcttactttgtatttctttcctacattctccaaacagtctcctttgagatcctcattcactttcatggtttttaaatatcatctctgtttctatgcttaatctgttaaaaactattccaagttttactccccatttcctattacatgctgggtagttcactcatcccttaaattcagtgggcatgaataaaaatcacagcttcttgctatgtgcctcttcccatcagctaaatgtgggcgaatcaagtgggtctcttgggactcacacatatcaactcagtttgaatcttcctttattttgcttcccattttgaaccagtcatcgggttttctcaaatctttctttgaattatctctcatacttgtttcttttccattcctactgttgtaacctctcacaaagaccagtgcaaaagcctcttaactggtttccctgtcttcattgtctacaaccatcagtacgtctcgattgtttgatctttctaaaatcttcctaaaacaccactctggccatgctcaccaagaaaaatccaaggtttaagccagcatttagaacctttcagaatttaggcctaaatactctttcaggcttctctctcaattctctctggcatatattctagacttggccacctctgagctttgacccttgcggttccctgtctggaatgcctctaccaatctccaatccgtacaatcctgctgactgctcacggttctgctaaaacactacatctgccatgaattctgcatctgcctttaccaaagggatctttctccttaaattcctcagcacgctgtctcatctccacaagatttacatgcctgcattatcctctttaccagagtaaaagctgcttgaaggcaggaaatgtgttatcttttattccccccaaataatgagcacagtgcctggctcatattatgaataaaggcacctccagccccagctttctgaactttgcagttacaggcaacaacaaggcagtgaaaactccggcaaatgtccgtaggagactcctagaattagctcctctaatgctcctctgtctgcctattttaacagttaaggaagacacagaaaaaatgttggccactcagtccaggattcaaccccagagtttatttattatgcatgtttatgtattcagattgtgaaggaggcaatgggcatggattgtaaattgatggcaaacttaatgaaaagcagacaaaacagtgtaagaaggcttaaatgccttttagaacatggcagatatataaaaaagtcataagaaagtttacaataaagaaaagaatgtggaagagtgagagtcaaaaaagataattacgtagaagatttttaaacagcttgtctaatggagatgctgagtgattaagacaaacagcttgccaaaccaccttgtcacagggacataaatctgaaaaagcagcagactcctcagaaaggtcagacagatcacatttagtttcaaaaggaagaaaacatgaaattcgtgtgtgtgtgtgtgtgtgtgtgtgtgtgtgtgtatgtgtgtgtgtgtctgtgtgtgtgtgtataaccaccgagaggcaatggtatgatattgataatctttggagaaagaaaccttctgtattgtcaagtgacttaaaactcgaggcacaatccaaaacaagaattaaatagcacagcatagtgtagtcaacaccatatgagagggtgccttcagggcaacacacactgctgccagaacaccaaccaaaaaatggacaatcaggatctcaaaagagatgagtcacccagagggtctctgtaggaacagtctagtttcttagccttgaaccgaagtggtcttgccacaggcaaggaaaacattgcactgttccacaaagtcaattctaaatgcataagccattgaagcatatttcttatggaataaagactgaggagaaataaaggttgagtaatgaaagtaaagatgcaacaaaacttttaaagtggccaatcttgctcatataatgcttgcaaccaaaagggaagaaagctctattactctgggaaaaaggtgtttggatacaccactaaaataggaagcctaaaagaaccattgttttataattctgagttaactgtgatcctttttccttttttccgtttgttaactgatggtattttctggagtgagtcatgacttttttttttttttagtctagagccaacttgataatgctatttaaataaattaactaactaaactgcaaagtataagctcttatgcccataaaataagagaagaactgggaagttcaccaacaaggatgaaataggagaggcatttaataaaatttggtgacagagtcagggtaaggtaactctctcagtgacacatttatgtaatgctagtcttctctgcatgggagacattactttttgggggcaatgcccttttcctcaccactgcttttctccaatctcttctttgacttccttttgggatccctgggtatcctgctgtgttgttccagccccggtgttttgcctgctatctcttttcaatgtctgaagatcaattatcccttcgtgctagcatagggaggacagaaattctggggaccacaacttttccattatacttgaaggaaaaaagcagctctctcctgtaagatggagaattcggaggtttcctcacaggcttctggtgatgcttaaagcagagaatcaacctacagggttttagcacagtgcctggcacatgcggagtactcaaaggatgtgagctaatcttcttcttactattattatgtaagtcccgtaattctctatgacccactatgtgttccagatgatgccgaagacctagaaaagtggctttcatcaccatcagacctctcctctccttcagacctctcctctcaggactcaccatgttggtcaggctgctctcaaactcctgacctcgtgatctgcccgcctcagcctcccaaagtgctgggattactggcatgagccaccacgcccagcccagaccacctttttgtaacaaatatttcacacaggatttttaaaaaagaaatcaatataatgccctagctgtaatataaatacaggaaaataacttacaacaaaataagaagtatttctatttgtaaatacccaggcattactatactaatagatacaactaagtaagtacatgcttgtgcctatacaactgtcacatgcatgtacaatcaacatgcatgtgacactacatatgcaaaccaatccacaagcactgtaatgacagctcaaatactacaagtcgcattaccatgaacactgtactcacccaactttccacctgttcctcttccctaacccccttatggttaggtaggactatatgactatttctggccggtacactatagtcagaagtgatgtacctcaactttgggtcaaaatattgatgagctggtatgtgaatcccgtctatccctgcccgcagtggctggcaacgatccccatggtggagtctggatgcttgagtaagtggggcagagccctctgtcaatgcttgatcaacttttagcataaataaaaaagaaacctttgttgtgttaaaccaccagaatttctaggttaatttgttactgtagcataatcctgtctatccttcaatggtaaagaactcttttaaaataaaccctgattttacacaattattgtatacttggaaaactccacatacgttcaagccacacaaaaatactttgtgttcatatggaaaactacgttcagataattataaatagggtgtgcaccttcacaaatgaccagcaggacatttgagagtttgtgcaggatcagggagtgttgtaaaagactacgcaatacattccaggatgtttat

SEQ ID NO: 1884129 - DNA, 4001 bp, Homo sapiens
gggcttccattccctgatcctgcctccaccaacacaaagggccagggcagctctgaaggtgatagcggaaataacatctcaggaggctcttcagcgcctgctgcatcccaggacggagccaccacagtgccctctacgtctcccacagcgagcgcttccctagggaggctgcagaagttagcgggtaacacggttttctggcagacacagggcagaaaaatcggcctatggcatacccatttcctgcttttaaatgtggacagcctgtgctggatttttgtctgcttctgtcaagttaagtgttgtggaatttgtgccattaaaaaagttttcttgggccgggtgccgtggctcatgcctgtaatcccagcactttgggagactgagtggggcggatcacctgatgtcaggagatggagaccatcctggccaacatggcgaaaccctgtctctactaaaaatacaaaaattagccgggcgtggtggcgggtgcctgtaatcccagctactcgggaggctgaggcaggagaatggcgtgaacccgggaggtgcaggttgcagtgagccgagacagaaccattgcattccagcctgggcaacagagcaagactccatttcaaaaaaaaaaaaaaaaaaaaaaaaagtctttcctctcatcaaccccctaccccctgcccccgaacgtcctcaacccaaagtagccaagttggctaatctaacgcaaagggtgggaggccacaccaaatgcactggttacatagcaaacacaaagtctggctgggttttaaagcagccttcgtctaaatcacgcaagcacacagcaacaattagcaaaactgcccagacatcgtttcaggtatcaaaggggctgagtgcaccgtgcacccttgcttgcacactgagtgctctcaccaatttctgggcctggagcgcggaggcttgggcacccacgcaacgcgccaaaggaagtcaggagagtgacgtcgagtgtctgaaccaacccagcctttttcagattagctgcatcctaagaagccccagtcctcatgtctctcagtatttagccatggtaagtgaaaacaaaggcctgcacattgcttctgactcaatttcttaactatattgtaaagcttcctgggaactgcattatgaaaattagaccactcattatggggtttcaaaagaaaaaaaaaaacaagcccattctcttgcactgcccattttgaaagtgttggtggagccaaagtgtgcaacgggaccccagctgggatgcaggacaggcctcaccttggaccatgtcaggattcccatttctagcaatggaacacactcaacctcaagaggctgtgctcagctctggacagcacccggcacaagacgctccgcacagtaggtgctcaatgaacaccaccccttctgctctttagcagcttttcctgcagattcccaaagtctccacctcacctccatggtgacccgccccatcacactccactgtttgaggtctcctcggctgtcctgcgatcagaaggtcccaggatgccgtccttcctctggttttgtgagcaatgctcctaatcagggctggctcagcgagccctcccccatgaacctttctcagtccaattctgtcactttgtccttagtccaaaaaacctgccactcctcaagatgagaaaggcaccccaaaaatagtccagggcatgcatgtgcctgtagagacaggccaaggcatggccgcttagcccctgacctgcggagcggagcgcacccctccctccacagcacgtgctccctccattcatcacgtgcttttcattttgtttgacacccgggctgtaaatcaaactgtcgactatgactcaatggtgatggacggctggcctcaagggagtgtacggtgtgatggggaaaaacgacagagacatggacacagtccccagaagcccctccccacaaccacttcagccctctgagcctgagcccacatcaaagcccaaacagccccatttgcaagcctgggcatggtaggcactaagctaggcaaagcacccaccgcccaaatacaaatggctgcctgacagagacctgctccacctgagcctgcacacggacagtttcagcacacgggccttgatgggacggtcagcctttcttaggatacgaaagaactgactctcagcctcactcccaagtctcggataaatctgcgtcacccatcccaggttgcaaatgggaagggaggaaccctcctggcacagacatctcttcaaccggaacacggaaaacaaaaccctcaggtgatgagaaacaggctggagggacagggagtgtgggatcccactgtgccccagcgctggacacccagaatgctctcccctctcggcatcttcacagcccagctggggtgctcagccaggctcctgctggatgtggaagggctgagaaaggcacgtgaggtcactctgtagatggagatgagacagagacagaggaacgccctcgagcgcgcacgccaaggtgcctgagctttagtagcaagcgagccaagtggtagaaaccaatcagagaggagtctcatttcacagctttaacactgtacgttctggaaaaggagagagggcaagaagccggcagcaaaatgtatcttggggttctggttcacagtcaccccaaatacctgtcaattaggttgagctgtgtgaagcgcgcagaaggttctccgcattcgtgcgggctgctgtctgctgctgtctggctaccctggggcctcctccaaacacggagactacggatgcactgttccccccgcggcactccttccccctgcccaccccaagcactgctcccctcaaggcactgacttggcctgaaactagagatgctcttttcccaaaggtgccgggaccaagaggacaggcactgagagtaaagccctgggcagctgggcccaggggctccgggccacactgtgggaggtttcaactcaatcatcgatggagacagggcaccaccaaccaggcggtgggaaacagcgcgattcactgtggtaggggcaggagctgaaaaccgcagctgcagaaccaaactagaagacggtgatgaacccccaaaccccagccacagactccagttgcactacacatccctggccccccaaataaaagcaaagtggccttaacatgttgctattagaaaaaagtggtgagtatgaagacatccgcccatcaccaaactgaccggtgcaaagagacgcttatgtttgtgcttgagaaatgagtaacaacagagaaataaaacaccgaacctgattcacagctgcagaacgggagggcagtctatgaaccccatccccagagtcggtggaggaacaggtggggtgaggggttccctggggaggggtcccccactctgagtttctcttaaagccggggacagataaggcaaaacatgaaactttaccccttgcaaagaaccgcacttttgtctgtgaagctttgccttggctgtttcctgaacctttacctttgcataagattgtttgggtatgttcatttgtgctttggggttttaaggcatgtctagttgactattgtatatttacatagctaatgtaattacagctaatcacataattgctggaaatgtgcataattgcctgatcccaacatataattataatgtatagcaacattatgaatcccatttttaaaatccacattttggggctatttaaagttatttattagaactgtttgtggactacctataggcaggcttcaactctgtttctttacgaagcgctcaaagtgctttaaaaaaacaaacaaaaacaaaacaagtcctgattttataatgcatctgtacaaagataggtgaaaagaaaacagctactcagaacaaaaacaaataaatcttaaataccaaacaaaaccatttgtcaacactctgtggattatgttctttcctcggggaaagagaaagtcactctctcatcctgg

SEQ ID NO: 1884130 - DNA, 4001 bp, Homo sapiens
ccttcaaatgccatgactgacaaggagagcttgtttgtggccgtaacttcccctgaaaggctgtttgggggtcttcatttgtatggttgttatttctatacatgggggcgttcgggggacatggaagcttcattcctgccatgggagcttgtggatggacgggaacaaaatcagcaatagtatgggtgaggtgttttctaagatcactgcctgcgcgcttttcaatgaagaaaactaaaatggacccaaatggcaagatgcagcggccttggctggcccaggacactgcactgtgggatggggtgcggggtggggaaatgggggtctgtctccatggattcgttccaaacttagacccaaatcccgccgtgcagtgcgtccaagcaggctcccctcagctccctaggccatggctatcctatggcttagcccagacttccaaggaaagcaaagtctcttatgaacacattgagggaaacttctagcaaataccagtgacccgcatggcatccattggagctgccgtttttagtaactgggctctctgagtgttcttaccccagcactggctgggaggacctgcagcaaggtcttcctgagcaaaggaaccagcagagccagagagaacagaacgctacggacattccccagctggccctggacacgtgcctcttcagctaaggcctcaaccaaccctcggagggcgttcagggcaggggtcctcccagcatgctggcataccttggtcgttggcttgtgacgtctctgacacgttgacggctagctggctgctgaaggagttgacgcccatcatgcccgtgtgtgcagggttgttgcccagggtggggatctggttgtgattgcggggaacgctgtacagcgcctcggcgatgtccgccgctcgcttcaagatgatctcctgcagcaggagcaagtgggagccggcctgtcaccccaggcccggcccagctggccgcactctcgggggcccaccatggtggcatcccactgtcccttgcccagaccatgaccaaatctatttcttaatgggcaaagagcttcccctagaaaatcatttactgacgcttttgaaagtgtgcaatatctggctgggcacggtggctcactcctgtaatcccagcattttgggaggtcaaggcaggcggatcatctgaggtcaggagttcaagaccagcctggccaacatggcgaaatcccatctctaatgaaaatacaaaaattagccgggtgtgttggcaaacgcctgtaatcccagctactcgggagcctgaggcaggagaatcgcttgaacctgggaggtggaggttgcagtgaaccgacactgccctactgcactccagcctgggtgacagagcaagaccctgtctaaaaaaaaaaaaaaaaaaagggagcaacatttgctgtgttctgtcctgcatgctgtggggcgcccatccagccctccctggttcccagcggcaccaacaccgtccacccgccactgcacactgcagatgggtttcaaggctgtgcactcccgctgtgacaagttttttctgcttttgggtcctgacaccaactcatcatttctacgtgaacctagcgtgagggcaaggatgggaagccattctcacatcagactcctgtggagtcgctggaaaagcatgcttatgtccagaaagcccacactggagccacgccggctgcccacgggttctggcatgggggggaggatgggcgaggggagccgccctccacctacctggttgttgtgaggcattccgtataaggcttccaccaggtccgccgcccgcttcagtaacacctcctaaaggaagagcagacaggaggtgattcatgggaggaaccggccagttatcactgcccttcagtaccagttccgtctgcgggtgtggagaccagtccccacccacagcgacccgtcctggccctgccgtgcacttcgaaggcaggcacagacaggaaggcacgtgcgtgctgacaacactgtttgtggcctttacaaggaggctgaataaaagcgttttctgtggctcctccatccggttgggctcacagaggtgcacggacaagcgggagggccggcggagaacgagcccaatccgtgcctgaggtttaatgacggagtcttatgggtattaaacaaatacacacatggcggagatatgaaaggcccaggcaccacatttgcctgttaattcctagcactttagtggtgaagaacaataagtaattttccatatcttaattaaactggcagagtccttaaagacaacatctcacccctaattcacgccccaaatttgcaagtgagttcagtgcttattcctctttattttgaacaataaagtgaattaacttgggttaatctagttctttcataatgacattaagaaatttttcaattaacctctttgactgcatgttgtaaaggacttcataaatgccttcacattccgagagtgtgcgcgctgtgcctgggggcttggatgcaccgagttttgtcttatccacgtctgcacgcctacctccagtttacgattgtgcggattaatccagagtttagttaattttaaatacaaatgggggcttacgttttaactttctctaccttgagctgtaataaaacggagctgagctttttaataagccgaggccaggcccaaacccctccccagcatggaagacgggcagagagtttctttccaactccattcagccaggacagtgctagcacagaggtgaagagaaaaattccctgggtggctggagcacagtggcctcctgcggaccccaggcccggtctaggagagctctgcggtctaggagagctctgctggtccaccttttaggtgtggaggtgtgtctacatctgggcacctcttgttaacctgagaccccaaaggtgactggacaaaaagtaaggcaggtggccttcgctcctgggcctgtggctgtggccttcccagagagctctgtggtgcctcacagacacaccagcttatgatttctgcagattcacataagcagatttcagcctgaacctcttaatgcaaatacagtgcagtcggctggtgggaagcaggcccgtaatgactccactgttaaatctgtgttacatctgagaaggcaacgactgccttccaaggactcactcgcctcattgtttccccatctcccccaacatgccgactctggaccctttatttatcaagattaatcactacgggcatcactttttgtgcgtgccatacgttcccaggaacagcacttaatccagaaagttcccggatgggtggctctgacaatgggcatttacctctgaaattggtgccgacgcttgatgttgcatgcatctagtttgcatacaaataaagaattagacttgtcatgaagcaggtataatcaatgaaaggcccagctgtcttaatcaggtttcgttagcctgagcagctctctgtgagcaagataaagtgtttttcagaggtattaataattactcataatctctcctatcatatcgcaagactttttacatgcctttcaattttaagcaacgattaaagcaattaagattgctgcatttacaagctatttttcattcccagaaaatatcctacacctacttgtccatatggtactttgcaattggaacataaggatagtttaggaaaattacgtatgctcttatcctaatctgcctattactggatagtgtcttaactaatgaacccgactttctgagctgctcttaagtggtggtcttgtcatatcagagagacacaaaacgggtaacccaatcagtcaaggatgctttgaacaagtttgttttgttacaatatgccgagcttatgcatactgcctcatgctgtgaatacattagcaccgaatggtgtttgaaaagcatttcgatggaaatttcttagccacaaccataagtgtaattggctgcctttcaataggacataacagacttcaag

SEQ ID NO: 1884131 - DNA, 4001 bp, Homo sapiens
ctgaaactgagacagggatgaatgacatccttcacccagcagctcctcaatcctgagaatggcaaacatgcagaggggatgcatgtagccttttagcaaatgttaaaactctcctatttgaagatagatggctgagtggatggatagatggacagatgatggaggtgagggctttgccaggagtttgctgcctgagttgattaaggtgctgtgcctgcagaggttttcataatcgttccctacttcagacttagcagtctctatttcattctcaccagattttctctccaaagtgagatcatttgaccatgattgggagataaaaaaggtaaagtatttttttttctaatgtcatccctgtggcaaacccattgtctatgatgtatctgggttcagaatatcctacgagcctgccttcatgctaatgccttgcttcacctgcctggactggaccactcccatgtattaatggcaccttgattaagggatgactccagacactactgttttcaatggaccatttgactgaaggcacagaggattttgcatcctggggcaatgcatcctgttaagataccagatgggtgagaattcacagaggtttttgcagcctggagcaacgcatcctgtgaggatcccaggtgggtgagagttctacctttctttgagaaaataagagaagggtgattgtgaagagaaatggcaaaaaaagaaaagcatgagaagttgccccaaatgcattctcagacatcatctttggggaaaggacacatgaaactcgagtcaagaatctggacattaactcttttaatactaccaggcccttgtaccacctgaaaagacttcttgaagcctaagtctccactttggaaattgaaaatcaagatatttctgaataaaaagctgagaaatgtaactgctaaaagcatgagccagggcaaaacaggtcttccccagttctcctgacttaaaagagatattttaaaacaattactggaaattactaccagagaccttgatttgaaacaaccaaggtctttagtttcattttagctagacatcagaaagttttgtggggtgtgcatgggggatgtgtacgtctgtctgttcttcagtgtgtctccgtgtaagtattctgaataaaaaaaggaaactgctacctgagctgagttgataatacagtttcaaatatttatgcattagttaaatcttctctaacataggggctcctgtgtgaatctggacacaagaccccactcacagatagtgtccagtctaactgccccattgccctatagtaaaaacctgagcataagagttactattgcttcgtgactcaaaatatgatcatccaaaaggcaaataaattcaaggagatgacttcttttttgatgagattttaaaaaacaacaatgaacatttttgccaattctagttttggtgaatggcaataggaaggtaatataatttcaggactcaataacattgtagacctactctttatggcaatatggatggaaagaagtttatgtcacgcctctgagcccaagccaagccatcgcatcccctgtgacttgcacgtatacccagatgacctgaagtaactgaagaatcataaaagaagtgaatatgccctgccccaccttaactgatgacattccaccacaaaagaagtgtaaatggctggtccttgccttaagtgatgacattaccttgtgaaagtccttttcctagctcatcctgactcaaaaagcacctccactgggcaccttgcgacccccactcctgcccgccagagaacaaaccccctttgactgtaattttcctttacctacccaaatcctataaaacggccccacccccatctcccttcactgactctatttttggactcagcctgcctgcgcccaggtgaaataaacagccatattgctcacacaaagcctgtttggtggtctcttcacacggacacgcatgaaatttggtgccgtgactcggatcgggggacctcccttgggagatcaatcccctgtcctcctgctctttgatccatgagaaagatccacctatgacctcaggtcctcagaccgaccagcccaagaaacatctcaccaatttcaaatccggtaagcagcctcttcttactctcttctccaacttccctcactatccctcaacctctttctcctttcaatcttggtgccacacttcaatctctcccttctcttaatttcaattcctttcattttctggtagagacaaaggagacatgttttatccgtggacccaaaactctggcaccggtcacggactgggaaggcagccttcccttgttgtttaatcattgcagggacgcctctctgattattaacccacgtttcaagggtgtcagaccatgcagggatgcctgccttggtccttcacccttagcagcaattcccgcttttctggggaaggggcaagtaccccaaccccttctctccttgtctctaccccttctctgcttttccagggacagggcaagtaccccaaccccttctctccttgtctctaccccttctcagcttttcttggagaggggcaagtacccctcaaccccttctccttcacccttagcgacaagtcccgcttttctgggggaggggcaagtaccactcaaccccttctccttcactcttagtggcaagtcccgcttttctagaggaggggcaagtaccccaacctcatatctctgtgccccaatcccttatttccatgccccaacctcatatctctgcaccccaatcccttatttccatgccccaacctcatatctctgcaccccaatcccttatttccacgccccgacctcttatttctgcgccccatcccttatttccgtgccctgacctcttatctctgagccccaaccccttttcccacttttctggaaggtaagaacccctgaaccccttccttccatttctctactctctcttttctctaggcttgcttccttcactatgggaaacttccaccctccattcctccttctactcccttggcctgtgttctcaaaaacttaaaacctcaactcacacctgacctaaaacctaaatgccttattttcttctgcaatgtctcttgaccccaatacaaactcgacagtagttccaaatagccagaaaatggcactttgaatttttccatcctgcaagatctaaataattcttgttgtaaaataggcaaatggtctgaggtgcctgatgtccaggtattcttttacacatcagtcccttcctagtctgtgcccattgcaactcgtcccaaatcttccttctttccctcccgcctgtcccctcagtaccaaccccaagcgtcactgagtctttctaatcttccttttctacagacccatctgacctctcccttcctccccaggctgctccttgccaggccgagctaggtcccaattcttcctcagcctctgctcctccaccctgtaatcctttcatcacctcccctcctcacacctggtccggcttacagtttcgttcagtgactagccctccccctcctgcccagcaatttactcttaaaacggtggctggagctaaaggcatagtcaaggttaatgctcctttttctttatcccaaatcagaagcgtttaggatctttttcatcaaatataaaaacccagcccagttcatgactcctttggcagcaaccctgagacactttacagccctagaccctaaaaggtcaaaaggccgtcttattctcaatatacattttattacccaatctgctcccgacactaaataaaactccaaaaattaaattccagccctcaaaccccacaacaggatttaatgaacctcgccttcaaggtgtacaataatagaaaaaagttgcaattccttgcctccactgtgagacaaaccccagccacatctccagcacccaagaacttccaaacgcctgaaccacagcggccaggcgttcctccagaacctcctcc

SEQ ID NO: 1884132 - DNA, 4001 bp, Homo sapiens
tcccaccattggccattcctggggttccccataggaccctctccacacactcctgcattcttcttaggctggggtccatatgaacaggatgtggttctccatgacttctgtttttctctttctagtggggcttaaatggtacaatcttttatgatttacattccatttttcaagtacaaagtgaagtttcttctagttaataagtcctgtttgaagagtaagagttctgcatacaaagtacatgtttcactctcatcggaaaccaagttctcagaggagttaatctgtagctaattcaacaattgcagagtcactagctttgtacaccaaatactgtcacccgggagacaaggggtgagaaacagcaggctccagtctcccattaaagctatattaaaaaaaaaaaaaaaaaaaaggaaggaagggagggaggggcatattttagtccagatacattggtacagcctagatgcccaattcctaaacatctgttagtgaaactagttacagatgatgttgacgagcaaatcgtagccttaagaattatctcaagacaggacagatctggctcacacagccaggtctgaatgactaaccctttaggaaacctctcaccagggaattctggctgtgccgaaaggccctgcgaggttccacagagcagtattttcctccccagaggagatggcatcatgggttttctgctgaaggaaaaacgccccagtggaggccaagggaaaaagcttagagcagacactctcctaaaggattccaccctggctgagagtggacacttttctaaagaattccacctgagccagggcaacaagcaggttcaaaactggcttttgaaactcaaagccactccgtgaatctccaacctatcttggtgggaactcatggagacagatccagagaagagatccgacctctcgcttaagaagtgtgaaccatgacaagggtggtgcagcccacggtccccatcacagtgaaggcatctaagagcacagagagacaattgtgactggtctggtccggaaggcttcatgtttgcgtaacactggagcgagcttgagagatggtcaagatttttgacaggtagggaaagaaaagggtacagggaaaaagagtagtagatggagagaagagaaagttatttttgtttgctccagtgggaagagacagacacatcatgaaagatccagcaggaaacacagactgacccccaaatacagaaggcctggagcaccagactcaatggtctgaccacattccaaaggcaatggagagccactctttaatggagagaacaagatgatcaaagaaagctacatgattaaattggcttaagtaatacatgatggatgagaagaagtggagagaaaaggctgctgcaactgtccagagataaggccacggggcccaacacaggattcagaagaaggaaaggaaaggaagggaaagatatgaggaatgctatgcaggactctgtaactgcagacccaggaagtggaacaagaagaggaatgctcccctcatcctgcatcagccacgatgctgttccctgcccataccatgctgttccacacccacagcctcactcaggcgccttccgaggactcctcgcgctcccacacccacccagccaattgtttcttgctctttgaagctctgttcaatttctcggtgaaagccccttccctggagcagacacacttccctatgcccttgaagcatatggcacttcttaaagggctgctgtcttctgctcgtgcctctgggcacccactagactgcacattccccagcacagggctcatgtgctatgcgtctctacccaccgtgttcacatagcacctgaaaacagtcaatcgagtgtagagcttcagcttgttgtctctaaagtcaaactgaactggtgcaaatcatcacagaggtaaagtaacttccacttggctacttactccctgggtggccctgtggaggtcaactcacctctgcaatggtcaggtttctcagctgttaaaagtgggtcatcggtctcggtgcagtggctcatgcttgtaatcccagcactttgggaaactgagacagaagtattgctggagcccagaagttcaagaccagactgggcaaactagagagactacatctcatctctacaaaactttttttttttttttgagatggagtttagctcttgttgcccaggctggagtgcaatggcacgatctcggctcatagcaacctccgcctcccgggttcaagcgattctcctgcctcagcctctcgagtagctaggattacagggatgcaccaccacgcccaactaattttgtatttttagtagagacggggtttctccatgttggtcaggctggtctcgaactcctgacctcaggtgatccatccgcctaagcctccccaagtgctggctgcctaagccttccaaagtcctgggattacaggcgtgagccactgtgcccagccctacaaaacattttttaaaaaattagccaggcaaggtggtgcatgcctgtagtcccagctacttggaaggctgaggtgagaggatcgcttgggcccgggaggtcgaggctgcagtgagccatgatggtgccattacactccagcctgggcaatagtgcaagaccctgtctaaaaataaataaataaataaaaagcagactatcacaataccttccgtgcagagttgctgtgaggatgtaagataatgcaaatataaacgctggcagctgtgcttgcctaataaatgttagccaatattactgttagcattgaataccaatttgttgactgcatggatgattggatgaataggtggagattccatctttgattttttacgtagataactgggatcctgggaatgacattagcaaaggtaacaaggaggacaccacgtgggtggggaaggaggaaaatgggcataatcttggaggggctgagttaacgatgtcagccaagcatcataccccgttatggggcattggccggagtggggtttaggtctccagaagtctcatgaatagaacccctaagacaatctgtagcaggaagagggagtgaaccaatcgagaactggtggcttagcagcaaaatacagacaacaaaagagaaagacagagactttttgaaaacaaaaaaaaatctcctatttgatcattccgaaatagccatgatatagtaataatggcagaaacagaactttgttggatctctttacatttattatatggtttaaaatgcttaatttagttctttaaataaagaagaaaagcaatgtgctctgcaatgtttcagtgctttgggcctgtaacgatctgaatccagaactgggtagatccaggctggaggcctagagggagaggtcagattcagaactggaggtggcaggtgttaatccaccaaagggctggaggcatagttcctagtgagagacctgcaagcctagagctggaactgggctgggaacccaacacggcgacatacagaaccagccaggaattttcgctgtgtgtccggggacctcccctgggcttgtcctggcttgtgttattggccggggggactgcagcatacatgggtgagtgaccagagggcttcagcatacagagtcaaggtggccgtcacctcctgcaagtgccccagcctggcacatattaacaaaggcatcccagtccgtgctagaaaccaagatgcacgtgaaagtgttctggaactggttccacggcctctctccacccctttccccaggctgggttttggggctctgtgtcactcgcagagatgtggttccttttctgccagacactccagctctccattctgagatagacggcatgcaggtgtgctcactgactgacatgcacaggaccaagccagacaccagcatggatttgtctacaaagctctagaaatacagagccgagtctccagaacggcagtaccaggccgtggaaccgggccgcacaccagga

SEQ ID NO: 1884133 - DNA, 4001 bp, Homo sapiens
tttgcgccccaagccccacctctgatgaaatagcaactcaaacactgtgggtccagcaactgtgggactttaaactgggcttaaggaaggtggccagacatttatgcctacatacagacaggtgtgtgtatgcgcacatctccgcctttggcccactgttggcttcttcctgattttaacacaacttttaattttattttattcatgtttttgaaatggagtctcactctgtcactcaggctggagtgcagtggtgcagtcatggttcattgcggcctcaacttcccagtctcaggagatcctcccaccttagcctcctgggtagctgggaccacaggcacgtgccaccacacccagctaatttttgtattttttttttctttttggagagacgggatttcaccgtgttgtccaggctggtctcaaactcctgggttcaagtgatcctcccgccttggcctcgcaaagtactgggattacaggcgtgagccatactgcctggacaacttcttttttgtttttaaagaaactgtaaagaggccaaagatttaggacaaaggagctcattaccatctttggaaataactttttttttttttgagacggagtcccgttctgtcgcccaggctggagtgcagtggcgcgatctcggctcactgcaagccacctgccctgggttcacgccattctcctgcctcagcctcccaagtagctgggactacaggtgcccgccaccacgccccgctaatttttttgtattttcagtagagatggggtttcactgtgttagccaggatggcctctatctcctgacctcgtgatctgcccgcctcggcctcccaaagtgctgggattacaggcgtgaccaccgcgcccggccggaaataactttttgagggaagatcttctctttgtatttgaaaatgtgtcagtaatagtctttactagttggagtggggaagaaagcttttaatttcacttttgaattgttgattacactggttccctccactcccttgcccccatctttattctgttttttgtttgtttatttttcttcactttttagtaggagagtcttctttaaaaacaaattccctagggctgggtgctgtggctcacgcctgtaatcccagcactttgggaggcagagatgggcggatcacaaggtcaggagatcaagaccatcctggctaacacggtgaaaccccgtcactactaaaaatacaaaaaaaaaaaaaaaagccgggcgtggtggcgggcgcctgtagtcccagctacttgggaggctgaggcaggggaatggtgtgaccccacgaggcggagcttgcagtgagcagagagtgcaccactgcactccagcctgggcgacagagcgagactccatctcgaaaaaaaaaagaaagaaagaaaactaggtgaatagtaacgagtttattagccacaacctatttgtaatgtcattcctgagaatttgcaaatagccctggaggttacactaggaagtttcttgagttgacatccttgatcatagtcttttattagcaggatataatagaactataagctcagaccaccttagcatttaacaatgatctatcataaaactgcaatttggagaggtggatgtgtattacacacccctcgtttaaaaaacatcaacaaagcaaaacatgctgctctttttaattgtgactcatctcagttatgaagaaattaattcttaagaaagaatacggtgtcttagttcgttttctataacttataacaaaatagctgaaactgggtagtttataaagaaccttttctttatttcttacagttgtggaggctgggaagtccaaggtggaggggctgcatctagtgagaaccttcttgctgtggggaactctttctgcagagtcctgaggcattgtggggcatcacatggctggggggctgagcgtgctcatgtgctagcttaggtctcccttcctcttaaaaaaccaccagcccactcctgtgatgacccattaatccacaaatgggttaatctattcataagggcagaacccttgtgattcagtcacctctaaaaggccccacctcacaatactgccacattagggattgcatttcagtgtgagttttggaggaaacaaatattcataccatagcacagagttgtccttattatgcacactgatagagatgatcagaaaataagaaattatgtttaaaaacacacatacaatgaaccacaaacaccctaattcattcccaacatatgagtgcttgaaagatgttttcttccattggaatgtgcctggttatctgaagcctgagtgtgacctgagccaaccatgtgacaacgttaattactgatgtgcaaaaattaaagaacactcaattctgcaccatcatctctgaatgtgggcactttcccagaatgatgaggaacattatacagtatgagttcaatccccctaagtctgacagtgaactgaaattagatggttgttcaaaacagacttccctctctgtttttcatcttactattttcatctcatctttttcttttacaattggcttcccactttctaaataaatgttgccataccccagtagctttagtgcaatgcctaggatcattttggcctgtgttcctgatgcttcattatctcgtttgaatgaaagagcagcactgggtcctccaatttcagtaggtgctattcagggcacctgttggcttgacatggtcatgggtttgagttgtgaaatatggacccttccatgtgggtatcagcacagagaaagcacaggacattagtggtaggaaagaaaaaagaaacaatacctttcccctagattccagtgcattattttgtttcccttccacttacttatcctcatataaatgcaagtgttcagagctagaaacctcaaagatgcttcctgaattcaagcccagcgtcttcaatctggggcacagagtatgtgaaggaagctgcaggatacaccccagcagttctgtgtcattaacagtatttcatacaggaatagcttctaaattcaccttgtaagcatccacagtgaatctgaaacaagctttctgagatttccctttctaaggtgatttggtgtatgtgggttctcacatcagtgaagctaggaaatccaagctacaagagttaatctctgtttcaaggcgggtaaacaccttaatgttttctgagactcctggtgctaattttcatgtttaaaatgcccacagaaatatatattaccctttgacaaaaagttaccaaaagattcaaagaaggaaatgacagtattcctttaaatgtgttagtgtttcaaagtcttgctaagaaatagtagaagaagtattactaatactacttgctaagaaatattagttgctaatactattatacttgctaagaaatgttatttttttcatattcttatcctgagaggagtaatgggttggccatgtagccttaaatctttatccttaggacaccctggatcttaacctttaaaaatcagacttattatcaaataaatgtattcagcctagataaatttaaaatgggcacggaagccacgaagttatcagctctgaagtatctaaagttgaaccctttcccatgacctaagattctcagtaatttagtaataaatgacttaccagtggttctcaaacttggctgcacgtttgaatcactggagaaactataaagaacttgttacgcctaggccacgccgcaggccaatcaaatcataatctccaaaaatgttccagttattagtacatttggaactcctcagataattctagcacgtatctgagcttgagacccattggattaggccgttcctgcattgctatacagaaatacctgagcctgggtaatttataggaaaagaggtttaattggctcacagttctgcaggctgtacaggaagcatagtgctggcatctgctcggcttttagggagacctcaggaaacttaca

SEQ ID NO: 1884134 - DNA, 4001 bp, Homo sapiens
aaagtgctttaaaatttattccttccttcctgattaaaaacccataaggggaaggatatggtagcttacgcctgtaagcccagcacttcgggaggccgagacgggtggatcatctgaggtcaggagttagagaccagcctggccaatgtggtgaaaccccatctctactaaaaatacaaaaattagctgggcatggtggtacacacctgtaatctcagctactcgggaggctgaggcaggagaatcacttgaacccgggaggcagttgcagtgagctgagatcatgtcactgaactccagcctgggcaagagcaagacacttcatcaaaaaaaaaaaaaaaattccataaggttgtaaatttttgtaaggatgttgttgcgggattgtacgaccagtgttacctcccatttaccgtaagatttccacattattttccaaattctgttttgagtttggcagccaccttgccttactccggcttcttggacgatagagctattcagggttacttttggtcataatctgggtgtagaataattaacatagaacattcctgattgtattccctgttcttattttaataaattgtcagtttctctctttgggcaagttctcacattaactgaacaaattgcttcactctagtctcattccttttgtgtaaaaaagggacctctatagtgtctttcaaattgaatattctattacaggcatttttaaatatttttaatgaaatatttaagggaaaaaagtgaaactgtagagtaataattacatatgggagactctgtgatgtcatcctagttgacctagctcacacctttcattttttcctcttcccacaggtgtgtagaccacactccaaaactgaaactgtggatggcagccatgaaggaagatcccacagtctcagccctgcttactagtgagaaagactggcaaggtttcctagagctctacttacagaacagccctgaggcctgtgactatgggctctgaagggggcaggagtcagcaataaagctatgtctgatattttccttcactaatatgaataatagcatgcttttattttaccaaggttcaggttgcatgggatcatcttctctgactgatttgacatcaacagccaaacggtgggggtctccttaacgcccccctacagaaatgaaaatgcatttcctgtctcaggatgctgaaacgactctgagggttctatcatagtccatgctgaaaacccccaaattatcatctttagcaaaatctggacttgaatcttttttttttttttgagacggagtttcactcttgttgaccaggctggagtgcaatggcctgatctcagctcaccgcaacctccgcctcctgagttcaagcgattctcctgcctcagcctcctgagtagctgggattacaggcatgcgtcaccacgcctggctaatttttttgtattatcagtagagaaggggtttctccatgttggtcaggctggtctccaactcccgacctcaggtgatcggcgcgcctcggcctcccaaagtggcatgagccaccgtacccgtccacaatctaactttataactgctcacaggaaatacccactcagttaccctgttgtgtgatttcatgagatgctctcttgttgcttgtcttctggtttcttagttgagaagctttcaattcctccttctttcatttccatcatcaacttaatttcacattctctctattgttggccctgaagaccagacgcacattacccgaaagctgggtggctgggcagactcctatttggtctccctgtctctaaccccttcaaatccttcctatcaaatcccatgttgggcacataggtggtgtcccatttatgtaattaaatactgtgtaggctgcatcagtcaattctgcctacaaggttgatgagtaataggtaagagccccactgagaaatagaaatgccatcttccacacatttccatagcccactgggttgctcactattcaatttttattatcacatcaccaccacgagaaggtaggtcggagagcaatcatttcattctatagatgatgcaactaaggtcccgaggttaagtgaggccttaaggtgctggcagaaagatcacacccagcgcactgctcttaccattggaatcagggctgtcggtccgctccaattgtctggtttcctgaacttattttcaagttcgccattgagagaaacctccgaatgactaattcttaaatttaagggtgcataataatcacctatggctcaccgctgcatttccgattcagcaggctggggtgggtagcgaagtctgtatttcaaatgagcccctcaacccaggtgacgcaggcggtgtggggaccgcatccggagggcgacctggagccgactgacttcacaaaggcctcctgccgcaaaccttcagcggccaccaaagccccggctgccggcggcggaccacctctgctgccgcgcgcctaccggagccgcttggccctagtgctttccagcggatttcccctcaggtgcggagccgggtgccggggtcccacagccaaccactaccggttcctctttcgtcagccaccggcgccggcaggacccgcgaatcccgatctccaggagcctgtaaggaggccgcccattggctcagccgcactgctgggcaggtacttccaaagctttgaggattggctgatgctctgggcgccggggctagttggcgggtaggatcacgtgcgaggggcaggccccgtctaggccccgcctccttgctgctgctgccgccgccaatcctggtccggttgcccgagttcccggaggtctctcgcgggacctctctcaccgccaccggtgggtccgttcggcctgcgttgtattggaagggaagaggggtttgaggtcaattctgtttcctggggttttcacgaatttcggggcccacagtaggcttgccaactttaacttttgcctaacactttacgagaaatcctatttagccttggccactgttgcatcaaagaatttcacatccaacaaagtgcagcctaagaataaagaacaggtctttaaaccgcatacctttaattaaggtgttcttattttttctgatttggctggaaacaggcagagaccaccccagataaccagttctcagccttgcgtgggacaccacgagtcccacgtgtttacgtgtttaaggcactggcaagcaggggaatttggtttctgggaatgtgctgtctttgtgaaaactgtgaaaagtcttccctgctacattgaaataatcataaaataataatagctaatgttgaacacttactatgtatcagacacatgctaagcattcaatatttctcatccagtttctgaatgaaaccttcgcaaaccacataatgtactggtactattagctacgaattacatataagaacacccgaaagttgttgtcatttgcccaaggtcacccagctaataaatattgaagagattcgaatctagcctgaactcttacagtaagaccgttcgtgagatgaatttatatgtgctatttttccagtctctttatccaacagctctgacagaggatagtatctaccttttttttttttttttgagacggagtctcgctgttctgcccaggccggactgcagtggcgcgatctcggctcactgcaagctccgcctcccgggttcacgccattctcctgcctcagcctcccaagtagctgggactacaggcgcccgccaccgcgcccggctaattttttgtatttttagtagagacggggtttcaccgtgttagccaggatggtctcgatctcttgacctcgtgatccgcccgcctcagcctcccaaatcgctgggattacaggcgtgagccaccgcgcccggcctgtatctgcctttttgaccacaccattattcgtgggatttaacaggagttaatgagttaataatgttccttttccaaactcagtggttttgatt

SEQ ID NO: 1884135 - DNA, 4001 bp, Homo sapiens
tcagcctggaggtgagcagggggaataacaggacccaaaagttcaggaagcagccatttctgactcctctaagggaggaagaaggggctgggatacaggtggcccaaggacatcatttccaatcactgtacaatgagtatttgatgaatgagtgaaattagtgaagtcaacaagaatcagaggcctaaaagaagaaagcacatcagcttctaagacttccagacacaaggttaaaaaaaaacaaaaaacaaaaactgctagtcacagacacagacacaaaagactgtgtggcagagaattttcttaaagcaatcactgtctatttgatatggcatttttttaaaacactttgtaatttattttgatggaagatttcatcttcataagggaagaaaactctttaatgtaaacactacacattaattgtcttataagttctaagaagggaggaaacacaccttccatttttttaaatagtccacaatctaaggctcaatacacacttgactgaaactgtggactcctccataactgagctgctacattccttaattcatttatttgttcattatatattcattgtataatcattacaccctcacttccaacaaacgctgagcactctttctttacttggaaccatggggttttaaaaattaaaaaacaaaacaaacaaaaaggtgacatcatacttctggggtcatgtaacctggtaagaaaaagacagccacaaaaacaagtaaatgtaaaatgcattttatttaaaaatgtaacaaatcaggtactcacacaatgtaatagaagtccaggggtaggggagatgaattatagcagaggaatgggatgtaggatttcatgggcctttgtaagggtggtataatttgagctgggctttggaggaagggttaggctcctattgtagtgacagaggaaacaatattctaaacagaaggagatagtctacttcagaggtggtgccacgtgacctagaatcaggagaccctgcgtgccctgccctcctggccagctgagcctcacactggtattggatgttgtattcccactgcagtgtgtctcagtgggaaggccccccacgtttgggatgcatattttgccacggagatcatcttctggcagtgaatgacctgaaaccccagagcctggaggaggtctccctgtttcttacccggtccatccagaaggaggtgagtcgtactgaccagccctgaacagggcaaatcagtaccagaaggaaaaagatcagggtcttagatggagtctgagaagtaccctgaatacaaataaggttcctcattcttccaccatcaagtgcaaataacagaatgtgctttcaggactctttcaggattctttcatatcaagtagcatttggagaaggcactgagctaagagacagagcacctgggttcaggacctcagatcggcatgatgtagcaaaaagagcttgcatggaatcagactggtgcagggattccaaaacagctccttcaaccaatttgtgcctcagttttcttttctgtaaaattatgactaatgatggtgctggttgttggataattaaatgaggtaatatgtgtaacgtgcttacaaaggtgactggcacatattaggtgctcaataaagctactagttacttttacttctactacaactgaccatggaatgttattcaagcccattttttaaagcctcagtttcattatctcagaaatcgtcacagccctaacttcctcatagaatattgcaagaattaaacataatatgtggtgctgggcacggtggcttacacctgtaatcccagcacttcggaaggccaaggcaggagaatcaattgagcccaggaattcaaggttacagtgtgctatgattgcaccactgcactccagcctggaagacagagcgagaccctgtctcaaaagaaaaacaacaacagaccacccctaatattatatgggtatgcactaagtatgttgttttttcaaggactagctattgtcctgcatatcactgcagtcttcatgtgttaattccttccctggtctacttttctttctaactagccctgtgaccttaggaaattcactgccttctctgggcttcagcttattctcactaaagtgagaggctggttttcaaactgtgcttcttgcatccccaggatggaggtgaaaggagaggagaggaaggagagagtatgctgggtcttcaactggagaagcttacatttatcttttatcttttatgaaaaaaagattagtccaaaatattggactttcctgttagctttccttaaaaaacagttctttggcttcaaatttctgaaaaccattgtattagatgatttccaaatttcttccagctctaggaattttgtgattgtgtagcatatctatattaagaacacatcttatctcttctgcactacgtaataatcccattggtcacacaaattgtgccatccctattactcattaccctaaatgagtaattccagtgaggataagtgaatgagttgtctaagatatataactagttagtggcagggcaagtacacattcgttcactttcttttttttttttttttttgagacggagtctcgctctttcgcccaggctggagtgcagtggcgcaaactcggctcactgcaagctccgcctgccgggttcacaccattctcctgcctcagcctcctgagtagctgggactacaggcgccggccactacgcccagctaattttttgtatttttagtagaaacagggtttcaccgtggtctcaatctcctgacctcgtgatccgcccgcctcggcctcccaaagtgctgggattacaggcgagagccactgcgcccggcccattcactatttattgagcatctgctgggtgctgtatactgtgctaaattcaagagctacaaaaatggcctcagcctgagctgaagctcacagattagtggatgaagcaggcatgttatgtgctacttgctatacagtgtgtgccctgagatatgaacacagggccataggatcacagaggtagaatggagtaaatctacatgaaggaggccaggaaggtgtctcaaagaaagtggtgtttggcttaggttttgaagactggataggagactgcatggtggaaaagaagtagatttcagggccctagtccaacaatctggtaactatagtacattttctctgccaaagatccacactgggctgggtgtggtggctcacacctgtaaccccagcactttgggaggcggaggtgggcagatcatgaggtcaggaattcgagaccagcctggccaatatagtgaaaccccgtctgtatgaaaaatacaaaaaattagctgggcatggtggcgggtgcctgttatcccagctactggggaggctgaggcaggagaatagcttgaacccaggaagcggaggttgcagtgagccgagattgcaccattgcactccagccctgggaacagtgtgagactctgtctcaaaaaaaaaaaaaaaggatccacatacactggggccaagtggtcaatataagcttctgaactcttctgaaagttaccaaacactactctgacccaaagatccaggcattaattcagaagccaagaaaagggtttttgcctgtgagcagatccaggaactgtacctgggtgttgctgactgcagtttatcctgactgcctttctagactgtggagtcattgcatttctcttgtgctcgttctgccttccctttctaattgataacagcccctacatgctattgagaaatatgcagtattcatcttcatgattatctggaagatagaaaattcccttactttcccactgcctccattcctgatttctttgtgttgatgggtatccactgctcttttaaaattcaaacacatagtccctggaaggaaaaagaatattggaaaagggagatatggaaccaaaggaagaacagccattggcccttgatgtt

SEQ ID NO: 1884136 - DNA, 4001 bp, Homo sapiens
attagaaaaaagactcagaaagaccatgtgaacatatcaacagagttgcactgagataccatagccaattttttttcctgtttctttatactttttttatggtggtaaaagatacataacatacattttaccatcttaactatttttaaagatacagttcagtggcatgaagtgcattcacattgtgcaaccatcaccaccactatccattggcagaactcttttcatctagcaaaattgaaactgtagttaaacaactcccttattttccctccatgacctttctactttccatctttattaatttgactattctagaaacctcatgtaagtggagtaacacaatattcttccttttgtgactatttcattcagcatgatgtcttcaaagtttatcccatgctgtagcatgcattaggatttccttccttgttaaggctgaataatactccattgcatgtatagaccacattttgtttatctacttatctgtcggtaaacattttggttacttctacattttagctgttgtaaataatgttgctatgaacatgagtatcaaatatctgttcgagtccctgctttcaattctttggggtatatatgtagcaggggaattgctagatcatatggtaattctatgtttatttttttgaggaactatacttttttgtagtttgcaaatctttcacagtaaacaggatcacttttgtaagacaagtaggggaaaaagccttactttatgccctcagattagttcccagtgttgagctcatggtcaaagtgtgaattagaatagtgaatgtgaaagtaaatacagtactgaccctagggaactgaactcagcaggtagtagattgcttaccactcgttcagtgttcatctttagctcagaatttatcttaatgaggcagagggatggtagcaagtggttaggagactgagcatgggcttcagaccaggatccaaattccatctctcccacttactgtgctgtgtgacctgggacaagttactcaaacctcccagggacttggtttcacctcctgcaaataaggctaacaccacctaccttgcaggtttaagtgaggattgcagtcttgcatgtaaaatgcttagcccagtgtgatagttacttttacatgtcatcttgactggatcacggatgcccagatatctggttaaacattatttcttggtgtgtctgtgaagttgttttcagaaaagatgagcatttgaatggatagactgagtaaagtggattgccctccccaaagtaggtgggcagcatccagtctgttgagggcctaaatagaacaaaaagccaaagaaggaagaatgtgtcctgtctcctcctgcatgcttgatctgggatatcttctgcccttggtgctcctggtgctgaggccttcacactcaggctggaacctacacccttggctctcaggccttcaggctacaacaccagccttcctgctaacaagtctccagcttgcagacagcagatcatgggacttctcagcctccataactgcatgagctaataccttataacaaatccctttctagatgtaaatatatgccattggttctgtttctctgaagaactctaatacacccagtaattaacatgagtaaatgctcagtaaaagggtgactgttgttattgctgatacccagaacaccatgacatagaaggtacgggtttgaggtttggttctttcttaccagtaaggtgcccttattccagtcattttttttttcttttctttttcatcaatgattgatgaacataagtatgagggtaaaatggcagagcaagcattagactgtaaatctagagacaggttgagccctctttttaccagtgccgaggtgagtttcatgttggaagcttcaggagcagcttcatttctgctggggcttctcccgcctttttccccctcaatgggaaataacaggtttcgttattttcattggaaaaaaaggcagaggaaaccccagacactgcacggtttttaggccctagcctcaccagtctcaagcctcctatcaaggagggccatatagtgcctctgatctgcttgatgcagaccctagggtccttcccactcccatgagccacccaccagagtgagctaagaaatcaactggcagagagcagagtcacgtatggccaagaggaattgttctgggggttgtttagtaagcaggagagagggaggagaagaaaaactgcacagggatcagatgcctccagcagaagaaagcgaggcatagagatcccttaccatctgagtcacgtggcaccaaatatgttaccagtggcaaatcagtagacacctgcagcaacctcaatcttgtctcctcagaagaaaattcaactgggggcataaggcagaaaaagtgaccgaggcaagcttcagagcaggagtggaagtttattttaaaaaactttaggccgggtgcagtggctcacacctgtaatctcaacactttgggaagccaaggcagccggatcacgaggttaagagatggagaccatcctggccaacatgctgaaaccccatctctactaaaatacaaaaattagctgggcatggtggcgcatgcctgtagtcccagctactcaggaggctgaggcaggagaatcgcttgaacccgggaggcggaggttgcagtgagttgagattgcaccactgcactccagcctgggcgacagagcaggactgcatctcaaaaaacaacaacaaaaaactttagaacaggaaagaaagtagagtatgcttgggagagacctaagcaggcaacttgaaggacaagtgctccattttactttaaggaaaattaatcattctttctgtttcaaagatgctgggtaaaattgaaattgttgttttcccacaaggtgagcaaataatgagcatctactacaggaaagaaagtccatcaaaaaagccaacaatggagaggctcacagcccctttccaatgtacaggaatctgaaactgagactgaggcaagagcagcctagaccagaacccagacactggccctcctgtgcaaacaccctctactccaccaagcctcttcctaaagcccaaggtggcgacatgttaacctatctgtgcacgcttctcaattgatttctttcccaatcagcctgataatatgtgactctagcacagcaaagaatcatcaacaacagaaccttttaattttatattattattattattattattatttagacaagatccttctctgtcacccaggctggagtgcagtggcacgattatagcccacagcaaccttgaactcctgggctcaagtgattctcccacctcagcctcctgcgtagttaggactacagggatgcgccactatgcccggctccttgttaacaacttttaaaatttttgtagaaatggggtctcgctatgttgtccaggctgatcttggactcctgctctcaagcaatcctcctgcctcagcctgccaaagtgctgagattaccaggcatgaaccactgtcctggcctaattttatattagaaatgctttcagtgtttgggaatgattgtatacaggattaaaaaagaagacaaatgctttcagtgacgtcagataaaggataagggtagtagttggatttttatttgcaacacatctcagggagctctttattatccagaagcctaaacttcatgccagcatcggttttattacctaagagaaccacagattagaacccaggagaaatattttctctgtttacaatgggtagattgatttttctttggggtgtttgcataactaaactaagcactttgtactacagtgatactttatatttttatacctctatttttcccaaacattttcgtattcaaagtgtatgtgaggcataatatagcgtagggggttaaaagcacagactttggagccagactggttgggtgtgaatcccagctctgccacgtagcaattctgagactttgg

SEQ ID NO: 1884137 - DNA, 4001 bp, Homo sapiens
atttgaaggtgttgaaatgtcaaaccctagagcaatgagaattatggtcactcaattaaagttacaaaaggattttaattagctctgctctaacataagcacagtaacaaagtgagacaatagtccaacacctctcagaaacagaaatgtgggacttggataatttacagattgaacaattagaatttttctaaatacattcaataaccaaaaaaaaaaaaaaaacccttctgttattattgcctgataccaaggcaacattgattgaggtaaaagatgtaccagctgcaatcagaaccatgttgacaggtatttataaacacactgacactgaaggcatctcctgatagcttttcaaattaagatattttgttattgctgatgcatcagatagaattttttttttgcctctccagcagccatttccattctccctcccttggtagcttacaaccagttttgtccaaacctttgccaccttgtgcttcatgggagctgatgtcttcacagccctagataatgaatcttaattaacattagtcagtcatgggaagtctattattctatccagtggttggcctacggaaaggcagacaacagaattctggccaatgagacagaaggaattatcttcttctcattcttgcaaggaatctgagaaaagggcctactttcttccattctttggacacgtgtgaagatgtgatgcttggatctgtggtagccatattgtggcagccatattttaagcaggaggtggtagccatactgtgaccaggaagtgacaagtctgagtgcaaaagccaatgcaatgacaaaagagaagggtggaaagaactgagtccctggtggtgtatttgagctactgaatcaaccaacgctgtgagggccttactggtagactctaaaaaaaaaaaaaaaaaaagaagataataagtaaagttcctgtattggttcagccacttgaattttgtcctccataaccttcagctgaattcatcctaagtgaagctattgatttcaagatttaaggagagcttttccagcattacaggctactttaatgttatactttactgtgacttctcaagctactgttaaaagatgttgtaaattctgttactgatttttaaagatgaaaatgcccaggctaataagaaatgatatcaagtgcaaatttctttattcagtatagatttattttttaaaaataagcactcttgagaatttgacctggttaacgttacctctccaaaccacagacaagctttttttttttttttttttttttttttttttaatagctttcagttccagacccgacctactatcatgattgatgacagaggatttttctagcatacttgctttgtgggtcacatgagctgaagaaatttccacatcggctttcattttgaaatatgttgcaggaagaatgtggcaagtgttttcagctattcttacttgtatatatttaacacccattttagaaaagatatatttagtaattccaacttatttatgactgaaagaataatgatagtgagaataattattctgactttagtaaatatttgttggatacttgtaatgtaccagggattccagggaggaagtgtaacataatgccaaaaaataagggctccagtctcaaacagatgtggattgtggccttgaaaggtattgtgcatttcccagaaaggaacactgaaatgggagaatgtgttccccacttgattccaagggtgagtagccgggatttcctttcctttgcaggaatttctcctgggagaaggtaaagctccttgcccacaccctatttctctccaggtaagtggttttcctgacatgggaagaactatgccatggttgagtaagtcgcttctactctccttttgcttggagagggctctaagactcagtgcatgagaagtcctgctggtcaatcacagccccggagagtctgaccagggctatggttgaccagcaggatttctcatggagtgagtctgtccaattcagcctagattttatcagttataaagctgactttttaatcttcataaatctaactcctgcatgcctttcagttgaatctgaactcctgtgagggtggagctattgtccctagaagccctatgaaacactagattagatgccatgctgctttttttgcacataatatcaggtggcagggttgccatgggaagggggcaggtatctttctcattttgatttttttccctaaaaatgtgtacaaaatcccttgtctctgtctcttggaaccaatagttctcttacaaattgactcctggaaaccttaccttcctattcattagataggatctgaaatctgccacaatggcaacaaaagcaattgctgctgttttctgcaacctcactaaatgctaggtaggggtgtctcacaattgtatgtgagatgaagtgacatgtcaaagccaagcagaattctgcaaagttctcactgcatgtgcagctagttctgctagtgttctgaaagaagcacaggcataggaacattgttccacagagcctaggcaggagtgaaaatgtcaagcactgccctcggtagctgtgactgcaaggatgttaactaatgggcaaagaggggaaaaatataaaagtggaatgttggtgaacacatataaaacacctcacttacatccagcaatacttggaggagaaattttaggaggtgattttgggttatgcaatttaagagctaagatcagcatgatattaatgtgaccccaatatgactcatgggctggaaagaataagggagggtggactgcagtaaaaattgtcatgttgatatgctggtgtcataatgctgggtatgaattcaattttggaacattatcatgagtttttgtgcttaggtttgaacataacttttatttatttcctattcttagaaagtaccttaaattgtatcactagagcatcagggatctttcctcttgcctaccggcaagtcttgtaaaagaatcattcggatcataggccttgagaatggttctgatccatttcctgaagcccagcctgccatactttttggaggggatgtggggtaggattcccagctaaccccagcacaagtgccttcatatccaccatcacacccccatcatactcgaatcacacctgcatcatgcccacattgtactctcatcacacctgtcatcataccttcatcatactcccattacacctgccattgtaccgccataatactcccattacatttaccacatactcacatcataatcccaccacacctgccatcatatacccacaataccacccatgacatctgtcatcatacccacatcatagtctcattacatctgccattgtaccgccataatactcccatcacatttgctatatacccacatcataatcccaccacacgtgccatcaaatactcacaatgttaccttaacatctgtcatcatacccacattatactctcatcacacctgccattatacctttgtcatactcccatcacacctgccattgtaccaccgtaatatggccatcacatttaccatatacccacatcataatcccaccacacctgccgtcatatactcacaattctaccatgaaatctgtcatcacacccacatcatactctcattacacttgccattataccttcatcatactcccatcatgactgccattgtaccaccataatactcccatcacatttaccatatacccacatcaaaatcccactacacctgccatcatatacccacaatgctaccatgacatctgccatcatacctacatcatactctcatcacacctgccattatacccacatcacaatcacatcacacctgccattatacattcatcatactcccatcatatctgccattatacattcatcatactcccatcatatctgccattatatgcccatcatactaccatcaaatctgccattataccctcagtat

SEQ ID NO: 1884138 - DNA, 4001 bp, Homo sapiens
agagatggggtttcaccatgttagccaggatggtcttgatctcctgacctcatgatccacctgcctcagcctcccaaagtgctgggattacaggcgtgagccaccacacccagccaaaaataaacattttctgaagataacagtaatagaataaaggaaattaagctttgataaggaaaagggactttttctcccatgtccagtagtcttgagaaaagaaataatgcaaattttatttaaaatgtcacccaagaaagtaacaaaaggcctcataaaaaagaaacagattttgtctctatttcttaatcatctaacaggaagaagtagcaactttcagtgcaagctactctcttctttgacttataaatcaaactccccccaaaaatgggttgtcaaagttacccctgaaaaattaatttttaaaaagtaactatagctatcatgttttcaactctggttacactagaattttgcttgtaaaaatagttgcatgttaaaaaaaaaaaaagaaagaaagaaaaaagtgccaataactacaactcaatcttgttacctcactgtaatattagctatgcctagactaagtcaagcgggaggttaaagttccttaataaaacagaaaagaaaaagaaacagctgaggttaaggggaaaaggtggcatctagttcataagaagtcatgtacctttttttttttttttttttttttttttgagatggagtttcactcttgttgcccaggctggagtgcaaaggtgcaatctccgctcactgcaatctctgcctcccgggttcaagtgattctcctgcctcagcctcccaagtagctgggatttaagtgcccacagctttttctaattataataaacagtatgttatactaatctacacgttaatatttataccaagaattccctataaacccaatttatcttcaaataaagtgtataaattccattgtttcataacttagcacagatcttcaaacccacaatgatgttactgtgagaacaatatactatcaaatgtacacttaaccataaatattgttgcattccccataaggagcctaagtggatagtaattcaagttgcaattaccaataagaggcccaaactgatttgtttatatgtatcacagatattttcgtttcaaacaaaatgaaatgcttctttttaagtctcaacagcaaatataaccattatgcccacccacagatgacattgcctagaaatagcagtaatgcatcactacagcaaggcactagatgactacaaaaacactgtagtgtatattaaaatcatctcagaacaaccaataaaataaaattttcatgcaaggagatcatggaagaccttactgagaatataatatttcagcagagactcaagagggaaaagaaataagaaaacctgtatatattcaggagaaaagcattctaatgatagaaaactgcagtgcaaaaatcctatgaggtaggtgcatgttcagcatgtttgaggaatagcaaggaggtcagtatcacaaaatggagtgggcaagagggaaagtggcagcagatgggagtcagacggggagccaaatgttcaacagtgatgtgctgaagccgatattgactggggagcagattgctgtacattctagaactttgaatcagccagagtgggagtaattataccagtaaaacaggcaaatgctacaaatcagaaccttttccccctccagagagccagtttattgtcactacctgtaggccccttgaagaactttgtcttttactgagtgagatcagaagctactgaataagtctccttctgcctgatgtcatcattcccactgctgaattacgaccagaggtaagaaagaacaaaagcagggagactaattagaaagctgttaatataatctaggtgagatacattgttagcatgaaccaaagagccagtggtgaaacagtgagaagtaatcaactcactgtctcaccactggctctttcattcaggctctggatataaagaactattcttacttggatcagtatgtagcaacaattactaagcttcctgtctagaaatcagtatctaactctaacctaaacatgtcattcctggttctgaattaagactgttagttggatgtataaagtacttcaagaagctcaaataaccaggagtcttagatgcacgttacatatcttcagctattaagggttctattatcatttcaattgatcaacatatacatttgttgaacatctattataagacactgcagagaatacaagtaaaatctgtaatccaagccctttcctcaaggaggttacaatctgaagtttaaactaaagcatccgtatataaaaagatagattcaacacaatggaagtataaaatgtgtggcagggctaaggagtattctataaattggaaaggagaaggaagaagtcactgaacagataggacttgagctgtgccttgaaggatggatagagtgagatgatgagaaaggaacaaacggaacaagtcagggcctaatagtcagtggatctgcaaagtgaaagggctaagaaaaaggtgggaatgcacttggtgattaaggagtaatctattcatggcattcaggagcatggggagacagaggttacaactgggaagtatgcagacatatacctgaattcctaattccatcacttactagcttgagcaagttacatagaaccttcctgtctttatttcttcagcagtagaaattatagtacctactttataggactggtgcacagaataaatgaaataaaatcatgtatgtatggcatgtcacacaacctgaaagttagtaagcagtcactggttatcagaaacattattggccaggcacagtgactcatgcctgtaatcccaggccatagtggaaggattgcttgaggctaggagtgcaagaccagctgggcaacctagtgagaccttgtctctccaaaaaaaaaaatttaattagatgggcgtagtattttgcacctgtaatcagtcccagttactcaggaggctgaagtgggagggtcacttgaggccaggagctcaagaccagcctgtgccacacggcaagactcccatctcaatcaatcaactaatcaatcaataaaaatgattgggaagtggcaatggttaatgggcacaaaataattaaaagaatgaataagacctagaattgtatagcacaacagggtgactatagccaataataatttaattgtatattttaaaataactaagagaatataattgtatgtttgtaatataaaggataaatgcctgaggtgatttatcctcaagtcactggaaaaaccaaaagtgacaataagaaaaatcacaaaaagagctctgtttgggaagaaaattctacattctggttatgttaagtgataccttaaagccaaaagaacatgtaaaatacacacacaaccaagactacagctcacttgctgatgtaacaatcagtgggaaggaacacataccagcactcgtaaacacatgaatattccaaatgcacaactatttgaccgatcattctttactgtactaaaagaatacctgaacgttttgacttggtgaatcaaaacagaccaaaaggaaaagatgtccttctttggggcatctcaaaaacctggttacaataacaacagattattaacatcagctactttattcttcttataatacaaataagactaagactgtaacagctccagtaacataatggtaccttgataatcctataattctgacagcatatattctaagataaaaggttcatttgctcaactggttctctacatatcctttaaatgttaacagtgaaatgctgtgtgttttccagaattgctaatacttttaatactttttgtatatactttctgaataacatgtaaatgaaaaagtataaacttgataattttttcacaaaatgaacccacccatgtaaccaatgcctaaaccaagagacagaac

SEQ ID NO: 1884139 - DNA, 4001 bp, Homo sapiens
agtttgggaacgggagcgcaaaaattgcgggagacctcgtctgtcccctttcctgttggatccccaactctactaaagcaggcagcgagtacaaggtgctgaatttacacctgatgaattaataaatgaacatacgtgtaaggggaaaaagagatagccaagtctgtaatatccctcgacagggaggacgtagcccgagggatgatggcttgggaaaagaggaaagagaactggggggcatcggaaaagcccagggtctgggggaggcgggagagcatccagggcgggtgggaggaccgggacagcacacgggccgcccggggggtcacctgcgacgtccggcggcggcaagccagggtggtagtgctgccacagcccctgcaggaaggcggcgctgctatccatgcagcggtgcttggaactggtgatgagccgcaggcggccgtagttctcacggctgaaaagggccgggaagagcgaggccagacgcagcgccagctgtcgcatatcctgccgtcccttctctactagctgcccgtccatccagtccgcgtaccacaaaggccagtcggccagcgctgcacccaggtcgcggctgccggtactactagccccgccatccctggacccgcgggcctgcagcaacccgtgcagctgcctcagcttgcggatctgtttgaccgtggggtagcgggtgccgtggcgaatgagggcgaccagctgcaccggggtgcaggtcccctccagcagctcagggtcccgccacggagcctcggggcccgacaatagcacggggttgacatcctcgtagcgagtcttggtgccgaaataggggctgagcgacgaggccaccgggtccctcggctctagaagagagcagcgcgcaagcgacgagagcagcgccgcagccagggccgcggcaggcgctacggaggtccggaggaggcagccgggcgcgcgtagcatcgtcgggacggtcagtggagtgcgccgagccagctgcagatgcccagcttccggctccggagggcagggggcgggtctggagggcgcttccggccggcggccctcgggatgcgcttcgctgttctctaggaggtaccaacctctggcggtgggtcttgcgtcccggcggaaagctccgaggagtcctgtagacttgtggctcgggtggagccggcggaaaaccccgagaagcttgagacagccgtggctgaggtggagccggcgtcgctgccctggagcgtgggcgagtttcctcttagccggagcttcagggattgactcaaagactcctccgcttttttagttgttttgggtgtgaatacagcccggactaaaccttagtcgcctagactaaaccttagcctcccaggctgccaaaacagcacagcttttacagatgactcttacatcaccatccctactctgtgatactgtgtttttcaaagtttagtgcctgaaccatcagcatgaaatctgcctgagacggttgttgaaaattcacatcgctgggccttgcggcaggatgcctcttgaagcccaaggtttttgtttcgtttttttccatttgagtttgaaaataaacaggatacagtaaagcagagaacttggaaaggggcttacattctgcaggaatttaagtcctgaatctttggtataatcttgacctggactaccagagctaacgccgacatcagtgagacagcaccctaaaagttctgtgcttgttgttcccgaaggcttagcgagtagagacatagcaatctagagaatttgggtgcattgagtcatggcccaacagatttactctattattaagtatgagctaatctgctttgcgaagcaaacatgctctgtatttaccaccactccagatccatacgttcctcccatgtacttacttacatactcaaatcaaaagctgggttttttaataggttattgctcagaatctttgaccccaaaaatcataagtctgaacaataccttgttttttcccacttgaactccagtttatttgccagctggggaaataataagtattacagaagtcgtacggtgatccagatttaaggaaattgggaccacgttttcattaagttagcttttgcttcaaagacactattacattgctctttataagcccatcaccatctttactccttttctctttaagtgtctccttggtttagagaggtgttcctctaagtttaggcgtgcctctaaatgttaaccaagaagaaacggggccagcctatgaatgctgaaaatttggagacgttctgtgcaggaaaccatctttagggcaacagatgttcttttcgatatgctattttgtagcatgtcaatgcctgaatattcatggtcagtgatatttttgtagaactttgctcaaattagcatttagtaaatatccgctccttcttaaaatagacattctaacccgtatgctctataggctgagtcgcctgataatatttctaagtgcattcagcgagcatttgttccaggttcatctcactgtattttgcctaatacatatgcttactaataacttctcacacccaatcttttgagtcctaggggttaccaagtgttcccaaagtcattattcacttcttccttatgaagcaatctttagagactccacttacaaaatgtatggcacagtacacatttttatacatgaaatttgcccctagtttgattttattttccttatctaattcctcatcaattaattttatcctgttttatacacttaggtatatcagctcctaattattttgatgttatgccaagataacaatgataaagtaaaagtaagcaatgcctccatgtttttggctaggaaaaagccaaatataaagaagacgaagagtgcttaagctttggacccagactctaattagctctgctgcttattaattgagtgacccaagttctctgggccttagttttttttttttatctgaaaattggtaatattagaacctatatcatgggattatcatgacagagatgatgtatttaaaatccatatgataggccgctataaatgatatttttatcattactaatgttcagtgtgattattcctgtgctaagatgcctagctttctagcaattacatggattacacttactcccactgaacattaaagtgaatgactttcacaggcaacacatgcatcaaagatcatttcataacttttctaataataaaaatccactcatttcacttaaaatggatatcttgttcttagagcactaagcagcctttgaaaaaatttaaaaaggtcacaggccgtgctcctcatttcatgccagaccatgtctgaattatctgggcactctgtaaattggatgccctttgacataggtgcccacttggtccaatcatgtagtacagagaagtttgcatagtgcgaaacatggctattcctttgcagagatcatgggaacatcacctcccctcataagaaattgtgggtatgggagcaatatatttggcaaatctaacacaatacaagaggcagaaaggaaaattaatggttcaaggtccttgcagagatgggagaggacagaaccaaaaacacaggtagagaatttgatttgggccagaaggagatgagaccttatcttctaagagaatgttagaaggatgggtgaacatggggataaatttgtagatctggcaggagagagttcatagaattcaagtctgatggcctcagtttccacagtaacataggagacaagtttgaaagatgggggaataggaattaagtcttgaaatgtgaaaatggtttggatttgcaactgagagaaatgggaaagtaatgggaaaggattgacaactaagaggaatgggagaaacaagtagaagtttgtatggtcagctctggagatccaactgagaatgaattgctagtggttctgcaattttatttagaagcaaacattatctgttgtattttttcagagtggaaaagaaa

SEQ ID NO: 1884140 - DNA, 4001 bp, Homo sapiens
atcctgttgtcaccaaggcatcatcctatgctcataaatcagcagatgtgaggccaggagaagcaggtatggagaaaggaatacaggctcaggaaggttacgggcagacagggagagcttgccagggagagttttctaagcatttccattcttttctacttaggatgagggctaagcaaacaaaatacagtccacagtttttttctctgaatcaaacatgagtttgacgaccttattatagggaaatttaccagccctttttcatctgcacaagatattggtaagaagaaacaaaccacagagcccttttgtcccatgatcttgaccttggaattgctaaagaatgtgctcgtttttctttgtcagtagctgtattggaactgaagagtgaagaaattgaattttgtaaacagagtttggaaaagacgcactttggttccaggaaagaattcacagtgactccactcaataagagttgagttggcagcttcaacatcttctctgggaagcccccgagtagcttggagaattgatgttgcataaaaggataatcattgtcatttaaaagaattagtgtttgggttcttcgagtgacattgtgagaagaaaaatatttattaaagattggcctgtagaaggaaaaactagaccccagagacaataacaagagaaaagagtagtgatctcaactctcctcctattagggaagaaaaagcacacacacacacacacaaaagtaaaaaaaaaatgttggggtgactgacattttattctttatgcctttccctttaaaacaaaaatagacttggaagtggaatagtgagaccacttacatatgtacaaaattttactcttaaaactctccttgacccttagaaccttagccctaattgctattttcacttctaaatatcattctgcatgcattcatttattgaattgtttgtgcctactgagtctttttttccctttggttgaaaaagtcagctttcagaggcttttaattttcttccagattccttgaatgacctctaagttactaccataaaagccaattgatgcacaaatatttttccagagaggggtcatggttttgaaatttaagcctagggctatcatttgagcaaaatcttttgttatttgtgaatttgctttcatttggttttccacttgaaactaattaaataatttgaattgaaacaagttgaggtacatctggaaagagcagctgccaaataaatgcttgttgagttaataaataaatgaatgaatgggctaatctacttaaatctgattctgtctctgaatctgagaaaaaaaaagtggttgaaatggactcttccttgattggtccaagacttttacaggacactgaaatctctagttattttcatcgtgaatagtcctccggaatttctttaatgaagagatcttgaatatacagctaacccttagaagaggttacaaactaattgtctctgagccaaatccagctccaaacatattttatttgacattcacagtcttttaaattgtttgaatttaaatttacaaaccaggagattttacctaaaagcataggttctatctcttcttgcactaggtctgcacatctccacaatatcacacacggaacagaatagcagctacttgctgtagataaggcataggctctacaacttactacagtccacgtttgccctaaaagggattactattaataggtattggcactgttatttttcatatatatagtaagcacatatttctctgtgttacaaatttagactgagagctgtataattctagaaaaaaatggaaaaaaatcatctgtttttcttttaatagaaaagttcattttatataaaacttaaacctttaaaaaaaaagtctgcctggcttctttgggcatctgtgcttattactatcttttttctgtgatagagattctttgctttttgtttctaacaaagcaaagaatctctatcacagaaaaaagacggtaaagcaaaagtttttgtttctgcttttgtttcttttatataagtcataatggagagaaaatctatttttgtctacaaatctttttcaatgttttaattttttctctcaaggtttatctgaaaagtgatttcatcaacccatgttggaagcttatcagacactgctggtatggggcaaaaactggggagatgaaaccatgagtcgattcagacaaaaagtcagtcatggactgggacctggtatcacacactggggctgagccaagctggagtcaggcaggaagccaaggactggagcaccaaaatcagacaattaccaagaggggccaagtcaagaacttactggaagagccaattcagagatcaggaaacttgaagaagaaaatatgattggaacctatatcctgtctaggtctcaagacttcaacacacatagaagcttgaggccacactgggtttttggcaactaggtttatcttaaacttaaaaaaagtttttaaatcatgttctaactaatttttccaccaggtaacttgatataaacatacaaatggtttctttagcagcttcttttaaagtatatattttattaaagtataacacacattcaagtgttcagcttagtgaaattttacaagtgaacataccagataatcagcaagtaaatcaatacataaaacattatcagtacctttatgcccttaccaggtactactcttccaaggatagccactatgctcatatataacacatagattacttctttcctgctttttatttatactagtgaaataatacagtttataccggcttcttttgttcaacattatatttgtgaaaattatatatgttacatgtagcattgtttttctgctgttgtatgaaaattccacaatttaggcattcattctattcttgatggacatttgagatagttttggtttggtgctggcacaaaaaattctgccatgcacatttttttacatgttttattgtgactatatgtatgcatttcttctggacatacgctcgcaaaggaaattgccaagtcatagagaatgttcatggtcagctttcctagatacagtcaaatagtattccaaagtatttatatcaacccatactcccaccaagaatttaggagagttctggttgattcacaaaatcaccaacacttgggattgcttatttattttagctattcttgtaattgtgaaattatattggtttcaatcagcatttgaacttttttcctacgttggttggtcatttgaatatcttcttttgtaaagtgtcttttcatttcttttgcctactttatctattatgttatctgattttttttctattcacttttgggagttttaaaatatatattctgtatatgaaatttttggtgatatctgtattgcaatatctttgttcattctgtggcttgtcttatcactgccttaaaaatatgatttgatggactctcattcttaattacagtagcatccaatgtatctttttttctttatggttagtgcttctagattgcatcaaggtcataaagacattcttactaagttttaacctaggaacttcattgctttacctatcgtatttcagtctaccatctgtccatctgaaattaatttctatttccagtgaaaacaaaaattaggaatgaaactttattttgttcaatatgtatatccacttggctcaacatcgtttattaaaatcatcctttccgtgaccccactgcactccaacaatcaagtgaccttgaatatgtaggtctgtttctggaccctctatctgtttcattggtctgtgtgtctattcttgcacaagtaccacactgaaactgcttaattacaacatttcttaacatctagtagtgtataagctagtaaggtttgtttttcctctgtaatattgtcttagatttttgcatttcttagattttgcatttctgatataaattatagagacatcttgttactttctaca

SEQ ID NO: 1884141 - DNA, 4001 bp, Homo sapiens
attacagaggaaaaacaaaccttactagcttatacactactagatgttaagaaatgttgtaattaagcagtttcagtgtggtacttgtgcaagaatagacacacagaccaatgaaacagatagagggtccagaaacagacctacatattcaaggtcacttgattgttggagtgcagtggggtcacggaaaggatgattttaataaacgatgttgagccaagtggatatacatattgaacaaaataaagtttcattcctaatttttgttttcactggaaatagaaattaatttcagatggacagatggtagactgaaatacgataggtaaagcaatgaagttcctaggttaaaacttagtaagaatgtctttatgaccttgatgcaatctagaagcactaaccataaagaaaaaaagatacattggatgctactgtaattaagaatgagagtccatcaaatcatatttttaaggcagtgataagacaagccacagaatgaacaaagatattgcaatacagatatcaccaaaaatttcatatacagaatatatattttaaaactcccaaaagtgaatagaaaaaaaatcagataacataatagataaagtaggcaaaagaaatgaaaagacactttacaaaagaagatattcaaatgaccaaccaacgtaggaaaaaagttcaaatgctgattgaaaccaatataatttcacaattacaagaatagctaaaataaataagcaatcccaagtgttggtgattttgtgaatcaaccagaactctcctaaattcttggtgggagtatgggttgatataaatactttggaatactatttgactgtatctaggaaagctgaccatgaacattctctatgacttggcaatttcctttgcgagcgtatgtccagaagaaatgcatacatatagtcacaataaaacatgtaaaaaaatgtgcatggcagaattttttgtgccagcaccaaaccaaaactatctcaaatgtccatcaagaatagaatgaatgcctaaattgtggaattttcatacaacagcagaaaaacaatgctacatgtaacatatataattttcacaaatataatgttgaacaaaagaagccggtataaactgtattatttcactagtataaataaaaagcaggaaagaagtaatctatgtgttatatatgagcatagtggctatccttggaagagtagtacctggtaagggcataaaggtactgataatgttttatgtattgatttacttgctgattatctggtatgttcacttgtaaaatttcactaagctgaacacttgaatgtgtgttatactttaataaaatatatactttaaaagaagctgctaaagaaaccatttgtatgtttatatcaagttacctggtggaaaaattagttagaacatgatttaaaaactttttttaagtttaagataaacctagttgccaaaaacccagtgtggcctcaagcttctatgtgtgttgaagtcttgagacctagacaggatataggttccaatcatattttcttcttcaagtttcctgatctctgaattggctcttccagtaagttcttgacttggcccctcttggtaattgtctgattttggtgctccagtccttggcttcctgcctgactccagcttggctcagccccagtgtgtgataccaggtcccagtccatgactgactttttgtctgaatcgactcatggtttcatctccccagtttttgccccataccagcagtgtctgataagcttccaacatgggttgatgaaatcacttttcagataaaccttgagagaaaaaattaaaacattgaaaaagatttgtagacaaaaatagattttctctccattatgacttatataaaagaaacaaaagcagaaacaaaaacttttgctttaccgtcttttttctgtgatagagattctttgctttgttagaaacaaaaagcaaagaatctctatcacagaaaaaagatagtaataagcacagatgcccaaagaagccaggcagactttttttttaaaggtttaagttttatataaaatgaacttttctattaaaagaaaaacagatgatttttttccatttttttctagaattatacagctctcagtctaaatttgtaacacagagaaatatgtgcttactatatatatgaaaaataacagtgccaatacctattaatagtaatcccttttagggcaaacgtggactgtagtaagttgtagagcctatgccttatctacagcaagtagctgctattctgttccgtgtgtgatattgtggagatgtgcagacctagtgcaagaagagatagaacctatgcttttaggtaaaatctcctggtttgtaaatttaaattcaaacaatttaaaagactgtgaatgtcaaataaaatatgtttggagctggatttggctcagagacaattagtttgtaacctcttctaagggttagctgtatattcaagatctcttcattaaagaaattccggaggactattcacgatgaaaataactagagatttcagtgtcctgtaaaagtcttggaccaatcaaggaagagtccatttcaaccactttttttttctcagattcagagacagaatcagatttaagtagattagcccattcattcatttatttattaactcaacaagcatttatttggcagctgctctttccagatgtacctcaacttgtttcaattcaaattatttaattagtttcaagtggaaaaccaaatgaaagcaaattcacaaataacaaaagattttgctcaaatgatagccctaggcttaaatttcaaaaccatgacccctctctggaaaaatatttgtgcatcaattggcttttatggtagtaacttagaggtcattcaaggaatctggaagaaaattaaaagcctctgaaagctgactttttcaaccaaagggaaaaaaagactcagtaggcacaaacaattcaataaatgaatgcatgcagaatgatatttagaagtgaaaatagcaattagggctaaggttctaagggtcaaggagagttttaagagtaaaattttgtacatatgtaagtggtctcactattccacttccaagtctatttttgttttaaagggaaaggcataaagaataaaatgtcagtcaccccaacattttttttttacttttgtgtgtgtgtgtgtgtgctttttcttccctaataggaggagagttgagatcactactcttttctcttgttattgtctctggggtctagtttttccttctacaggccaatctttaataaatatttttcttctcacaatgtcactcgaagaacccaaacactaattcttttaaatgacaatgattatccttttatgcaacatcaattctccaagctactcgggggcttcccagagaagatgttgaagctgccaactcaactcttattgagtggagtcactgtgaattctttcctggaaccaaagtgcgtcttttccaaactctgtttacaaaattcaatttcttcactcttcagttccaatacagctactgacaaagaaaaacgagcacattctttagcaattccaaggtcaagatcatgggacaaaagggctctgtggtttgtttcttcttaccaatatcttgtgcagatgaaaaagggctggtaaatttccctataataaggtcgtcaaactcatgtttgattcagagaaaaaaactgtggactgtattttgtttgcttagccctcatcctaagtagaaaagaatggaaatgcttagaaaactctccctggcaagctctccctgtctgcccgtaaccttcctgagcctgtattcctttctccatacctgcttctcctggcctcacatctgctgatttatgagcataggatgatgccttggtgacaacaggatatggctccctgcctcctagatttctctgcaatgacattttctagaagaagacagtctgtgaagtttacctagcacg

SEQ ID NO: 1884142 - DNA, 4001 bp, Homo sapiens
ttcctattgctatcttttatagataacattcttgggatcttttatagcattcttgggcacaagggattaaatacaacttttatatacagaggatctttacatgtttattaaatctgaatttgaagatacattccaatcttgcataaagtgtttgttgggcttttacattacgtaattaaaaaacaaaattttttaaccaattttatgtgccatgtcacgtttaatgctatcttgtgtgaccagatcccaccagtaatgacaaaactgtcttaaacctcatttttttttttttttgagacaagagtttcactcttgttgcccaaacgagagcaatggcaccatctcgactcactgcaacctctgcctcccaggttcaagcaattctcctgcctcagcctcccaagtagctgggattacacgcatgcgccaccatgcctggctacttttgtatttttaatagagacagggtttcttcatgttggtcaagctggtcatgaactcccaacctcaagtgatccgcccacctcggcctcccaaagtgctgggattacaggcatgagccaccgtgcccagcccttaaatctcatttttaagaaaccctcacctattctgtagtcagctaagcttttaattacattaattttaagcacttgagaataaaatgactgcatttatcatccaagtgtcaaacaattaaaaacctaaaaatggtaactatatataagctgaggtaatatgggcttgataaagcccatgaggtaaatatgaacactaaacttggttttaattctaacagactatatctaaacctgtaagcagtatactcctaacagtaccctcataaattctgaatataattcttgtttgctgcagtcaatatttggcagtttaaattagcacagacgttgaggccttgctgagttattaggctatgtaaaagaggttaaaaatatgatcattctttattgttaattggtaatattttctcatacattaggtaaatgtcaagctttgggtctctggagtataactttttgtaacattagccattatttggtaacagaatttaaggatgatggaatgatggaaggtattacatatttctaaaacttaattaagctctaggtcagataacaatggagtaaagtgatacctgcatttttttccccagtgtaatcttaatttactattgtatttttcacttaaaattttgtagggaaaaaaagttttcaagggaacactaagattaaattgactaggttcaaatatgcttccttatgagattcaaaatttactgtgtgaaattaaagtttaagagacctaaaaaaatgtactcccaataaagaatcaatactgcttcacatgttttattttggtgtacattcttctagaaccaggttcatttttccagttttgtagaaaaatagatgttccagccaccttttacttaactgtctagtcttttaagaccaatcagtatgttccctggaaagatgaataagtctcatgactaattttttaaaaattctttaagacaaagaaataactttctttttttactcccaaagcacagtatctcaacagcagcagccaacatggggttttagcagcttaactttaccccctaaataaagctttgtataaaccagtgattttactacaaaaaacactgtccttgaaagaaaggagtggcagtcagacatcaatgcaaaacttggaatgattagataataaacatggcacttacaaaaggtagcttattagaatattccacttaagaagaggttacttttctgtccctccttgccccctcgaaaaacaaaaaaaaaagaaaaaacatttcctttaaaaattccccttaaatgtaggtttataaaatgtcagaaatgccttgtacccaaaacaagtgcttaaaaaaaaaaaaaaaaaaaacttgtgctaacaactcttacaattcagatatatatttttataacatctaagactgcaagagttcttatattcagtagctctctggtttaagacgacctccatctccttcgcttacaaaacgctttctgcccctgtaatgaagaaaaaaaaagacatgaaaacagatacaaattctgactatagtcaatatataaaaaaattaaaaacttggtattttttcgttacgtgttagcttttaaagggttttccattaaaaaaaaaaagcatgcctctaattcctttggaaaagactccctactatatatcttagcataaaacatcaatatcaaatctgagtttttgttttaataagttcactatccaaacagagtcacattaaaaaaagttgactcaaactaaaacattttatttagaaatttaaaattatttctaattaatttctaattattatttgtaagcttaacagtaagccaaataggaaacactaacataattcagaattatgcaaactggagctgtgcaacctatcaaaatatccatgtttggcaatttaaaaaaaaatgttttatcaactgtagaaaagccataacttgaatgtggaaaaaaatcagaattacagcctatgccccattttgggattcgtgctttgtcaaactcaagaagccctgctctataatgtaaccacactcttacctacatgtagtggcaatagcccagaaggaacagctggccagtggcctaaagcagtaagtgggaaatagaacttaggcaacattagcccttactctctgaccccaggccaataggcacaagcatgcaaaaccacacacaaatgtgcaccttacccaaataggctaaaagatgaaggacccaagtcaaagctgtatggtatgtatacacagaaagtttattgcctcatgtgacccttgagaataaagccacacagaaacaatcagactttcaaacagaggctgaaaaactttcaaaaagccaatgccagggtactggccccttttcatattaagtctaagtggaaaacagctacatcatcttgaacataaaggcttcagactgtatgagaccaaggtagggaatgaaaaagcagtcaataataagaaggccaaagttcagagtttttactgatgtatatcacttggcacatccatacataaatcctgccatcaccaagctaacgtctgtatttccaaacatttctagtaaagctattaaactatctttcatcactttcttttccctctcttttaatggcttctaaaattctaaagcaaaggcccctaccaggaaatatttttctgacttttaattcttacaatgcacttaaaaatatcaaagcttaagaaattttccagataaaaaattataagaacttaagattatataaaactgacccacacaagcaaaaagtttagctattactaaacatttatattattacattataagcttcattattagctttaacaacaacaaaaaaacttaccaactagtagcaaaaatattaatagctccaaggaaaatcacccacacacatacactttccagtgagaacatcctccacacaccccccaacacacacactttctagtgagaacatccaattagccctaattctccaacctgtaaagaagtcaaggaagccacatccagtacaggtaagagcctagatctttgaagccagaaaagtcctgaattcatacttggcttctaccatgtactagccatgtgaccttagaaaaagtacattatacctccctaagcctcaattttctcatcttatcactgataatacctactctaaacactgaaactacttacaacaaaggacctgctccacaagattagtttctttcaaataaactaggacttcatgaggcagtcctgtacagatttacaagggggctaaaacaagcttcgcccttctttctccatgaactcacaagagtcacgttcttcagtgacttcagggaacgataaactaacttagcagttaaccttcccaaagatctcatccactattttacattgagaaagtagtatttaaataaagt

SEQ ID NO: 1884143 - DNA, 4001 bp, Homo sapiens
caatagccaagagggttctgaagaggaaatactgcaagactcccaccaagaggcccagagaccatggtgttagccaacaatttgctgtgttacttcaagcaattcacttgccctctctgggcctctgtgttctcctctgaaaacaagaagggcatgctggagttgggatgggggccctttcccttttggttcttcctgcagtgatgctaaagcctctccaagaagttctctctggccaggaagatactcgaaggaaccactgaaacatgctgtctcaggctctctggagcacggaacactaggccatcgatgttgcagctgcacgggacacagtcggatgagttcgtgggaaacagggaagagggcgatagagcctgggaaggacagcaacttgcagggaagggatgactatagtctacctggtgtagaggagctaagacaccatcccccctagaaaggatttctcttgagatacgccaggcaacaaggggatatgaacacaaccactgcgctggcacactttgattcttagtctcaaaatgcttatccacaggatgtaaagctatggcttgccgggagggaggatctcgtggtagctgtgagtgtcagtgtgggctctggagctaaactgccttggtttgaatcccagcccatcgctcactgcctgtgtaacctggggcaacaggcttgacactgcccctcagttgtctagtctgtaaactgcggacggtaagcagacctaactcctaggaccgtcccgaagaatgaataagacaatacatagaaaccactcagaccagatgctggcacattaataaaccccatttctcatcgttatggatgtgataatttggtctgttccatctccctttcctttagggaacctcctttctcccagtctgcaccaattcaacccaagcctctgaatctaaaaggggagctgacgcctcccatgctacggagacaggcacgtgactcagtcacagccaatcaaaaggcctctgtctcctggccacagtgctacggtcacggatggacacgtcacttagtcacagccaatcagaggcctctctctctggccataatgacaggttcaagggtggccatgcctcagttctagccaatcaggtcagggcctgtgatccgtgggggccccggagtcctcccagggcttttgccagaacttccaggaaagacactgtctgttccctgggatgccagcagggttcttggggatgactggtcagccgagggctgctgagaccgccttccccccacgcagcgagagcccacggaggcgcagcccgcacacaagcggagatgagcggagagaggagccctgaaggcagcccgccctcccgggcatttattcaccacacggggacacggcctcagcactccgctgtctgcctcctggaacggaaagagccgcggccaggcccccttctttcatgggtaacctacctgagggcaaggtttttttgggaggaattcgcccggtctaagtagcgtatgttgaagaaggcactctaaaacgtttcattctctcccgagtgagtatttggatcagcatggatgagcaacctgccaagtcccctcttggcccactctcaaatggttttgtggctccaactagccctggactgcagcctaaactctgcccttcagccgtgggcgcagtctccaccgctcccagcacagatggttcacaaatagccactccaacaagcatttagcctcagtgtgtgccaggttctgacggggaggggtacctagggatgtggtcccagcccgcagggagcttggactcagattggagaggtcagcaggagtgtgtgtgggtgaacagacaagatctcaaatgacagtaataaaatgtcaagctagatgagtgtgatcatcagccacagtagggaacctggtctcagcggcctgtgacaggtctgcagcctgcacctgttagcacaatgccctgcagatacagcctgcattcccgttgcctcccactcaacacaatcccccaaggggaggaaaacaaatctttgcatcctttcccaatcagtttttcccagcacaaacacagaaccaaagtaaattaccttgtgtcaaattccatttttattcaattatgggagagagcaccatgctgcttatgtgatttaagcaaggtacccctctacccccaccttttccaaaagcagttttgagatttcatgtgccatattgtgatcccttaagggttcatttgacagatttttttttctctccatatggcatttgctgtcagtatggaaacaaggccgttataaactcccagcacagtaaacaccatgcgattccaacacaagctgtcagcacctcagttccgagcctctcccagctgtagagaggatcccaggcaaaaaaactactcgttggaagcctagagagaaataaaaggaccagtaatgatctttttagatttctttcttcacctcaaatcaagatcaatgggttcattttctgagcaagcacacacacaaaaacaaaatcatccctagtgcaacatttacagttcctatagaaatggataaggaggccacagaaggaagaatacgaatttgggaatgatcaaggtgacaggaggaggcgcaaatcaaagttcttgatgtatcaagagcaaacccgaggtataggttgcttctggaaagtcaatgacattgaagttggaagcatgagaagttctacgatacatgcttggagtggaccctttcggatctgtttcaacagaagctggcaatgttgttgaaatccagcttggaagggggcctgcccacaatctttctccaaagtgtggtctgttggggttggtgaggagaaacacctaggacaagggcagaagacttttctctctgtctccaaatctatctttaggggtgggagaacactgggatgctgtacacacaggcacacacacactgtccacacacacgcacgcacatacacacacgcacgcgcatgcgcacttgctcttctagaacatggaactcctgctttccatgtgcctcattgatcttttcctccaagccagaaagaggctgctttatgtaagacatttgggagtagtggccaggcacggtggcttacgcctgtaatcccatcactttgagaggccgaggcgggtggatcacctgaggtcaggagttcaagaccagcctggctaacatagtgaaaccctgtctctactaaaaatacaaaataattagccaggcgtggtggcaggcacctgtaatcccagctacttgggaggctgaggcagaagaatggcttgaacctgggaggtggaggttgcagtgagccaagatcgtgccattgtactccagcctgggcaacaagagtgaaactgtgtctcaaaaaaaaaaaaaaaaaaaaggcattagggagtagggtatggggagctcctcggcccctaagtatccacaaatcatccagccattctaactttgctattttgggtccttcattcactcaacaaactctcttctgaggtctcctgctttttgatactagaagtttcctttgatgttaagggtatcttcttgaactcaacacgtggggatatgtgggtgggtcagtgggaagggacacatcttatacccactggccggttactgatccagcaacaggcttggaattaacagctggccaagaatggaggacatcatctctgtgatgtgacatttggaagaggaaggtgactgggaaaggggaagggtctagaaagcccatcataagctgcagggcactgagctgtgcccttgactaaggagcagagcaccctgggaggggctaggcctacttatgcacacaggagggtgctgggagatacactgggaaggcaagctggactcacacaggaaagggctggactctcaggccaggagtctggaatggattcagtgtctcactggtaaatcaataatttagagcaaaaatgattcacgtgcagtccacagaaaagg

SEQ ID NO: 1884144 - DNA, 4001 bp, Homo sapiens
ctttctcccctcctcacccctcccctccttaatagagtaaaaacataaacattggcagccccttggttgacatcagtctttctgtataagcagccatatgcagagccttctctgattgaatcatttttctccataatccatttctccacaatcagagaagagagttgtacagaaaagatctcatcatgaggatgatattagtgaaagtacaagttcatcaggcccctactgagccaggcactaagctaagctccttactttttctcatcgaatccttattaaagctctgcaaggtcaacattatctgcattttacagatgagaaaactaatgctcaacaacaccaagaaaaacagctgaaaactattagcactaatgagagaaaggagtggggcagatggacacgctaccaatgggaagtcaccaatactttcctaggtacgaacaataaccaacttgaaattgttttttaaaagtcccactcaaacaacaaccaaaaccacaaaatattgggaaaagggctacaaaaaatctagtagagaaatgtaaataggagagggattaggacaagagagagagaagaaattcaccttttacctggtgtatctctgcatagtttgaatttttacaattatttttgtaagaacaaaatcttaatataaatgtgaggttaagaaaattgtccagagtcaatatctgaaagcgaattggtctaaattcaaaggctattcctggccgggcgtggtggttcacgcctataatccccgcactttgggaggttgaggcaggcggatcacttgagatcaggagtttgagaccagcttggccaatatggcgaaaccccatctctactaaaaatacaaaaaattagccgggtgcggcggcgcacggctgtggtcccagctaccctggaggctgaggcgtgagaatcgcttgaacctaggaggcagaggttgcagtgagccgagatcgcaccaccacactccaacctgggcaacagagcaagactctgtctctaaataaacaaacaaacaaaggccattcctttatgttctgccatcctagaatccacccaagaagactgctggctggtgccacgtgtcatcctgagaggatgcacacgttagaaggacatttttggattacaaagccagaaggaaaagacttggttggatgtctccttccataaagagacattgtgggcgttttctgtttgcttttgcattttgtttttgtttcgctttgtttgtttgttttaggacagagtctcgctctgttgtccaggctggagtgcagtggcgcgatctcggctcactgcaagctccgcctcccgggttcaagcgattatcctgcctcagcctcccgagtagctgggactacaggcgccggccaccatgcccggctaattttttgtatttttagtagagacggggtttcaccgtgttagccaggatggtctcatctcctgacctcgtgatccgcccgcctcggccaaagtgctgggattacaggcgtgagccaccgcacccggccgtgtgtgtgtttgttttctaaggatcatcatcaaaataaaaacacaaaatccacattcccgtgggggcttagtgacccacccgcatgcagcgttcagtctcgtgtgaacagaatcgctatagacgactccctgatttaggaacttttcgagccagggtaaccgtgtgtacctggggcaagggtgatgggattgtgctttaagtgaatggcgccccttggaccacagctcaatgcagagctactgctctgggctcagtttcccgcctggtttcccctgagcctttttctgtgtcgagcccccaagtactggccctttgacttggattcagttttccccctgcctaggatccttcagtgacactgtccaccttcaccctgctcgtgacttctgcgtcccctgggcactgagccttggagctctggacttccccagtgacagaccaggctccaggaactcagaccaggggcagcacttcaggcctccacgttcttgagggctccaggcagtttcctgagggtgcttcagaaaaaaaaaaaccatcacttgcctccagaggctcacattcccttgggagactccctctcactttagccctagtatccttccaaatcctgggcactttacaaggccccatggcaatgcatgcgtggcccggaactcccagtcaattggcacttgtgctctctctctcactcattctctccctccctccttccttcatgctatgctgttccccacaccaagatttctagcccactaggcatgcacgtctcttgtatcaattcattttcttttttttttttttgagacggagtcctgctctgtcacccaggctggagtgcagtggcgtgatctcggctcactgcaacctccgcctcctgggttcaagagattctcctgcctcagtctcccaagcaactgggactacaggcacgcgccaccacatctggctaattttttttttttttttttttttttttttgtatttttagtatagacagtgtttcacgatgtggccaggctgttctcaatctcctgatctcaggtgatccgcccgtctcggcctcccaaagtgctaggattataggcgtgagctattgtgcccagcccatttttcatatagcaaattcctccatgcagtggagtttctctaacaatataataacatgcatttgtaaagcactcttgcataccttcatttggccctttcatgtgatctgtccaaataagccatctacacaataacttggataataatacctagcattcttgagcactgactgtgttccagataatgagctaataagcaccttattaccctcaaaccgccttcggaggttattattatccacgtttcataaatgaggacacatgctcaagggctggtaagtaactcttccaacgtcacacagctagtaggtaatgcagcctggattcaaagccaggtttatagaccttggagttctttctgttacactgtagctcaggtaaacatgtgactatatttacaaatgccaatacatggtgaagggggaaacagaaaagctataaaaatcaatagtgaattcagaagcacatacatctggacaaatgatcttcccctcctccctggaaatgaggaagtccctgtattacaatgatcaatgccatttactcagcatctcctcggtgccagtcctaagggcttcatgtgtaatttttcttactagatgtgtgatggtaatcaagtctcctgacttcccttactcccaattttgtcctgtagaataagatgacaatgtctgctcctgtggctgttatgagaggtgatggagatgaagcatgaatagcactcgggactgggaggagcagcaatcatgactgtcctgaggactgtgatcagggtcagaaaacattctatatggaccttcctgggagggaggcagccttcccagaagcaccccacccccactagccagctgtctccccaacagcaccagccaggactgagtatgtggccatccctgggccatcactggtaaagggacaagtgccatgcttaggctagtcacatggggtggaagaacacaggccaaacagacaacaatcttttcaaagaaattccttttattaatttagagacagggtctcactctgtcacctgcactggagtgcagtggtgccatcatggctcactgcagcttggacctccagggctcaagccatccccacaacctcagcctcccaagtagctgggactacaggtgcgtgccaccatgtttggctaattttttaagtttttttgtagagacagggtcttgccatgttgcccagactggtcttgaactcctgggctcaagcaatcctccctccttggcctcccaaagtgctgtgattacaagtgtgggccactgcacctgtaatttttttaattttttaacttaagcccctccaaaaatattaagagggatctaatccataacctccag

SEQ ID NO: 1884145 - DNA, 4001 bp, Homo sapiens
ggtgggaacctcagcccatcaagtgtcccttcgctgcacttggctctcctcgcccccctccccacccctcctgggcgccccctcccctccgctcagacctgggacaatggcatctgctttggataagacacggagctcgccgtgcccgaccgccacgtcaggccagtgctgacgtcgctgtagagggagcccccgccgccgcccggccccccgccgccgccgggtcccccgccgccgccgccccccggcccgccgccaccccccgcggccgtggcgcccgcgcccccgcccaccgcggcgcccttgctggcccagcagcagcgggtgcacagggagcgccaggactccagcgtcttgccggaccagacccacacgcccgaggtgatgcccaccactaggcacatgaagtacttgagcatgaagacggcgtagtcgggcctgcgtgcctggtcgggctgcaggtcccgcaggcacgggcagttgtgcgtggcctcccagcgcgggcggttgtgctgctcgtagaagaggcaggcgaccaccaccgcggcgggcacggtgtagagcacggtgaacaggcccaggcggatcatcagcttctccagcttgtgcgtcttggtggggccgtcctgttgcttgatgaccgagcggatgcggaagagggacacgaagccggccagcaggaacatggtgccgatgaagaggtagatgaccagcggcgccagcacgaagccgcgcaggttgtccaggctctggttgcccacgtagcagatgcccgccaccgggtcgccgtccaccgagctgagcgccagcaccgcgatggacttgacgctgggcacaagccacgcggccaggtggaagtactgcgagtagccggcgatggcttcgttgccccacttcataccggccgccaggaaccatgtgagcgacaagatcacccaccagatggagctggccatgccgaagaagtagaccagcaagaagaccacggtgcacagcgcggggccggtggtctcgtagcgcacgtgctgctccaccgcgcccagctcctcgtactcgccgcgcccgcccgggccgcccgcgcccgcgcccgccgcgcccgcgcccgccgccgcgccgcccgcgcccccagcgccccccgcgcccggcgcgccaccgctgcacgccaccttctcgtggcccgccaccaggcgcactaggtagcccaccgacacgaagaggtagcaggccgagaggaagataatgggccgctccgggtacttgaagcgctccatgtcgataaggaaggtggagacggtggcgaaggtggacacgaagcagagcaccgaccacaggccgatccagaagacggtgaaggcgcgctcgtcctggctgaaaaaggggttgtggcagggcagcgcgcagttagcgatctggcctgtcttgacgcggttgtagagcgggtggcgctcgctggacacgctcaccataggcgcgcggcactggcacccgggctcgcagggagccgcgccgccgccagggggccgcgccttcccgccaccgccgccgccgcgagctgggggcgccgccgcgtccccgccgccaccgcccctgccgccgccgcggtgcgggggcctggcccccggcgggcggccgtggccgctgcccgaaggcggctgctcgccgggcggcggcggcggcaggcggcgcggcgggctgggcgcggcggtggttaggtcggtgcggttgtagtccatgcacagcgtgtcagggttgccttgctcgggcagccggtcgcagcgcatgcggtcgggccaggcgaagccgtactggcgcatgagcggcgcgcagccggccttggcgcgctcgcacaccgagcggcagggcggcagcggcttcttgtagtcctctaggcagatgggcgtgtacatgctgcacaggaagaacttgagatcgggcgagcactggatctccaccagcggccagaactggtgcacctccaggcccgcctcgtcttgcgtgtcgtggttgaactgattgggcatgtaggtgtagttgtagccgatgcccttacacagcggcacggtgatctcttggcatgccagctccttggccgaggcggccgcagcgccgctagagcgctgcagcagcgccaaggcggccagcagcgaggtcacttccaacaggtaaccccactccatgctgtgcgcctcggcccggtgccctcgccctccaggcggcgcgcagaggggtgccggggggggggcccacgagagagccgcagacgggtacagcgggtgatctggggtctcccttatgcttcgcccgggaggggggtctgccgataatctaaccccttctaggggcgcgtccgcagcggcgcggcccgcagcctgggcagggcccttccgcactcctttccgccgctccgggggtttgaaggcggctgcaggcgcgcgccacagtccgtaggtccgctctgctggccccgggtcgcgctcagccctcgcggcgcagagcggccgggcctcggctcatcgtcccgcgctcgctcgcctcctctccgcgcgcccgaccacttctccccgccgcgccgggcggcggtgactccgccggacagagagggcggaggcgccgcaagtttcctctggggccgcggtgcgcagtcaagatggctgggccgggccgcttgccgcgccgggtcagccctggcggccaccactcggcccccgggggctcatgcccgcccccaaggccaagccgccgccgccgccgccggagttggggacccgcctcggcccaggccgccgccctctttctccggcgtccgtccttcgtccgtccgccgccgggacagacggacccccgccgcctggaaaagtcagcgccgcgctccggccgcagtcgggcgaggtgcacacagtctccttcctgctggacacccaggagcaaatccagaccggaaggcggagcggacacctgagtggcgcggcccgcgcccagccgccgcctcctcctcggcgggagcagcgcccttagcccaacttcccggctccagccccgctcgcgccgcgctgccggctcatgaatatttatacagcgcggactcggtctccgcccccagccccgcgagccaatcgccgggcggtagggcggagtccacgcgctcccagggctcagccttccttaaggcagtccccgagtgtccgcactgctgtgcgcgctctctgcggatggagagttttggtaaccttgggattgaccgcagagacagagtgttggccatggctgtccccatggcgctgagtgcgtcggaggtcttggtccccttaccccgagtctgcccttggggacagggacggggtttggtgcagcgcgcgcctccccggcgcgtttcaaaccagccaagcccctgctgccaccctccgcaaatgtgggtgatctgcaggcggctggggtctcgtgctcctcggggcggcaggaaggtctcgcagcaggcgagcgccggggaggcctgccggggctcggcgctgcagaagacccgggaaagggtgtcctccttggggttctcagaacgatggtttctgagacttggagatgtggggggtgtggagtcattctaaactggggctggacccgggacggcccgggtgagatgccccggagcccagccttgggcgcgcgaggggcgcgggggacaaatgcccgccagagactctcctcccgcctccgctgcgtgacctgggggagcctcagtttccccacctagagagttgggtgatcatagcacagatctccaagggggctttgataattaggtgagataaaatataggaagccccgagccgccgtgctttcttaggaaaaatcattcaatttctttctaaaattcaaaacaaacctcgaaacttataaataggacaggctggaaactctggggctggattccctgtcttcccttcgttctttcaggacgtctattcatccatcccaagttcacaggcttttgccagagcctccttttc

SEQ ID NO: 1884146 - DNA, 4001 bp, Homo sapiens
tcagtggagtggtcttaacaatccttgagttcaggctggagctggcagggaagatggggagccgcagacagcgtcctgtgctctaggaacacgggtacctgcactcaagccttaggaggcacgggggtccactggagcctaagacagatgtcctgggctgcctgtcgctcgcagctagctattgtttcctcctgctttcctccggtcctcacctgagctctgatcgccaggggaaggagctggtgtgaagtactcctcagggagggagaagctgtctgtctcctggaatggagaaggtggctcaggttgagaggctctcccagctggctcaaccctgtccctgctctcccaggagggatgggaaaggcctggtcgcctgcagaggccgatcccctcctgcccctgactccacgaagtgcacagcacacaccgtctctgcagagctccccccagttgggcccgtggagtgagggctccaggcctgctgcacggggatgttctggctgctccgggccctccgcggggaaggctgtgcagggcaggggagaggctggttagctcctatctgacctggctccctccaccccttctgcctcccagcgcttcacagagaagcctccacccctccacccctccacccgttccgggtgcagtcctgggtgtgtggtcctcagacttcccagggattcgattctaggcggtctgttctgtggaaattcgagaaattccaacacaatggtatccaacccaccactacccctggtgatgaggtcaacagcgatggtggtggctgacactcactaagcattcactatgccccaggcagtgccaggttctgtgggaaccaccccttttgtccctccaaatacccctgagaagtagatgctttgttattcccattgcacagataagggcactgaggctctgggggtgcaagtacgggctcagctcacacagccaggtgttgaagctgggtttcgaaccatggctgacttgaaaaatctgcacttttaacccactggaccatgtgcactccagaattccccttacatctgaaagcagtgggaaagaagtcacgcccaaccacacacccagaattgtgacttagaaaacatggagtccccagggggagcctgcccaccatcttcaggcaggttttctgaactacctccctaatggcctccctctgcccagaaagctgccctgagacctgaatgtcgtcctctgctgtgctctcgctggggtagaggtcctgaaccaggaggatgagggcaagcaggtcggccgggcgcagggagctggcactgtggctgcagacacaggagcatggccacccatcagcacatgcccagcaggagacggggcaggcaggttaaaggagtgtggagcctggcccctgccctcaaggagcaatgtacttctggagatgggcaaggcacaaatacaattaattaactcgtcaaatttcaaaataaaacttggttgtatagaacaaagaaaagaaaatgatttagcagtgggaaagcaccagggaccaagaacaacataaaaggaagttctagattgagactctaagacagtgttccaggaaggaatgatacagagaaatgggtgagctgaaaaaggttggagaatcaaatctgggaaggtttcaggcttcatggaggaggtgattcttggctgggcaggtggtgcttttcaggcagaggccataggggagtgagaaggccagggagcctttagccaccacatgccagaccttgagctcacctagagtagaatgccagcagcttggagtgcacgagcaggaaggcatgcagggcctcctcgcctccccgctcggggctggtgttgacagcctggatgacgtgccgctccagcgcctctatgcacagctcacagagctgggggtgaatcagtcgctccagggcctagccagggcaggaagggagaggaagccatatcaccaacaaccttgccccactccaagccctgggctagtggggacattcactctgtccacagtgagcttggactctgcaccagatacttggaaacagggggactaagacccaccaggtcccagccttcctgaggcttactgtctggtcactagactccagtggatgaggcaaggcaatacacaaggaaataaagtaagtgccatttgtaagtaagcaccaagtacaaaatacacagcactaggctagagagaaatagcagagacctccttgggtagggtgtccaaagaaatgtccctgaattaggtcacctttaaactaatatctaaacaaccagatggcccaccagagaaagagggagagagagaacactgcaagtcaaggagactgcatattcagaggccatgagatggggacagagtttgcaatggtgctgtccaacagaaataaaagaaaggccctatgcataatttaaatgtttccagtgaccacattaaaaaagtaaaaagaaacagttgacattaattttaatgatatatttcattttactgaatatatccaaaatattatcaccatatgatataaaagccttattaatggaatgttttacattcttttttgtgctaagttaccaaaatctggtatatatttcacatgcatagcataactcaatttgcactagttatatttcaaatgttcaacagccacatgcagctaatgactatcatattggacagatctaaatatagagttttcctgaaacttaaagaagtttcatgtgactagcactcagtaagcgtggacaagagaggcataagatgaagctagagtgaaataggcagcgatagatcacacagggcctggtaggcttgggaagagtttggattttatgctaatggcattaggtcacctcctaaaagaagtctttcctaatgtcccagaaagagtttaccactccatctcttgtgccaccatagcttttgatgaaaaacctaatatggcaccaggattctttattatatcttttagtatatacatggctgatttcccctcaagggcagtgaatatgtctttattcatctctttattcccatggcctggcacacctcttagcatataataggtactatatgtttattggaagagtgaatgagtgggggtatgagaatgaattccttcagatctattttccagctcattaattctccctctagctatgtctcatctgctatttaacacatcccttgagtttttcattttaacaactatgttttcttttctaaaatatctgtacgtgttctttttcaaatttgcctggtcaatttagagtttcttcttatctcattttgtgattctacatttcatatttttaaatatttcatagttattttatattctatacctaatagttccaatgtatcaagtgccttgggatctaaatctgttggtgattgattttcctgactctcactcgtggtggcttattttcttccatatctgattttcttcagttgtgagttcacgtttgtttgatctttacctttcctgctctagcagtggttttcaaagtgtggttcctggacaagcacaataaacagcacctgggaattttttagaaatggaagttctagggccgggcactgtggctcatgcctgtaatcccagcactttgggaggccgagtgggcagatcatgaggtcaggagttcgagaccagcctgaccaacatagtgaaaccccgtctctactaaaaatacaaaaattagccaggcgtggtggcacgtgcctgtaatcccagctactcaggaggctgaggcaggagaattgcttgaacccgggaagcagaggtcacagtgagccaagattgctccactgcactccagcctgggcaacagagcgagactccatctcaaaaaaaaaaaaaaaaaagaaatgcaagttctagagcccccatcccagactcgctaaatgagaaaagctgaaagtgaggcccagtaacctgtatttaacaagccctacagaggattctgacacacactgg

SEQ ID NO: 1884147 - DNA, 4001 bp, Homo sapiens
ggagaaagatgcactggaccatgaggccaggcagcagggctgtgatcagcaggagggtaggagaacagaggggctcagaggtggacgtcctatgtggttggcttgcaggatccggggacacttctgacgctaggggacatgctggggctgtggacaaggatcatggagtgggcagcccttgaaggcatctgagacatgctgatgacacgacgggcgttgggggctgacagtgcaaggcagccataggcctgtggccagttctagggcagctgtcacggacaggcacagatgtcctggctggggtcctgagaagctcccgagaaaggtttccatgggcctcagaagccaggctgtgtcccacagcacagatgcaggccctgggcatcttaccctcctgggtgaccctggaggggccaatcacaggtggggcctgcagagacactaaggcttcaaggccagggcctcgcgggctgcatcctctgtatccccagggctccctggagagtcctgctttcccacttccaggagacacatctgctaggcaggtgtggtgttctgggccaggagcctcccacttggcatgtggtcctgggctctgggctcttcacctacaggtcaagcctgggacctgttgtccatggccaggactggcacaaatctgatccttttgtggaggtcagcagtctgtcttccagcttttctgccaccagctaatgcttatctggtatgagctgtgcccggcatttgctgggctctttacaccctgaggagactgctctcacacccctgttctacagggggaaactgaggctcactgggggtttgtggcatgcccccggccgcagcagcttgagtgtcttagtcaggtttacaacccactggctggatccacagctcagggagcctttctccacagtgacataaactgtggggtcactccctcagctcatggctatggacctcacggcccctaagtgctggctgaggaagtacgaccatcccacccctccatgagggtccctgcctggaagcacagggagcacagatgcttcctgggtgcagcagccctgagccatgccccactctcgggctctgcattagttaaggttttcccgagaaacagaagtgataggatgcgtgtgtgtttattaaaggagatggatggcaaggaattgcttcatgagatagtggagtctgagaagtccccagatctgctgctggccagctggagccccaggagagctgatggagtttgtcccagtctgaaggccaggggcttgacatgcatgaagagcctgtacttcggttcaggtctgaagcctggaaaagaccaagctcccagcttaaggcagccaggcagaatgaattatctcctacttggcctttgtgttcagcttaggtctgcgacaggttggatgggtctacccacactgggaggctgtctgctttgcagtccatggattcaagtgttcatctcacccagagcccccctgacacacacccagcataatgtctggccaaacatccaggccccctgtgtgccagtcaagcggacgtgtgaaattaaccaatgtgggctctgagattccaggcccaggagacccacatcctccagcttctgctgatgtgccctggggtccctggggacaggctctggcttggtgcctggatggggttggggccactcagcagcatgtcacctgggcacgtccttcacaccccaagccacccgcctcctctgtaagtgggctgtactgccttaactgatgacccctgcagctgctctgaaaactggtcccagtggaagtgacatgaagaccacctcctcaggtgtgtccctgttagctaagaccagatgaggatgctgggactgggcagggtcagctgactgcccaaggtcctgtggccagttagaggcaccgctgggatctgaacccatgtggtctagctccagaagccacgctcctacccccaggccatcccactgccagctcctcatggctgtttctgaaggtgatggagggactcaccagcccaggttcccaggactgtctgggctttgtggcaggaaactggggcagagcaggggcctccgggtgggaaggatgaccctttcccagcaagacaggacctcgtctcttgctagagcccagctggggttaggtttgggatagtgtgctcaggacatgtgatcagagggaagctggaaagctctgaagggggaaggctccccacacatggataatccctcatacagagaccccagactcagcataggatcccagacagaatggccttcacacgctgcctggctccttccaaaatcaatacaggctcttaaaatgctgaaatagttctggtgcatgctgagatttgttggactgagtttaaaatcctggtgtgtgtgtgtgtgtgtgtgtgcgtgcgtgcgtgcactgagagtgctggtgagcttggagaggttccagtcttaaaaaggaccctggccccgagaggccacctgaccaccaagaacagcccgtgtaattctggaaggtggatttgggattcctgctttcatgccctgagggcccctgagggctcaggactgagggacagaggctgctgggatgaaaaaggtgcatccctggctgggaaactccaggcttgggtgggcttctgctgagacccagctccatgcagaggttcatactgcctgtgcctcagggaccagcatatccacctcctgtcatccagttgaggcctcagggctcccagggaaaggagcagggtccccccaagcccaggataccaggaccagccgggctccagccccacccctccttgtgcatttctgccctcccaggcttccctgcgccttcattaccaaccttgtcctcagcaaccacggcttgtaaaccatattccacgtgcttgggttttccctctggacacacaggctctgagaagatggtttaggcagttcccaacttcacgatcacagcaggtcctgccaacccaccctggaccgtccctagcctggaccagggacaccccacccatgggaggatgggttggagctgtcctggagctaggctggactgggccctgcagcctccaggcaaatgccttttcctttacaaagctggtaaagtgctctaggtcactcacccttggaggatctctctgctgcttcatcatctgggagtcgctgtctccattcccagggattctctgtgtctttaagtctaagttggggattggcccggccacaccaactttcatcccatccgtatttacactccacggctttccacaccctcttgccttctacctttctatacttcactgtgacctctgtaagcaacgtctgacacaagactttgcttttgtgtccaatctgacagtctctgttcagtacattcatggttactgttttctctggatctaggaaaatttatttccaccacttatttttttgtcctggcttctggacttccattttctctctcctttcctaacttctattagaaatactcaattttctgtattctttttcttcttcccaattgcttggaagttatggtaggctgatcatgactcccacagatacacccatgtctaatctggaacctgtgaatatcacctgtattgcaaaagatgtgatcgagtgagggaccttgagaggaggagcatgtcctgggtcatccagggccctaaataccatgtatcctataaaagagaagcagagggagttttgacccagacctgcacaggggacaaggccctgtaaacagagagcaggcattggagagacatggcccagctcaggaatgatgccagctgtgggaagctggaagaggccaggaaggctcctcccccgagcctcagagggagcatggctctgcctcctccacaccttgatttctgtctcctggcctccaggattgcaagagaatacatttttgttgttataaactaccagacttgtggtaacttcttatagcaatcacaggaaacta

SEQ ID NO: 1884148 - DNA, 4001 bp, Homo sapiens
ggtgagctttctctaaagatacccaccgtcactatggagagcctgtaaaggataatcaaacccaacatccaggtcccgcatctatatctatttaggatcttggccaaatctatatcaattaaaattgcaaacacatctcctccctaatccaacaattccacttccaggaatgatcacatgcatgaaatgatgtgcatagaatgtatatagttatttacctcaggactgtttgtattaataaaagattggaagtaaattaaattaaaaatccattacacaggagatcggtcaaaaaaatatatgtgctgtctctgcaatagcttttggacagccataaaattaaacatagaagctgtttatattctacgtggaatgatgtccaaaattgttgttaagtggaaaacttaggataaaaacatattatagtatactgccatttgtatgaaacaaaaataattataaatatatttgtttatatagtcacagaataactaaggatacacacccagaaacaattattctccaggaaggtaaactgggtgttacaggtgagaggtagggaaaaccttattatttatcatgttgtatcttttgaatctctagctatgtcaagcgtattttaaaatacatgaaattgctttcaaagccaatgggaagaaaaaaacaagaatgccacattgtcagtttcctccagcagaaaaacagaaataaattaaaccatttaaagcattcgctgtccctccaaaaagaggtaataataaaaaatatgtagtttgtctttcatcaattggaagaaagaattcttgccttagtagtttattctcctataaaattgtaagggacaacacaattgatttttttttttcttgaagtctagccgatatttaaaattcagttacaggccaggcacggtggctcatgcctgtaatcccagcactttgggaggctgaggtgggtagatcacccaaggtcaggagttcaagacaagcctggccaacacagcgaaacaccatctctgctaaaaatacaaaaattagctgggcgtgatggcacacatctgtaatcccaactactcgggaggctgaggcaggagaatcacgaacccaggaggcgaagtttgcagtgagctgagatcgcgccattgtactccagcctgggtgacagaatgagactctgtctcaataaataaataaaattcagttacaactttttagatattttattctattttatgaaaactttagtataagacgctacactgaatagcaaggaagcccagatagagccgtgaggacctaatataaacatcccttccaaatgttgactttctagcttggattccggttttgccatgtctgcaaggtttctgtatcctctgaatatctttttcctcaactatagcatgtgaatcatgacacctacctcagaggactgattgggaaggtaacatttttatttaggtcagaggatctccacaatgcccagacaccgccgcacactcaggaaatactagcaaccagcacacagaaatattgcagtaatatcattaagtttaccccatcaactatccacaaaacctctggcggcattccaacagttacacctaagctgtaatgttacttatctttcaattctaatagttgaggcacttcagatcccatagatcacttacctgagggaataacaaaagaatttaaagtggtgttgccctttttgcaaatatagcccagtttctgaacacattccagattttcccatttagcattttttccaggatttagtgacacacagctttttccaggttcagctgatggacttccttcgaggaaaaggaaaagttaaagtggactattatagctattcccagcagatagcatccctcccacgtctcctcatgtcttcatcctggggattcaatggaccaccattctgtcttttgctacacattcacaaaaaaatatttactgactgcagagcaaaagacacgatgggtgtctattgttttcttatcgttggatcattccaatacttagaatgttgataaagcaaatatacttctttgaaacaaccctttcccccattatcagctaataaagctacaccttaaaacttgaacagttgtcacaacggattacattatcaaagagaggtacctaatgaaaagaatgcatgattatgccgccataaaaaaaaatgaaatcatcatgtcctttgcagcaacatggatgcaactagaggccattatcctaagcgaattaatgcagaacagaaagccaaatagccatgttctcacttctaagtgggagctaaataccgagtactcatggacacaaagatggcaacaacagaaactggggactatgagatgggggaggaatggagggtaacaaagtttggaaaactagctactgggttctatgctcactgcctggttgatgggatggatcatttatatcccaaacctcagcaacatgcaatttacctaggtatgtaacaaccgtgtacatgtatctctgaatctacaagtagaatttattaaaaagaaagaatacatgatgttccaaacctgccacactaaacattattagggcagggcacggtggctcacgcctgtaatcccagcactttgggaggctgaggcggatggatcaactgaggtcaggaattcgagatcagcctggccaacataatgaaaccccatttctactaaaaatacaaaaaaatcggccggggagctggcgggcacctgtaatcccagctacttgggaggctgaggcaggagaattgcttgaacctgggaggcagaggttgcagtgagtggagatcacaccactgcactccagccggggtgacagagtgagactctgtctcaaaaataaaaataaaaataaatggaggagaaaaagctaatgggagagctagatgggcagcatgctgtgctcccagaactaaaactgtctcaatatcttcaactcagcctactgaagaagactttcagcagctatgccttatccatttcttagtggaaactgattaaagaaccagataaagtcaacgttgctaaagggatgaatgtaggcattgatacatttcacatgcgttttgctactctaatatatgatttaaaaaccagtactccccaaactagcttcaccttccacctgaagacagggtgaatgagccacattctgttaatacctatgctttgtgacctccaatgtgtatgtaacctgtgcctgaatgtcacttcctttcctgcaagacggaaatcatattacctgctccacaaagtctggagcaggtaataacctaaataacctttttaaagttttggtggtattctttgtgtggtaattaaatgatttttttaaagtttatttaactaccacacaaagaaaataatggttagtaataagcattaagttatcttttttttttctttttgagatggagttttgctctgtcactcaggctagagtccagtggcgtgatctcagctcactgcaacctccacctcctgggttcaagcaattctctgcctcagcctcctgagtagctgggactacaagtgcccacaccatgcccagctaatttttgtatttttagtatagacggggtttcaccatcttgaccaggctggtcttgaactcctgacctcgggatccacccgcctcagcctcccaaagtgctggtattacaggcgtgagccactgcacctggccaaagttatcttaaagttagtaataagcataaagttatcataaagttagtaataagcataaaggtatcttaaacatttgctgatactgtaactaaaataacaggataactgaactaacagataaggtatcagcactaaaaagaaactttcaaacaaatacatttctagctctaagttattaattgatgtgctaattagtaaatcatattacacatttatttatcaatacaatacctctctcaactttgagacatcaactagtggttttgatgtttaccat

SEQ ID NO: 1884149 - DNA, 4001 bp, Homo sapiens
ctagcttacgtcgagacagaggagttcataactattaactatacacaacgacgtgtcacaaatgtttacaaacttccaagagataacgataagaagcggccgggcgcggtggctcacgcctgtaatcccagcactttgggaggccgaggcgggcggatcacgaggtcaggagatcgagaccatcctggctaacacggtgaaaccccgtctctactaaaaatacaaaaaattagccgggcgtggtggcgggcgcctgtagccccagctactcgggaggctgaggcaggagaatggcgtgaacctacctgggaggcggagtttgcaatgagccgagatagcgccactgcactccagcctgggcgacagagcgagactctgtttcaaaaaaaaaaaaagaaggaagcaaaatacgattggttcggtcccgtccgctctcagcggctcagtcccaggcctcggggccagaaccgtgttccccgcgctacttgggcggcgccgagatcgcggcctccccgaagggtgcccaggaggcctgggtcggacgtggggcgcgaggaaacggcgggttttccacactgagccgcgaaagcctgtagacgacgaagaaccccgcagccttggcctctgcgcggcttccacgccccacggctgcccgcccgagccctgcccccaggcgcgccagccccgcctcccgggtcccgggtcctgggaccgggcccgccctgccccggcgcccgtggtcaccatggcaacgcagcggacgtcggccaacggcccgccctgggggcggggctgggccggtcgggcgcgcgggtcaggtggcgaagggcggagtctgcgcggggttgggcggagcctgcgcggggccggtaggatcgcgtcgggagccggtaccgaggcccgagccgcgggagtcgagcgaaggcagcgccgaggccgcggtttccccctgggcctccccagcagcagccatgggcagtgagtagcggcggctggagcggggactctggctgggaacgcaggccccgcctgggctgcgggcggtggggctggcgctcgctcggagtcgtgggggccagggatgcgcgggccgctccgggcctcagcggagggcacgggccgggggcctccgccgaggctcccctagccgtgcgaggccttgcccggcgggtaccgggacccggaggcccggggtttgcgtttgatagagggcgaggatggcgctgggaggccattggttttgggggcggggagttagggcaccgggtgaacctggaccactttttaatttttcaggagttaaagaaatcccgtgtttttattccctcgtcatctttccttggcatgttgcattgaagaaagctcccctaactcgtttaattttaaaaaaagtgatgcatggcgtgtgttttagggaggaaaggagtgtgcattggtaacagcgttttccttaaactgttcattctgtagcgtttactgaaaactgtaaggttttataagccttagggacaaggccttatgttataggaatgtttttcagggccctccccgtaacactcaaccccacatatgtgcacgtagctacttgcatagctgtgaagatgttcgttggatgatgggtcgtgcatacccaagcagggcacccattggccaactagtggacatttgggggaaattagaaaggagtaggagagacccgtggtaaaattttgcatcacaaggatagacagggggcagccaaaagctttgcttgaacatgaataccccttacagatgatcataaagtgtcaagaaatctgagagtggcttggattgaggtggagaggaaaagggatggagaggttctaggaagcctcctgatgtgattgatacttgtttcgcgttagcaatgaatgctttcataattcagatttactttccagaaaatccaaaatattaggttgctgcaaaagtaattgcggttttcaattacttctcaaaaaccgcagttacttttgcaccaacctaatagtacttgggtaacaaacatctgcccatgacaattagttaatccttctgtcaaacatcagtgactggtggggcgcagaggctcacgcctgtaatcccagcactttgggaggccgaggagggcggatcacccgaggtcaggtgttcgagaccagcctggccaacatgatgaaaccccatctctactaaaaatataaaaatcagcctggtgtggtggtgggcgccagtcatcccagctccccaggaggctgaggcaggagaatcccttgaacccgggaggtggaggttgcagtgaatggagatcatgccactgcacttcagcctgggcgatagagcgaaactccgtctcgaaataaacaaacatatatcggtgactgcccatcatttgtagaggcttttttaaaaaagataatatagtcaactttaggcaactacagaaacgtaatcactcacgtcagctttaagacaattttgggatgttggtatatagaatccagtgtctgtaggggaagaaaagccgcagagcctaactaatacctagctgcggcttgtctttctccacattgcagaccctttggcaaaggacagaagcttgagagattgtcattttcaccctccagttctctggcaggacttgacttaagccgtgccagaagacagtgtctatccttaaagaaccttgatttatcttacctttatatgttataagagtagtctgggaaaacaatactttctgatgaaatgtaattgttaattctctgggttgattattttacacaagcaagtacttttctattacctgggagagtaactaggcaatgaaatgtggtctgatgaaatcaaacagagattacataccttttttttttttttttttttttttttttgagacggtctctctctgctgcccaggctggagtgcaatggctccatccgggcttactgcaagctccccctcctggggtcacgccattctcctgcctcagcctcctggggaggggggactacaggggcccgccaccacgccctgctaatttttttttttgtatttttagtagagacgggggttcaccatgttggccaggctggccttgagctcctgacctcaagtgatccgcctttctcggcctcccaaagtgctgggattacaggcgtgagccaacaagcccggcctacatactttaaaaaggtaactacaggggctgggtactgctcacgcctgtaatcccagcactttgggaggccgagacgggcggatcacgaggtcaggagttcgagactagcctgaccaacatggtgaaaccccggctctacgaaaaatataaaaattagccaggcatggtaccgtgcgcctgtaatcccagctatatacgaggctgaggcaggagaatcacttgaacccggggggcggaggttgcagtgagccgagatggcggcactgcactccagcctggaccacagagggagaatccgtctcaaaaaacaaaaacaaaccagttaactataggggccaggtgccatggttcatgcctgtaatcccagcactttggaaggctgagatgggaggatcgcttgacgttaggagtttgagacaagcttggccaccatggtgaaatcccatctctagtaaaaataaaaaaattagctgggcttggtggcactcgcctgtaatcctagctactcgggaggctgaggcaggagaatcacttgaacctgggaggtggaggttgcactgagccgagatcgtgccgctgaactgcagcctgggcaacacagcgagactctgtctcaaaaaaaaaaaaaaaaagttaactataggaggtgattccatgatttttttgtcacctatgcatttcggcatctttcagttgtttaaggcagttctctacagaagagcccatttgccgttgtgcttcctgagtgcagaaggcaccctcctgtcttcctcctctgatacctgctttcttctgtcatgcattgtctcacgggtacca

SEQ ID NO: 1884150 - DNA, 4001 bp, Homo sapiens
atgtctagcatgtttaatatcctaagatatacatagtgactaaacatcaatgagagggataagaaaatcacttgataacatttcaagtatcttaaattttggttctcctgtctgatttgcagtagagtaaagcaacattttgttgtgtttttttttgttttttgtttttgttttttttgagcagtagcaagatttattgcaaagagcgaaagaacaaagcttccacagtgtggaaggggacccgagtgggttgccaatgctggctccggcagcctgcttttattctcttatctggccccacccacgtcctgctgattggtagagccgagtggcctgttttgtcagggcgctgattggtgcgtttacaatccctgagctagatacaaaggttctccacgtccccatcagattagttagatacagagtttcgacacacaggttctccaaggccccaccagagcagctagatacagagtgttgattggtgcactcacaaaccttgagctaaacacagggtgctgattggtgtatttacaatccctgagctagacataaaggttctccacgtccccaccagagcacctagatacagagtgtccattggtgcactcacaaaccttgagctaaacacagggtgctgattggtgtatttacaatccctgagctagacataaagactctccacgtccccaccagactcaggagcccagctggcttcacctagtggatcccgcaccagggctgcaggtggagctgcctgccagtcccgcgccatgcgctcgccttcctcagcccttgaacattttgtttttctaagactaagaatttggatcttataaagtcattttttgaaagtgcttttatgtgacattccactgaaagtgattatgatgagattatgcattattctttcttttcttctttaccattccaattagtttgttgttcatactaaccaaacttacagatacatattttaatgtaaaaacatacaacacaaactaaatatgtcactgtgtgacatatttactatactgaacactatactgaatatacactgaatatatatggcaaacagaaagcatatataccctgaatatatactgaatatactgaagaacactgtactgaaataaaacttaaacctatatgttgaattggcccagagtatactaggaaaatatgatcctgaaaaataaacactgataaataaaatatagttcttaaaatttcagaaatctagaaataatactttggctggccaagcaaaatgactaagtcacttatcatggggaaaaaagaaaatggactggcctcttatttttgtacattcaattccagaagaaggtagaactacctgttaacaagttctactgagatcctcaaggaaaggcagtttgatccaattattttgtatctatctaaattgttcttaaattataaaagctacacacatgcaagaactataggagaatactgctcccatgaaccatttttgagcaaatgactaccaaccagattgacttcagccaaccaagaaatgactgaggcaactatggcaacaggactgctgataaacattaagactaaaacaaaaatgggaattagtacaacaaggtatgttacctatgctgacaatgcagttaacaaaaataagaagaaaaagagactcctccagaaacggcagaaagtagaataaactcattgattgcctcatctgtaccatgattcatatttatggatcactccacccaacaaaagtagaatacacattaaactgcacatggaatacttttaccatgatgaaagaattcaagtcctatcaggaatgttcttgaccacaatggaggtaaattagaagtcaataatatatcatggaaaattgtcaagcttttgggaacaaaataacattcttctatcaggttggtgcaaaagtagtctcagtttttgcctttaaaagtaatagcaaaaaccgcgattgcttttgtaccaacctaataaagccatagatcacagaagaaacaaaagggtaaattagaaaaaacttttaaaaggaaaatacaacatatcagaatttgtgggatgctgctgaagcagtacttaaggggaaatttacagtgctaactgtctttatgagaataatagaaaggtctcaaattaatgacctcaagctgccaccataagaaactagaaaaagaacaaataaaactcaaagtaagctggtgaaataaagttcaaaatggaaatcaatgaaataaaaaccagagaaacaatagggaaaatcaataaaactaagagaggatcaacacaattgatatacttctaaccagaatgattaagaaaaagagaaaacatacaaattcttgatatcaggaattagagaggtggcattactatagattctacagatattaaaataataagaatgttatgaacaacttaatgcttttaaatgtgataattgaaataaaacaaatatattccttgaaagacccatatgaccaagtttgctgaagaagaaagtgataacctgaatagccctatatttattaaagtaattgaaattgctttaaaacaaattcccataaagaaaagtcctgtcctggatggcttcactggtgaattttatcaaatattaaaggaagaaataatgcaatttcatacaaactattccaaaaattgaacatacgtagccagcattaccctgaaaccaaaaaccaggtaaagataggttgtataacattacatgtgaatttattatttattcaaaacaaatacatctaatatttaaaactaccaccagaatgtaactttttaatttatttcttcttggtaagcaattttggtcttattatccgggtttttatcaagttcagggaaacattataaaattatattttataactatcaccactatttggccttctggaacgtctagtcctatctgccatgactttttaacttttcacttcttttgtatacatttctttttgatctagattctaggggacttttaatttatcctagagatcatcactttggtctctggctgtgttcatttggttatatggaattttccattaaatttgatttggcaaacatatctctaagaattgtattttattctttgttccctttttgtatcagcctcatcatgttttaaacatgcagtttaaatatcctatgttttttttctcctaaggtcacatctccttgttcatcttggccatttcaatagattttaaagagaaaaaaaagcatgaaataattgtgcttggtccttattatcttgaaccagaaatctgattctcttattttatacaggacatttagtagaatatttattttggatattaatagaataattcattatgtgttggagacaatcttgcctttcagagggacatctaaaccataaaccagttaactagaatatgtaatctctttccactacaaatagtaatacgatagtgtcatgggccaaaaatcagggaaacatagattctaacggctatttattacatccatgtctcagcttgcttttctgtaaataattgtcctgtataacctaagacaatctactcaaccctgctaagaaattccctaacaactgctttgtttcaagtaatggtaggtaattcaaataaattctcccaataaaaaaataaataaataaaaacatcttccaaaaccaaaatcagagagttaacaacgtaatgactaagcaccagaacagaaacaagctgggaacccagatacaagcaaaacaatggagataattctgtcctaagaacacagccctaactggaagatgcagctaaaaggctaagttatttttccagcaagagtcaaaatctagggcctgccaagggtggggactctagtcatcaacctcaactgggaccctctagagctgcaccctaccagtaagggtgaactggaaataaaatagtcatccagttagcctgcagcaaaacttttaatcacttgggggaccacac

SEQ ID NO: 1884151 - DNA, 4001 bp, Homo sapiens
atcattagagtgagcaagtgggagaatttgtggaaatatccacatgcctgtttaaaatggctgctttgttttctatagcccacatgtaaatagtgaatggcaacaccaatagctctcatagacagtgagttagaagccagacctcaggtaggagctagaaaacttagaatgcttgatttgtagtctaacttctttcatagagaatctgggaactgggctttgttgttgtagctagttggtgaatgaggaggtgaagtggaggagatatgggaagaacccatttgtttgggcattttttctcaatgtaccttagtttgtctgtagtagctggccacagtagtgatgattctatttcctgagaggtgagaattgctgccaaagaatgtctgccatggatgagaatacaaagaaaggaaactaagaactctcaaagcagctactagaaacccttcatagaggacaagaattatcttcagttttgagatatatgagaatgattacaactcctttgagcaggcttcacatactgcccaaagatgcttctctagtttgtgtccttcttgctatcagaaagagagaaggaaactaaataaaacaaaataaaaattttagaattttgtgctgtcttggacatggaagcaatgggtcaggatcaagattgtggaaagatgccagttcggatgcaggctagaaaaattagtattgtcctcaactggaatcagcaaccaaaagactaagtgtatgtgtctctgtaggctgaagggttttcagatatcataaaagataagaagtcaagctacacttgtttggaagcatgtggcagagaacacagattaattgtttaaaggatggcccaaacttaaggccaagtcacatcaaacccatcagaaaccaaaagtgtggcagaattcctaacagaaggatgagagaggaagagccttatatagatctgtcttctgtttcacattctgactattctaaagcttttaatgaagaattccctagagtcataaaacaaaggctaaatggtgagtggctgcaaatacacataaaaatatagtgaattttttgaaaagatatactaatttcaggtggctagaaagatttattaacataagtaataaaggtcttttagttgtcaaagtaacttatacttaatatttattgcaattttaaaaaattaaaatgctaaaaattatttgtgaaaatgagttgttttatatgtttacatttaataacaatactttttacataaagaaaatacaataattaaatatatctgaactagtcaaaagataattataagatttaaaattgagtttatgtgcaataaatgtggtaaacaataatgtgatataaaatcttctaaatttaataatattcttggtagaggattctggggcaaaaatatgattttctccatatccctgcccactacccaatatatgataacatgtggcattattaaatatggaaaaatattaaagaatggcagtagactagagagaagagaaggaaaggcatacaggaaatccaggtccctgccctcagagacctctcaattcctggcatatgtttatgttttgaacattatgcaaatttgtctgcatgacaaatttattcttgtttcaggttaagagtagaaatcaacccatagtccttacgattagaattgccttagcataacgattcaatcagtaagaaaatataatagactagagggtaatggagattttaaaatttatattatcttaatatatttattagaaaaaatattagattgctcaataaatcaatggtaactttaaggcttttactgtctactacaaagaatttttatagatatatgaagaatgatggtaaggaagagatatgatgccatgaggcctactgtgagcaagacactgctaatcaggctattaggttggtccaaaagtaattacagtttttgtctttgaaagtaatgtcaaaaactgtgattacttttgcaccaacctaatacttccgcactttggaaaggctttgcctacatcattttggttattgtgagaagacttgcacacataaggaatttttcaaaataatattttaacttgaaatacttttctttgacaaatacagtaaaagtgatagagccaaaaagaggactaggcatagccctgaggggatttccgagcaaaaaaatcccaggggatttgtatgcaaacacttcgctcaataaaaggagaggccaggtgtggtggctcacaactgtaatcccagcactgtgggaggccgaggtggctggattgcttgagcccaggagtttaggacgagcatgggcaacatgacaaaaacttatctctaccaaaaaaaaaaaagaaaaaatagcggacatggtggggtacacctatagtccagccacttagagaggctgatgtgggagaaacgcttcaactcgggagtttgagacccgcctgggcagtttagtgaaacctcatcactacagataataataataataattatctgggtgtggtgacacacgcctatagtttcagctactctggaggctgaggtgggcggatagattgaacccaggatatctaggctgcagtgatctgtgatcatgccactgcactccagcctgggtgacagagaccctctcttaacaaaataaaaaatacaaaaaggagaaagtcatcaaacaaaatgatgtgacttagtctggtaatattcgtcaagaagtcaagatttatgctctcttacaattctgactttcacattgaattaaattaagggtgtcttggcttgtttagtgtagtttagtaaaatacagtcatttgttttccacagctattatattattctccattaaaaaaagaagaagaagaagaaatgagaaaaaaaaatcagtccctagctagaaattttaagagtcaataacatttgggaaatgaaaatatattctgaagtagtataatcatacccaaatttttagactctgtactcaatctataagatgtatgtgagcaaaatattattagaagcaacatgaatgataatcacgcactacaagcgcacgaataatgtttccctgaaaggtacaataaaaaattattcaatgtgaaacaaaacgttgactgcaacaattattaaaatttgactattgaattgtcagtatactcaattatgaagacatttggaaaatataaatgagcactactgtttttgctcattttttaaaaatgaaaatttttggtaatgtctgacctgaaggcagatattcattataatagtcaaatatcataaatacatttcaaatgttatgtattctacataaattactcaggagaggaacatgtaggctcataaacttgcacacaagtaaaggaatgtttcttaggaaaaaattctgtgttaaagatattccacaccaatgtctcaggaaaaggcatttgtagtatactgctccattacctatgcttcataaaaaatgcagctatctaatttaatttagctctgaacagatttcttagcagcataatttatgttttgagaatatctcttaagaatcatagcttgcaatctatggtgcttcaatgaagaataatctgtaaacaaaatctccatctatcaacaaaggccattaaagaccataaaataacccatccttgactgattaatgctgctactgaaagggatttcaggctattaacatccagaaaatatactgccactgtggttgcatttattataaatcacatagttatatgtactggtgtaaagcaatgttttcttaaccacctccctctcccaaattaatttaataacaaagatactttgaagaacactaaatatctatagaaagtaaatgattctatttttttccctagaggaaatgtatgtgaaggcagggctatttataatacattagatagctaaatattggtttaacactttatatgcagttcaattatgttcatatatttatgtcattaaaatagtttctctaatgtaaa

SEQ ID NO: 1884152 - DNA, 4001 bp, Homo sapiens
cttccctgacctcacacagatggtaaatgacagaacccaaactaattaaatcctgcatttccctgaatcgtttttggggcatctcatctcagaaaaggaggggaaggttatctacttaaggaaggttatctactgaaaataccgcagtagtattgattacattaaggcatacaggaattgcaatatggtacagatgaacatgcatcttttgctaatgtgtaagctcatcactaatcagcctacttatgaatgaaagcaagacctccaagaggcagaatagttactatgtaaattgaaaggcatttttttctattaaaatacatcataaataattatgtttatatccttgcagtagtttaaaactctattagcaggttttgttgttgttgttgttttgacattctttttttatattttttattatactttaagttctagggtacatgtgcacaatgtgcaggtttgttacatatgtatacatgtgccatgttggtgtgctgcacccattaactcgtcatttacattaggtttatctcctaatgctatccctccccactccccctaccccacaacaggccccggtgtgtgatgttccccttcctgtgtccagatgttctcattgttcaattcccacctatgagtgagaacatgcggtggtgttttgacattctgtcgcacaggctggagtgcagtggcgtgatcccagctcactgcaacctctacctcccaggttcaagcaattctcgtgcctcggcctcccgaggagttgggattacagacgccggccaccatgccgggccaaatttttatatttgtaatagagatgaggtttcaccatgttggccaggttgatctcaaactttgacctcaagtgatccacccaccacagcctcccaaagtgctgggcctccattagcaggtttttaaatgtgtttctatctttttgtcttgggctgccttctgttttaacaaagtgaggaaaatggcattcgtgtgcatggagaagggactctgggggccagggtttgtgttctggggctttccgagtccttgagtgggttctggagtcacttaggataggagtcacttcacttacaggagttttgcttgtgcagaggtctcatctgctttggatttactacacccatcactctgcatcttctggtataaaaaatggaatgtgattgctggacaaaagcaaaaccttgtaaatccactttaaagaaagcaagtgaatacatcccagttgtcctagacactgagaagtcctcacatttaaatggctgtttgggaaaatattaatactttgaggagcttgacaccgggcaaccgctgtctgagcttcataggaaggagatgcttctgtgtgaatgaaataaagcccagctcagggcagcctgagttctgtgggccttcacttgggtctagccaggtgacagaatgtgatccgtctgagttggaggctgcagtgagctacggtcacactgctgcactccagcctgggtgacagagccagaccccatctcttaaaaaaccaaaaaaaaaaaagtgatctctccgtgtctcagcgtctgccacctgagatgtttgatgtaactgtgaaaagaaaaaaggcacgtttctttcaaccacatctctttcaacaatctaaacttcacaaatgataaccaggcacatccgtctagtgttttgcagcagaagcaagggtcccactgtgtttctccttagccgtgtggactgggggcagctggagaaccctcagatccgcagtcctctgtggactcagcttgcagatccctgcctggtacctgcccacattgccacaggagccagtaagaaaataacagcaggggctctttgtcagccatggaaatcggcacccttggaatgcatgaatcttaggttggtgaaaaagtaatcatgctttttgccattacttttaatggtaaaaatgaaaagtaatggcaaaaaccgccattacttttgcaccagcctaatatattcttacgtgtgaaagtatttgtagcttctttccattaaactcaaaagtagggggttttcttcctcaacactaaaggacatcaaagtagtaattttcaagagagagtaaagtgcattgtcagctcaaatatatgaatccaaacatgatttctaaaaagatgatttagccagaagagttagtaatctgacaaagtttaacagctttcttaaaaagtcataagtacccactggcaatgtcaattactactttattttctcaacagtcttctctcatttcggcatcttgcaggaaagagcaacatcatgaggcgtgtctacacctgcttctgtgggagaaggaatgcacgggattccaaaactggtcatgttcgtctagccagctacacactactgaataatatggttttctttgctgtttttgagctggagtctcactctgttgcccaggctggagtgcagtggcatgatctcggctcacagcaacctccacctcccaggctcaagcaattctcttgcctcagcctcccaagtagctggcattacaggcgcccaccatcacacccagctaatttttgtatttttagtatagacggggcttcctcatgttggccaggctggtttcaaactcctgatctcaggtgatctgcccacctcggcctcccaaagtattggcattacaggcatgagccacgtcacccggcctggttttctagtatatagactatttctctttttacttaacctataaaatagaattgatgacttggtaatgttacaaagggaatactgggccgggtgcagtggctcatgcctgtaatcccattactttgggaggcctaggcgggtggatcacaaggtcaggagatcaagactgtcttaaccaacatggtgaaaccctgtttctactaaaatataaaaaattagctgggcatagtggcacgcacctgtagtcccagctacttgggaggctgaggcaagagaatcacttgaacctgggaggcagaggttgcagtgagcccagattgcaccactggactccagtccagacagagcaagactctgtctcaaaaaataaaataaataagtaaaaaaattaaaaaaagaagggaatactgtagttaagcggaaagctgacttacacattgtcaactttaattagacctagtgccgcaggagaattaaaagagacatgtctcagaaaataattctacagaagccacgaccaggacatgccatcgttgttattagtaattatttttatacctgctgtatatagtgcaaggctgtgctcaacgctttatagaattcattaaattctcacactagttccatgatgattgaagaaactgagacttggagacatggtgacttgcctcagtgacggagcttggatttgctcaaacgtcttccaggttcttgagcccacaaccttacctactatgactgtggttttcaaacatgggacagagttttgagttctcacttttgcttcaacgggatagctcatttaaaaaatgctttgcacgtgttcgtgcatccaggtgagaattcatttgaacccagccccctcaggcccctgtgctcccagctgcccagggccatggtgaggagcggctgtattcagtcaggcctacggcacgccatgcccgtggccccacacccaggctccccttccgcgttatcctcagcctgcgcagcccagggcctgtgtagcatgcatggcacatgtgctgacggaggcttgtggctcatggggcccaaatagccaggagctggggctttacggttttgtaaaaactcatcatctgagcaagggaagcaaaactgagcctcgttttgatgatgctaggctacaacttacaggcttctgaagactttttaaaacaatccctttcaagtccagaagtgttaagaaggttatgactcagagacatcaaagcagaatggatttgtggatctgaggttaaataatcatttagggcaaagcaggcatcactggt

SEQ ID NO: 1884153 - DNA, 4001 bp, Homo sapiens
gttccttgtcccaggtacacacaaatcagcgacatcactagaacgtgttttggaccacgaaaagaaggaaaatcacagcattatccattgatgctgcttaaagcgtatttccagatgtccctcccccgcccggcctgtatccaaggcttccgctgaccacgcggcatctgctgggcactctgcgcgctttctcccacacccgccacgcctgtgggcctgtgcatgtccctccacgcatccccacgcggctaaatctcccacacccgccacgcatgtgggcctgtgcatgtccctccacgcatctccacgcggctaaatctcccatacccgccacgcctgtgggcctgtgcctgtccctccacgcatccgcacctaccacgcggctaacacacacctcccacaggtggcaagtgcctgaacgtccccacggctggcggggctcccggtgcaggacacacagacaggcacggccgccccgcccacggccaccaagggctttgctttgtccccagaggtgcccttcgatggggtcacacggcagatggccaagtgttagataattaaggctcaggaaatcaccgcagccttacctttagaactcacctctcccctgcacttcaacccgaagggtgggtcgccagagctggggaagagatgcccaaggctcccttgcgccctgacagcctcggactctgctcccctctgttggtttcttactgcacctcaataaacttagctcacagcaagaggcgggcatggccagagtagaaacacacgacagaccccgggtagacgcgacgggggacgagggtgcgtgccgggacgagggtgcgcgcggggaagaagctgcgcgcggggatgagggtgcgcgcggggaagagggtgcgcgcggggatgagggtgcgcgcggggaagaggctgcgcgcggggaagaggctgcgcgcggggaagagggtgggcgccgggaagagggtgggcgccgggaagagggtgggcgccgggaagagggtgcgcaggctccgagaacctgggggcagcaaggccggtcaaggctggagactccaacagtggcagcagcaagggtgttggccaagccacagagacagccccacccagaggggctgcatgaaccagcagcgaccctaacccaacgtgctcatcggactgggcacacgcacacgctgtggacacgtgtgaatatgttccaattaacgtgatgctacgtaataatcaacaacgttaaccccatggcttcattacatggcatctggcacattgagactttttattctgtctctcttcctatacaaagaagtggaaaataggtccaagatcattcacaacaaattattgctaattgcaaaaaaaaaaaaatcctaccctcaccttggaagatctcaaggcaacacctcgttctttgaggtcatagtggggacgctctccggacccctaggtgagtctgtgactgaggggaatccccaaatgggcagttttggggccagcacggacgccagccatgcatccaggcaggtcttgtgacctcggctgggtcaccaacctattcctgcactcagaccccgccaggaacgagggcaccggcccgcacatctctgctcccgaggctacatcccctacgttcctctgcactgctgggttccatgccttagatcccaggcaccttaaagctgatgttcccccaccagccctcatgaagatgatactcacacaacgcccctcctctcccacctggtcagtacccagggagaaaggaacccgggtgtcagcttgattttctgccagtacattgaaaaaacagctggccagcagcactggtgcacagcactgccaggctacccatgaggaaagctaagtaaagtcagatgtactcaagtcggctgcggcaagtgcttctacatccctgctccaacaaggaaagacaggaggccaggcgtgtgtgtggctcacacctcttgtccttccttgttggggcaggggtacagaagcattttggggggctgaggcagaagaaatgctggaattcgagaccagcctgggcaacatagcaagaccccatctctacaaaaaaaaatacaaaaatgagccaggtgtggtagcgcgcctgtagtcccagctactcagggggctgaggtgggaggatcacctgagcccaggaggcagaggttgcagggagccaagattgcaccactgcactccagcctgggcaacagggcgagaccctgtatcaaaaaaaggaaagaaagaaagaaatacaggagaccactaataattccaaatagtgcctactaatttgaaatcttttccagatatgatgaaggaaattattttccttcctacaccccttctaaggaaacatttctatttttctgctacacaatttggtaacctgccctttcagatcctggcctctttaagcaggactcgctggtgtgctagcaaagcagtgctctgaaacctcagcatcctcagacccacctggagggcaggtgaaggatgctgggcctccgcctcctaacgtcacactggggtggggcaggtctggggtggggcagggtttgcacttcgaatgcattccagtctagggccacatcgccctaaacacgcccatctcatctaatgcatgccagagggaggagccacacggggcaggtcacagagcaagtgtccaggcaccaggccaccaggtgtctatttaaatgcaaaccaatcaagcagcttaagtcaaacagcttcaccctcctaacacattggccaacacaactagtgataaatatcactgctgttagaccttctgctcactgatgaccagagcaagggcctgaaacatcaaagctgaagggcgtgtgccacggtcagggctccgcacacccccgtcccaggccatcgcacacgggtgccctcaccggcaccggggtctcacagaccagctccactctcacacttactgggacacaaccaccctttcagcccttcatgcgtctgtaccctacagcagtgttcaagggaggctaatttaagaaaggaatgtaatatggacatctgtgaactcttcctcatatccactgagtggtcctccagaaagagaaagattaaaaagaaaaagaagatttaagaatcaaacacagggccgggcacggtggcccacacctgtaatctcagcactttgggaggccaaggtgggcagatcacttgaggccaacagtttaagaccagccagaccaacatggcaaaatcccgtctctactaaaaatacaaaaatcagccaggcatggtggcacatgtctgtaatcccagctacttgggggctgaggcaggacaacggcttgaaccgggaggcagagattgcagtgagtggaggttgcagtgacccaagatcgcgccactgcactccagcctgggcaacagagtgagactccgtctcaaaaaaaaaaaaacaggccgggcacggtggctcaggcctgtaatcccagcactttgggaggccaaggcgggtggatcatgatgtcagagatcgagaccatcctggctaacacggtaaaaccccgtctctactaaaaatacaaaaaaattagccaggcgtggtggcgggtacctatagtcccagctactggggaggctgaggcaggagaatggcacgaacccgggaggcggagcctgcagtgaactgagatcgcaccactgcactccagcctgggtgacagagtgagactccatctcaaaaaaaaacaaaaacaaaaaacaacacagaagcccgtggaacaagcccttgccccagtccacgtcacctgtgctgtgccacccaggagcatgccaagctcaaagagtcatccacctgccttgatgtcactactcgaatcacagaggctgagattccctaaccctcgttatgtccatgtcactcacaagcaggcactgggcccccacaatgcacagggaatccctctggccatccaatgaccatccattgataaataaaaagcatt

SEQ ID NO: 1884154 - DNA, 4001 bp, Homo sapiens
cttcacatggcagcagcaaggagaagaatgagtgcccagtgaaagggaaagccccttataaaaccatcagctttcatgagaactcactcactattatgaaaatagcatggggaaaaccgcccccatgattcaattacctcccaccaggttcctcccacaacatgtggggattatgggaactacaattcaagatgagaagtgggtgggtacacagccaaactatatcatctgcatagcaggtggccttgtctccccattcctgggctcccccagggcaacctgtcccccatcccactcacgaggcttccctctaggaagccgctaagaagagacctgccacccacctgcttgctccactttgagtgggaaccacaccagggtcaacctcagaaacatctgaaaagttggaagtaaattcagcagtctagcaaaagcagtcttctgcaactgaggaatccaggttgagcgctgccatgacctgtatttgaaaagctgccaccttccaatcaggccagagttaaagagcaatttgaaaagagcaagaatttccaagctataaaactagggacatgattctaagaggataaaacattttaagattggtttaaaagcttttgaaaaatttaaggccaggcatggcagctcacatctataatcatagagctttgggaggccgaggtgggaggattgcttgaggtcaggaatttgacaccagcttgggcaacacggggagaccccatctctacgatttttattttttttttaattagctggacttggctgggtgtggtggctcatgcctgtaatcccagcactttgagaggctgaggcggacggatcacaaggtcaggagttccagaccagcctggccaatatggtgaaaccctgtctctactaaaaatacaaaaattagctgggcgtagtagcacatgcttgtagtcccagctactcaggaggctgaggcaggacaatcacttgaacttgagagacagaggttgctgtgagccgagatcgcgccactgcactacggcctcggtgacaaagtgagattccatctcagaaaaaaaaaaaaaaaaagctggacttgatggcatgtgccagtagttccagctactagggaggctgaggtgggagcatcacttgagtccaggacttcaaggttacaggggctatgattgtgccactgcactccagcctgggtgacaaagcgagaccctgtctcttaaaaattttttgtttttaaattcaaacccagttttcctcaggactcttattaacagctatctaaggaataggaagggatgccctcaaaccgggcagaacgagatggaattctaagtcattttgtcttttgcatttctgaaaagactttcatttttcaaaggacatcaaaactgaaatgccttataaatccctttgtgtttctgcgttctgttcaatggcatcaataagatggatgatcagcaaatggcatcaaactccatttgtattcttattagaataataacacgtaaaatgatatgaaatgaaacagcagattccaatgaccttgtagcccaattcaattactatttcactaaataacgacaaaactgacagtcctcaagctgctgaatttatgaattaaattcaacttctcttctacattctgagcaggactgagtggaaaaagaaatggtcagtgaggactggggaggagtttccttctctttgctatttaatgcaacatcgccaagcccactggagggaggggtatggaaagacagtttaaaaaggaatatcaggaccagaagggagaactgatggccagggcccttgctatagtttgctcctgcagatgagacactgctttggaaaattttatcattaaccaaactgcactgatgctaaaagtcaataaagccaagtattaagttggagcaaaagtaattgcagtgtgtgccattacttttaaatgggaagcactgcaattacttttgcaccaaaccaacagcatcaatcttgcctgcatcttaagcaaaggcttaatgagaaaaaaaacatacttgagactactaaagcattatacagtcagtcctcattactagcagattctgtatttgtaaatatgcccatcacctaaaatctgtttgtgaccctcaaattaatactcccaaatgtttgcagtcatcatagacatggcaggacagtggacaactggagtttcccaacaagcacgttcccaggtggcgtctaactaaacaacactctgcttttttgtttcagttttcatactgtaaggaagcaccctttccacagtctttttagtgccacaagtttcgcatttttgtgtctttttgtgtctgtgtgtgcacctgcatgcgtgtatgtgtgtgtgagtgacttcactatttaaaatggtccaagccaggtgcagtggctcatgcctgaaatcccagcactttgggaggctaaggcaagagaattgctttgtgacaggagttcaagaccagcctggaatatactagtcatgttcattggggaattaagacctcaaaaacatagccagaccctgcctctacaaaaaaataaaattaaaaaattagctgggcatggtggcgtgtgcctgtagtcccagatatttgggaggctgaggtgggaagatcacttgagcccaggagtttgaggctccagtgagttgtgattgtgtcactgcactccagcctggtcaagagggcgagacccggcatctacaaattttttctttaaataagaaaagagaataaattttaaaaataagaaataaaatgaaatggcccttaagtatggtgtggaagtactatttggcattcctaggctcaagaaggctgtgatacaccttacacaaaaaataagtgcattagataagcttagttcaatgctaatgaatcaataatatatattttaaaaggtgtcttcaaacaaaaacacaggtaaaataaggatttttgttgattggttgataaaaaggtaaccaaagactcacaggaacctaaccctgtatttcccctaggaaattcagtattaactaataaattcaggactcactaatgcagtatttagggcaagtttatagaacatcaatactgtgaataacaagaattgactgtattttcaaactgcagtaaaaatgccataagtatgtaaaataggacttgtaggaagacaacaaagtatatttagatgtagcaggttcatcttttttactttttttgcagatgtgagaacttgacaatttctaaccactggacttagaatggagaacacagccaatctgggtgacagagcaatattccgtctcaaaaaaaaaaaaaaattagctggacttggtggcatgcaccagtagttctagttacttgggaggctgaggtggctggtcatgaactcctgacctcaagtctcccaaaatgctgggattataggtgtgagccattgtgcctggccagcaatggcaatattttcttactaccaactctcagaaaacatacattattctccataattatccaataaatttggacccatctgaaaataagcatcagtcacttttcagtttatacatgtatgctattagtcattactctggtaatatgtgaaatgtaaatcattgccttattacttactggatatgggctgttttttggttgaggtatgcgtctaatttattggtactacattagaaaatgccctacaccaaatatctgctctgattggactaagatcctacatttttatatttgggaatattgctcaacttgagaaaggcaagatgtcccaatccctgcaacagtaacttggactttttttttttttttgagacagagtcttgttctgtcgcccaggctagaacacagtggcacgatctcggctcactgcaacctccatctcgtgtgctcaggcgattctccagcctcaagcctcccgagtagctgtgattacaggcatgtgccaccacacccggctgatatttgcatttttagtag

SEQ ID NO: 1884155 - DNA, 4001 bp, Homo sapiens
ttccattattggaatgctaagcaagtgggagttatttatattctactgctcaaggacagcaccaaggtctgattgcaaaaattcaaaaaattgcaacctcgggcatacatgggttaagagagagagaagttaccaaaacacaacaaaacaacctggaaaggtcaagaaagcagggcagatgggaaggtggactcttctctggacacatttgtcagtggccctattagaaagagatatccagatgtaatctgaccactgcaggacgcagggggaccattgcctacctatgctattggcaactcactttcattaatgtcccccaagattggactaatcactttggcagtcatataaagaacttgctgtcaactaaaacccttaggtctgtttcccacgaactgctgttaaatcaggtttccacaatcttgaacttgtgcactgattttttttccatctaaattcaagacttcattaaatttcaccttgttagtttctaaccattgttccgggtacacgtgctctcttgcctacatgatcctgttctctcgcactctctccccctccttcttacctctcttcctcctccatctctcccctctcccctgcctcctttagtcatcaaacttacaatccctcctccagaaatctgatctaaatacatgcatttatatgcatgtattacatatggtacttaaaaagccttgttctcataaacaaacagacaacttattttatggaatcttggggtgagccaacccttcacagggcagaggtcacctacaaggggagaggcttatagggttattggggaccagaatgaggaagtggtgactttaggtgtgtgtatcagaactgttttgatgcagcaactggctggcagagaattgtattaccaggaaataataactcactccaggttttcataaaggccaggggttgcccttgggttgtatccctaagtatataatagtatataatgatcagctttaactccctacaactcccaagggtctacagactaaaaagtgcttcctgttaccaaagtgaagtcaaatgcagcacagtcaaattagtttctccatgtgggtgtccagctctaattatataacagcttctaattataaaacgttaagaatggctattaacttttgaatctcattaaaattaacggttaatttgctaaaagtcgcttgtttggaaaaactgctaatgaccgttctgcagataggtacaggtacaaaatctgcaaggacacaggctcaaggaaaaattttgcatttaaaatctcacacacctttgagtttttagctagtgtacatagtagctagggtttggggagatatatttacatttagtccaatgaataggaatagtctgccaggcccggtggctcacacgtgtagtcccagcactttgggaggccaagacgggtggatcgcttaacaccaggagttccagaccagcctgggcaacattgtgaaaccccatctcttccaaaaaattcaaaaattagccaggcatagtggcgtgcatctgttaagtcccaactactcagaaggctgaggcaggaggaacgctcgagcccaggaagtcaaggctgcagtgagattgtgctactgctgcactccagcctgggcaacagagtgagaccttttctaaaaaaaaaaaaaaaaaaaaaaaaagaataagaattgtcacttgacaataagaacaggatgaaatgaaaaaaaagagggaatgacttacccatctattttaacagttgggattctagagtatggcagggagcacaggtgtttgggggtacagggactgaaaggtgaagccaattccattccagtaatagaataagctgtgaggaggacccagatgtctgttctttagaatggcccccaagatgtatgtttctccatgatgcactgtcctgaattccgcagcctgtgtcagaaaacctgcctgctagtggacacgagagcgtggaaggtcaagcacgatgctctcctgcagacacctctctcagtgcatggaaacagaccactgagccaagagagcttgaggctctggagacggtttttagactaaaatctctcatcaggagatgagcaaatgcaatcagaaataaactccaagtgcccagcacaagccccttcctttcttagtggctgaggctgcaccgtgtcaagttgttacagaagctgcattccagagggtgccctggtctatttcctgagccgatcggcggctctctggcatccatggggagccctgcccaaaccatcatccaccaatggcaactctcccaggggtccaatgtcagcctcagctctgcatgaaacctccatatcatgttctcactactaaggacacaatttgctaaagagaaaagagtggtgaggggctgcagtacagtaatgacaaacaaaactaataaacgagggttttctagagtggatcaccactagaaaatgaggtctaccagccgggcgtggtggctcacgcctgtaatcccagcattttaggacgccgaggtgggcgtatcatgaggtcaagggatcaagaccatcctggccaacatggtgaaactccgtctctactaaaaatacaaaaattagttgggtgtggtggcgcatgcctgtagtcccagctacttgggaggctgaggcaggagaatcgcttgaacccaggaggtggaggttgcagtgagccaagattgcaccactgcactccagcttggagtcagagtgagactctgtctcaaaaaaaaaaaaaaaaaaaaaaaaaagaaaaagaaaaaagaaagaaagaaaatgaggtctacctttcatttcattccctttgccagtcacatagttccctgagaacagagagtgatggccggatgctcagcaaaggcaacagcaggactgaagacagtgagtttctccactcataaaagtaaaaaatacagcacattttctttatatagatacgtgagatgcataaagtaacaaattcaacaagagctttggattcggaatttctagtagtagaagctcaagctcaggtgtttaaaaatctgaataatccataggacctaaatcccttttaattttattctaaaactcacagtggtggaattaataaagaatggttcataatcagtaacactacctctccagcaaataataccatttctgaaatttcaagtttacaggtttgtaacagttagagaggtggggctggaagtatcttattgttttctacttcacctatttcgttactatgtgtattcttagttttcttcagagcaatgtgtccaactgaattcctgggcatctaacaggatttctgagttaaaaatcctgtaatatcaactaatcaattaactattttttaaaaaatcttctttatcatataaactgaatactaaagaattgtaaaataaatgtattattcaggtaaatattgtcctaaagactgttattttgcctataatgctaatgagtacagtatagtgaagtataagaattaatgattattctgtatatatacacagatgtgtacaggtgttaatgtacgtgagcacattcaaaaactgagcattggagatggtgctcacatttgaatatttaggacactattggtggtcttttgatggtatattcatgagtgtcatcgtattcgtatttaaataataagacagcctcttgctagcgagcacagaacaaaatgattaaatgggaatgagttgattcagagatttaatagccaaaaatttggcagagctagatgacaagagagtgcagcagtgagaaaaatattccattttagtgacagaaaaaaatccacaaaaaaccacagcattaaacattattcatgggtactatttgtcttcacttgttgattttaaagttttcggttacatgtttccatatcagatgacattattattttcatatacagttatttaggtcaccaaggaggtttcttttgttactgttttgggttaccacatatttttt

SEQ ID NO: 1884156 - DNA, 4001 bp, Homo sapiens
ttgctccatttgacttaaacattagtttccaaataaaatataagccaattctctgcacattttgaagtggctcactcaaggctgtaatgtttaaaaattgatattcctcagagggttttgtatattttttcccctacttcagaaataattaggggagttatattaaacaggtctaaaagaaggtacctttcttttaggcattttttttccctctcattccccaaacattccattactattttatcccttctgagcctagccagaaacttggcctcctttgactcccaaacataccaagttattaaaaatacccttcagccaatattaaggaagggtcagtaaaatgaactcagcatggggcttaagcagagcacaatgatttctttgacttagtgaaggaaatgaatgaggatgattttggacggccagtttctttcactaatctgttgctggactctatcagacatgaatgtttctccctgtcagatttcctaatatttctccattgtgctgtcaccgacatgagagttaactggcatgagaagagctcatctcactcaaaaaaaaagtcaacattccacagaaagttatgggaccttcagttagtattaagaggaaagtgaaattagaagcttagcactcacaagatttatacaggaaaagaaaggcagacacactattttcaggctgctgctaattaagtcttatttggattggagccttctgaaaggaatcaacacatcaggaatgggtaagctaacagggaggagacagctgctgaatataattctggagagagcagccctgctgcttagatctcagataacacagaggttcagtgtgtaattgactatggaacaagaagaacattgttttgtaaaagaaggtaccattgctggggtccacagaaacagttatggttcttacctctgaaggagaactgtgtttaactgtggcttttagatttaacttactaaatttgtatttgctgcaaaagtaaaccacactcaagagtaaagcaaaattcatcagcaaggctataattttgcagagagaaataagaagggtgtataatatttaaatcggaactcagcatcccagcaaagagcttcttaatcaaaacaaaagagaaaaaatcattaaatacagtaacccactgagattcacatgaaggtatgtcccacaactttcataaatcccgaatttatgataccactataatatactattactccacaagaagtagatgtgaataacacccaaggattactgtgtatgatacagaaaaccaaagagaagaaaagctgcatggagagcagctgctctgactgtgtgtgcagtgcctcattcaccaacacacaattcaaattcaagcctcagcaaaataacttgtcgtaagccatgatcctctataaggtcatcttcaaatagacgaaatagtgacatttaattcataaagacaaggttctactctcttgctgagcaagtaatccaatcaactgtggtttagtttcatcaactttggagaaaaggcaattttctttcaagatttgacacccttcataccctctgcctataattccagatggtaggtgtaggtggtagaaatgttaggttgagcagaatgatagtacctaaagaagaatgaatagtaccaggaaatgcatgactcatggcattctaattttcttgaagttcttttgtacatttgcatcaagattttccacaaaattcaatcctgactttaattgtaaattaaagagtcctttattgaatttctattattgcagagcagttacgccacatgaggtataatagaagcttataatgtcattgagaggccaggaaaaaacacatgtgcagagagcaatatacctgtggctgtcagcctgtaacataggtaacctgtatctgcagtcctaacttgattctaaatctcatagtgccttctctgtttttcccaaggagaaggcaccatgggatttagaaccaagctagggctagagacatatgttacaggctgtgaaagttctaccaaagttcctactttaaagaatgagcaaaaagaggcggggcatggtggctcacacctgcaatctcagcactctgggaggccgaggtgggtggatcacctgagatcaggagttcaagaccagcctggccaacatggtgaaaccccatctctactaaaattacaaaacttagccaggcatggtggaggatgcctgtaatcctacctattcaggaggctgaggaaggagaattgcttgaacccaggaggcggaggttgcagtgagccgagatcgtaccactgcactctagcctgggtaacacagtgagactccatctcaaaaaacatataaaaataaatacagataaaaagaatgggcaaaaagagatactggctaaagtcttaagcaataaattcatcaaaggcaaaaagacaggtaagtgtgtgtggctttaaggaaccattaactgaaccattttattggagcaaagggctcatttaaaggcatgagtgaaaatgacagatggagtaatggtcatattcctttcattattacactttagacaacaaacctttgtgctccattgcacttaaataccaggaaaacacttaccaaagaacaatattaacacatttatgcaaccatatgatctttgcatacagatcacagcaatcaagcttccaaccttttgttgcatgcctactatgtgccaggaattgtcctagcacttcccttccaattccctatcctatttaatcgcttcacattctaccactcacacaaattgtagatttattttactctcagcccacataaaatactccaacctaacaatttttaattctatcggcatgatattctttcatccatctaatgtttctaccttagatcagaaccatttcatatttcaattcctacattaccccctagactccaggcttatagttttataaaataagattgtaaaataaaaacccatcttctcccttcctccagaaaaggagagaagtaagtgtgtaatagctaacatttataatgattttactatgctgagtgctttctacataaagctgtttcatttaatggctcagcaacactgttgaaaaaggaagaacctggagtatggaaagactgaacaactcccaccaggttcatgtaatcagtaattggtggagctggaatttttaatcaggtccaactcagaacctaaatcttttaagatcacaagcttagtcataatattcaattcagtgccttttctttgcctataaaataaaccacattttttgaagtagtggcaatgtaactcttgaattagattgtgtgggttcagatttcaaatgtatcatttgccacctgtgcaaatttggacatcataattaatatccctaatcatgaatttatcatctataaaatggataatattagtttctttacacaccattgttataaggttaggagataattcatgtaaaatgtatacagggcctaatatagtaagtgcttaacaagaactgatgaaggaataatggttaggtacataaatgaatgagtgaatgaatttcctttacatacatctctttatataaatatatcacttatagtaacaagtgtaggtaaggacacctactctatccctcattgttagggttaagaactgcttgcattattttttaggaaaagccattaaatgccttatactaaagagaaaataatgggaggcattatcgtaatcattatcatcatgatttcatcaaaactgatgaaaacctattacatgtaagatatcaaggttaaaaaagagacatatggcaaagatgccatcttaaaacctacatagtaatgcagtatgtgtagattgatcagtgaataattagattgtacaactgcagtggaacaaaagttctaccattcctgttgctcatacatagaaatgcacatgagtcacctacaagcttcctgatttgcttttgctttctccccagctat

SEQ ID NO: 1884157 - DNA, 4001 bp, Homo sapiens
atgtcaggtaaaagtctacacctacctcatcacatcaatctcacagctatgtacagtgactatcatacaccatgttcctctctccaacatcatttctcttctgcagtataaatgttccttgtttgtttcattgcttcccatttggaaggatttctagaatcctcctgatcaccctggacacactgcaactgaccagtgtcacttaaaatatcatctaggaattccattacttctcaggatgcagaaaactacaaataagcatcactcccatactaaaaggaaaaagccagataatctacaaaatcataacttttctccaacccatcagagagctgaggttgcaaggcaaatggtgaacttaatttcaaagtgtgactagtccctccaagaacagatagaacacacaaagcatttcttctttagcagaggacagattgaaaaggtagccatcaaaaaagtaaataaaaagaaaacagctaacattttaacaaattttttaatgttggatatgggctaacaagaaagtttagaattcccaagagccccagccacaaggagagtctgcactcactcctcatttttttccccatggtgctcacaagagagattaagaccaaacaacagataaaagagagccccctacactgtgcacaggcatgaaatcttgcctacttcccaggcccttctctcataaaaaagagaagtcataagccactaaggaggaagccacttcctccttaaaaggtgcgctttaactaaaggagagatagaagcaaaatatgtctgcctctgggtgaaggggtagaaaaccttttcagttacagaatcttgcatagatatagaggcctgctgccctggaggagggacagaaaatgctctcctacccaagagtcccaacaaatatgagacagaaaaagtctcatacctgggacccagatacacagggcctacctaagactgagatcctccaccacaccacaagcttcacactgagtaataagcaacagcagtctagccctcaaagaggggcaacagcattgagagagacccattctctagagtaagcatatgggaccagctgaaagctgaggatgaaatggaaacttgaggaaaacccttcatctctccaggctcaccactaagcaaaggtagcagcaagccaccactggaagaatttgaagctgtcatagaacaaaactcagatctagctcaattactgactgcattgactcaactacccacactaacatcccaacagaagagtctccatttccaagcataaatactatttgcctcagtctctactgttcttttatatgcattatctggcattgaatcaaaaattatcagacaaaaagcaagaaaaaaaatgaagactcttggtcaaaagataaagtagtcaacattaccagaaacagatgtgatgcagatgttaaaattatcagatagggacttaaaataactataattaagtttttaatctagagaaaaaggtagacaacatgaatgaataaataattgtaaaagagaaatggaaactttttctttaaaatgagtcaaatggaaaggctagaaatcaaaaggataacaaaaaggaagaatttcatcataaggtttatcaacaaactgaacacagcagagaaaatgatttacaaacttgaagataggtgagtagaaatgatccaaaataataacaaggaaaaaaaaaagcatatgagagctataggataatagtaaacagtataacatatattttgaatcccaaaagtaggagagagagaaaaggaagcagaaaaaaaaagtttgaagagataatagctacgaattttccaaaattaattaaaaagagcaaaccacagttcaaagaacctcagaaaatcccaagtaggggatgaggggtagaagtggtcaggcacttgtatctttgattttcagtagtttactatgatggggtggatggcacacctcatcatagtaaaactactaaaaaccaaggatacagtgaaaattctgaaagcagccagaggggggggaaaaaaaaaaaacacagaacaaagctaagaatgacagcgcactgctcaacagaaagaatgcaatgcaaaagaaaatggagtgacaccattaaagcactgacagaaaaaactgtccacatggaattctatacaagtgaaagtatctgctaaaaaatgaaggtaagataaagaatttttcagacacacagaaactgaaaaaattcattgccaacataccatactatgatgatgttaaataaagacctcaggcaggagtctggtactagaaggaaattcagatctacagaaagaaagagctctagaaatgattaaaatgtggataataaaagacagattgtttttatttcttttattttttagagacacggtctaactctgttgcctaggcagtgtctaactctgttgcccaggctggagtgcagtggtgcaatcacagctcactgaatccttgacctcctgggctcaggcaatcctcctatctcagtctaccaagaggctggaactacaggtttgagccaccacacccagctaatattttttttaatgttttgtagagaatgggtctcactatgttgcccaggctggtctcaaactcctggcctcaagcgatcctctcacctaagcctcccaaagtgctgggattacaggcataagccacagtgcccagcaaattttttcttaattttagcctctcaaaaaaaatagctgactcaatgtggcacgtatacaccatggaatactatgcagccataaaaacggatgagttcatgtcctttgcagggacatgcatgacgctggaaaccatcattctcagcaaagtaacacaagaacagaaaaccaaacaccacatgttctcattcataagtgggagctgaacaattagaacacatggacacagggaggggaacatcacacactggggcctgttgggggatgggggctaggggaggggtagcattagaagacatacataatgtagatgatgggttaatgagtgcagcaaaccaccatggcacgtgtatacctatgtaacaaacccgtatgttctgcacatgtaccccagaacttaaagtattataaaaaataaataaataaatatcaagtaagccaggccctccatggtcttactttttagtgcttctacacctacatatctcctggtaaggttgaaccacactttcttttgttgctctacttgtgttcatactgttctatttctgtggaacatccttcctcaaatcctaggttaaaaaaaaaaaaaaagatagctgactgcaaaatatatttagtttgcaaatagattaaactagaaaatatttaaacagaatattttcattttcctattaatcaagtaaaaaaaacattttcccaggttaaaaaaaaaagataattgctgtctaaagaaaagatagtaccaatgatcagtagagtttataacatatgtaaaagtaaaatgtagacaatagaacaaaggatggaaagaagaaaatggaagagtaccattgtaagattcttaaactataaataaagcaatgtattatctgaaggtaaactgtgttaaatatatatactgtacaccctaaagcaatcactagaacatttttaaaaggagtaaacttataagccagtggtggagatgaaatgaaatcataaatatatacaaataattcaaaagaaggcaggaaaagaaggaaatagagaacatataagacacatagaaaacaatttgcaaaatggtagactcaaaaccaactataccaatagttacattaaggataaatggcctaaacattccaaattaaaaagcagatataatcagactcgttatgaaagcaagacctgactatatgctctctaaaagaaattcattataaatataaacacagagacatatattaacagtgaaaaaatagatacaacacaaacattacacaaaaactccagtctgtataataacataatacaaag

SEQ ID NO: 1884158 - DNA, 4001 bp, Homo sapiens
agttactgagaacagcactgggggagcctctgtccatgtcaaaaaggagcatctaagaggggttactgccataactccatccttcttgctgtgctttgagaaacagaagccaaatcctacctcccttcaaagagctctagttgctatgggaaccaatcccaccccccacttgagtcccgagacttaggagggtatggagccaggaggaggctcccgggtgtctcaagagcagccacacttctctatcaaggatgcgttcacacagtgaacgctcatcttacgttcgtcatcctggaccgttagggagaagagaatgaccttggtgggactacaggtctgaaagagccaggaacagatcaataggcactcccctcttatagtgcaaactttgagtgcaaagttggattgatgaagctcactgttgagggtcaggcaggtcccctgacagtaagggaagctggaagtcttgggtgcaacaatacactcaccgcaggcagctctgtgaaggttcaccttgcaatcctgcagatgacagagcttctctgctggaaatatatcctggccatggtctatctccccatgattctggcatgggatccccagagtcagctgctccacagtagggataaagcatttctggacgtaaggcaggtgaaacagaggtggctgtgttggggacaaggtcatgaacagcaacactatgtctcacttgcctttgatactaaaacactggttcaggctggggtcagacgcattagtagctgtaatcttttcctctgccaagagggtgggcaccacctccatccaatatattagtaaacagtagatctccaataatgatcctcctttctgactggtaggatgaaaagataatggggaaagagcccaagaggaatctttcgcagttggtggtggttggggggcaggggttgatgggtcttgaactctagaacaagcttagtggcatggggatagtggacacccaaacccatagctatatcaaggaaacctccaagaagggaactgcctcaaaacagacaagccagtagctgtgtaggaactaggagcttttggatgtgagggtaaaaccatgttgccaggcagaaaagatctcatttatgcagaaaggcagcacccggctgggacagtcaaacatttctaccatgctaaaacatgcgccaaagacccagagccaagagcccaggaaaaagccaagagatgccactcctcccactgcctgctttcagatgaagtggacacttcaaatgggcgaattttatggtatgtgaaatatatctcaataaaactacagaagaaaaataaatgtcacacgtacaacataaagtaaaatcatacatgttttctaggccagtggcatagaggtatacaggctgaaaagagagaaactctgaaagttatttatttattgaaacagggtcttgctttgttgcccaggctggagtgcagtggcatgatatcagctcactgcaacctctgcttcccggcttcaagtgattttcctgcttcagcctccaaagaagctgggattacaggtgcaccccatacccagctaattttttttgtatttttggtagagacagtgtttcaccatgctgtccaggctggtctcgaactcctgacctcaagtgatcctcccggcttggtctcccaaagtgctgaaattacaggcgtgagccaccatgcccggcctgaaagtcttttattaagcaaaaaaagccactacatgagtagtttctcaaaaagaccaaaagccgtgtgaccaagtgacatggcttcctttctgtctggctaggtcttgtctctgacttaggtctcatttccccgaaatagcactggaagcaaaaaatagtgtgatggttaaagagccggctttaagtaactcgcccaaagtcacacaagttatagatctggatttgaacccaggcagtctggctccctgggttccaatccagatctataacctgtgtgactttaggcaagttacttaacctctctgtgctctgttataaaatgggatacacgattgggttgttgcgaagaataaataacataatctttgaaacgtgcttcaaaaagcatctcttgcttgttggaatttatttgaagttgactatgtttttttaaaaaagcctcccattaggacatgctttttttagaaggccccaatcatttcatcctcccatttgtcaatgatcatttctatgttgcaagccatctttaatcagacaccaggtagtagttgatctaatgctgacaagccaagtcctactccccttccctgacattccttttctgccattgtgagaactatagaacatggctcagaggttgttttcaaaggctgaggtcattgctatcattccttcatactctcacagattaactccaaactgcagaagcatcttggtttcccatcatcctgcagactgggcaaacagataggagcttaggaaggcctaatcagagaacagatgctcatttcatgctaagaatgtgctagcactgtacgtgaatagtttcatttcattttcacacaaaccccatcttgcagactattattatcctctttttcacatgaggaaattaatgaccagaaaagttaatatgtcaaggtcacacagccactgaaaaatggagccagaattccaacccagctgtcttcagaccctattaactgccatgttatattacctgcccctccctagaatgtaagagtttacagctaaggccctctttaacagtagcccaaagcaacagaggtcagaaattctgtcttatctatctatgtcctcggtgcctgggacaccgcctgccatgtgataggaacacagaatgtccaactgcttaactgtgctcggaacatgtcatgtagagttaagtgaatcctccagttgcagagtctattttctacttgtaagactatttatttatttacttattatttatttatttatcaagatggagtctcagctctgtcgcccaggctggagtgcagtggcacgatctcggctcactgccacctccacttcctgggttcaacggattctcctgcctcagcctcttgagtagctgggattacaggtgcccaccaccatgcctagctaatttttgtatttttagtggagacggggtttcaccatgttggccaggctggtcttgaactcctgacctcaagtgatctgcccacttcagcctcccaaagtgcagagattacaggcgtgagccaccgcgccaagccaactttctacttgtaagacaatttagaggggtttagagtcacagagatcttagttagaatttggtagctatgtgatcttgacaaatgtatttaactcatctgagtcttgtgtccctaacttggaaaatgtggtaaatatatactcatagcattattatctggatggaatgaaacaatgataaacatataataggtgctcaatgaatattagctgttactattgcctccctatcctttcttccaaataggtctttgtgataggtcaaccatgagttagttcccaactcaaaataagtgaagcagaaattggaactcagagtagagtagtaaaactagcattaaattggaaattgggaaacttgtctcctggcttttgttgccctttctctacccagcaactatgtaatcttggtcaaatcaccttacttgtctgggcttccaatttcatatcttaagttacaaaattgatctctgaagcctctaggattctctgaatccatatgtctgggactaagagattatgtcgaggaattattacccttggtttgattgttttttaaacaaattaacttggggtggttggaaaacacattgattatttactcatcttagagttacacgttgttcatttatttgaaactgaaacgtatttcctccaaacaccgtagaaacttaaaggccgcaaaagactcacacccaccacctagcggcgaaaaaaggaagtttcaggtgatacaagatg

SEQ ID NO: 1884159 - DNA, 4001 bp, Homo sapiens
gggactgtgaaaacaaacaaacaaacaaacaaacaaacaaaacttatcatggcaacaacaatccaatcctgtattctgaacttgggtttcctgtatcaggtatcctatatcctgaatcttaatgaatgttttctgtttatgttgtccttgctcacatttcaaagctaagcctaaccttggtcagtgtgtccatcgcctaatattttccctttatttcactgacaaagacaatttagtaagacttatgtcactaagcaaatttccatttgtagacactgaattgttttttttttttgtctttttttaatatactttaagttttagggtacatgtgcacattgtgcaggttagttacatatgtatacatgtgccatgctggtgtgctgcacccactaactcatcatctagcattaggtatatctcccattgctatccctcccccctccctccaccccacaacagtccccagagtgtgatattccccttcctgacactgaattgttatacagaaataacttatcaaggaagatatatgcagcttgcataaaatgtgatttttaaaaagtgtatgattttttgtttgtttgttttgttttgcagagacagggtcctgctatgttgcccaggctggtctcaacctcttggccttaagtaatccttcctggttgacttctcaaagttctgggattataggcgtcagccaccatgcctagtattgggtgtctttaatttcagagggttagaattattcaaatcataatgatcatacataccatggagatacccaaactttcacagttcctaacctcttatcttcacagcctctctggcaataccctgagatagatagaaactgtacctctttctgttgtataaaagtgggcaccaccagctctgggagttacattcctgcaactgagcagaatcgcccatccagctccattgagcagaatcgcccatccagctccattgagcagaatcgcccatccagctccattgagcagaattgcccatccagctccattgagcagaattgcccatccagctccattgagcagaaccgcccatccagctccatcctgccacctggacacagtgcaacctgagtgtgatatcgcaaactaacagctctgcactggggcagtagggtcagcagtgtgaattttatttaaactcacaagatgtaaatatcataccacgttcagaatggagctttttggatgcctattcttctgtctcatttcataaattcctgaagacagtgaaaggcaatgcagatgggcttaattattatcttcttctgcctgagcatgctgtgagaaaagattaacgggagggagagaaagaagagataaaatatccatgacacaaattagtatttagcatacattttgaaatcatgctgtttctgccagcttcatgcgtcttgcctcatgcttctcaacatacagcagaccacgactcctaatttctagcttgatcatattactatctatgtttcaagcacattttctcctaggtttctgatatctccaaatgtcttgcactatataattctgcagagaaagtatgaaagttgatcaggataaaacatagagaatcctgttttaaaggagggcaaacagacccttggtaccattctcgccattgttcttgaagcttgagaaattctaggttgtgtgctgagcagttacaggagctgtggtattaacgaactgccacattaaataaaaataggttcgtacattatgcacaatgagttgccatgtttagcgtctatttcaatactcatggaaataagttgaagcaccttgtttagtgctataatttaagaactactctatgtaatgcaaaccaaagatgaaatatgttcatttcagcagcagcaagcatatctgaatggaaccatcctctcgttagtaagtgacttccaggcagcagctaaggtgcagtgtgatgaggagcagtagcaaagcccatccctgcaccagcccccaccctgcacccccaattcctgccgctgaacttcttccttgaaattacccaaggggaacgttttcctctgtgccctgccgaaattgtgcccagtcctgtgcatctccctagtgggtccaggactcaggactctgaacgggctgacaagggcacctggcctcgggccttgaaggcaaccccaggagttcgagtttagaactcgggaagcaggaacagctaagggctactttggagggggcttgtgtgtctatgacccggcctgaagaaacaatgatcagtgaaaacgttcttggctcatgacaatccgtgcttccggctttgtcaaggatgttcaaatggagaagatgaatcattggaaaaattgtgaagaggaagaaatgagtgttccttttgcaccttctttattgcttctgtcctccaccaaatatcccccaaaaccctccactcagggctccttgcactaatgagagagaacacagtctgcggaaaacattgtgcagggaaaaccctcggcatccagtatgagggacagacttctaggatgtccagctccatgtgccaggccccagggcaccccagcaatgacataggacttccaccttcccaggtgcccggagctttggagatggtgttgtcaagagcagtgagacgcatagcacagtctccactgcccccattgtcccggaatgaaaacgacacccgcaacagtctgagcagcagggacaccctgatcttcccgggactcggcttgctttgcagcctgggccactgtcttctgtaccgcagtcactgcatagccagccccgcaggtgcccccactgtatttcctagagagagctgacttcagtcacttgccatatcaaggagaaaatggtgaacatagtggccgtctatttcatcaaaagagcaggcctacaggttcgtttattactcatccaacccaaagaagaatcctctcttcctggttatgatcgcaggccaacctctgcccaagtgcccctcaagtgagggacacacacagttgaatgggcccgcacctgctcatggcacagactcagctgctctgtctctgttgtgagtcccggcacatgggaaaagccagtggatgtttaagtcaatgaagatctagagagagagagatcaaacgattttgtctcctccactgacatgaaccataaagaagaaccttgaatgcatattttccattgcataaaaaggattggtaccgttaaaactataagaagctactttgaaaaaatggagaactctgaaacatgaataactggaaacaaagacgacagtaactatatcaagtctctgaatactgtgactcacacaggaccctagtgagactttatgcggtgactcaggagtttgtgctgggaaactagtctatgacatagagaaaattttttaataaaatgaatattatgagagaaaacctacgagccatgaaagaaaatagaaccagcacttgtcaactctccataggaagtccagatgagaaaggaataataaagagggagtgatcaaagacgtcacaaaagaacattctcctgaaataaaaatacactcagttttccatctcgaaagggatcactgagtctaggggagattcaaaaagtaaaaagatacacacgtgctagtaaagatcttaagttaaaaaatgaagaattcaataagtttccaaatagagaaaataaattgtctgccaggaaatgaccacattagcatcagacacactaactttgataacaacaacatcaaccccacagtcttgtgaaggttgaatcagtgtaaagattttagttcaatgacttgtaaacataaggtcctatatacattttgtgtttattattattgaacatagttattgctacggggagtaaactcatttttgtaccactatgagattgcagaattctactcttagaattttagaataggttaaagtgttcttcatagttttcacaggacaaaggacattttcaaacaagtgtggaata

SEQ ID NO: 1884160 - DNA, 4001 bp, Homo sapiens
gaaacctgatgtactcatccatcaggaccacgactctcagaacacgcatccaactagccgtctgcggttgggtagagaggccctggggcacacttttagccctgctagaaagttggcctcgtaactggccggcttattccaggaatgttttcatttttctttctaaggtcaacctgatcacactgccgaggctacaagcacacaaaggctgcaggcacataaacaaaagatgaaaaaacagactcccgggcagagaaaacagggtcagaggtgttgccgtgcctgtgaggcctttgctggccgcctgcgttccggtggcagccagtgaccgtcctgcaccttcctgccgactgcagagacctcaggccacccttggctctgacctgtgtttcccaggctgcctctgcacctgcctgctaaagccttcctcggtttcctttggtaaagtattgagtgatgaattttctcaccaggttcttaaggcaaggaagagtccccctggggtgcaggctgagagacaggtctctgtggaacaaggaggagggatggaggagttctgtgtgggagtgtggtgggctggttgttgatttattcatttgcagttggggcagctttgaaagggaggtgagagaagatgagggaaggggaggggaggggagaaggtggagggaagggaaaaggagaggaggagaggagtgacgaggagaggaggggagtggggaggaggggacagaaaggtctggagaaagagccagccagccaatgtggaggaattttaaaacacagatatctgtccttcactttaactgagttaatgagtgaattttcccaccagccatcttactgggatgtcaagtaagaaggaagcagaggctcagagaccgatggtcactgggatgatatcaaaattgacagaaatttgatgacagagaagtcccacttttgttctgttttgcttcatagctgttgtttttttgtcttgtctttgtttctgactcctggcctttgcctcctatcccctgcctgagcagccagatgcacacacactctaggtccacacagagtcccccggactcgctccaccctgtcaagcctctgcacgtggcaatttcttcttttttttttcctggttcgaccaccttggcctggtttttcatctttttgttttaactcccttcgtgtgtcacgcaccttccctttcaactgtgctgcacacactggattctgctgttgcttttctgagctaattcctacctgtccttcagttctcaacctgcacgtcagctcttcacggaaccagctcctccacctccctgaagaggtgcagaccttccagcctgtgctacctgaccatcagggattcttcatggaatgtatcacaggtgtcatcaacgagtcacttggagattgacttggatgagagctatttctccctgtagctatttttgcctaattacaaaaaaaggaaaagatggctccttccccagtatttctgagtgtctttctgaggaagggaagctgtgtgcctggccatgctgacgtggcccaccactgcctggcttgaccttctcctcctcccaacacctctgagatgttatcgtctcccatgatgcttccactcactgccgttctgtttgatcttaacctgaacgtgactcccatcagggctcctggtcacttacagcgattgactgaagctttactgaggatggtgtgcggcgcctatagtagaagataaattaatccagtttagtccataaatgctctatagtggttgatggttgtaatttatcatagaaattttgcatcatttaacagattgatagattcaaattttagtggctataaactgacattttaaaacaaaacatgacaagatggcaactatgcttttacatgactagcattttaacagagacccacttctcactcaaaaccagctgaagttagagttttgcctctgtccacagctagctcaggcggtggctctttctcctctgcattcaaagcactcattgaactcccaggaaaagactcatagtttagagtgctactgagagttttgtgtgtctgtcttgtctcagaaattgcattattcacccattgagagcagtgagggtgtttgctagttctttaatttgacatagagtttgacatggaatggtaatcaatacacattgactgatgtgttggtgaaaactggggggccctgatgtccccagtagagtaagaaacacaaacccatgcttttaggtcaacaccacacaacgtcataaatggacaatttataaatcacttgaacttgctatttttaacaagtatacaaatctttgtgtagcactcggaaagattgcattgaagccttaccaatgaaaagctatgattttaaacataaaacaaaactaggtacctgtgcatgcggcttgacagttgcacaacctgccagaccctgctgcactttgaaatgttgccatactcagcacttcagctccaactgaaaaacactcagagaagcggctcgtgtttaacaaaagccttctgtgtcatcccaaactgagtgtttagcacctggccttcctcctgcaggaggcctcacatcatggcagaaggtgaaggagaagcaaaggcacgtcctatatggctgcaggcaagagagcgtgtcctgccctttataaagccatcggatcttgtgagacttaatcaccatcacaagaacagcatgggcaaggcctgcctccatcattcaattacctcccacttggtccctcccatgacatgtgggaattatgggagctacaattcaagatgagatttgggtgaggacacagccaaaccataccatatatgtgtgtgtatatttgtgtgtgtgtatatatacatacacacacacacacacaatcaataggacatatatattcgttctgtttctctggagaatcctgactaacatagttgtcaatgcaaaaacataacgactttctttctttcttgaaataagtaagtgatctctttcaggcagctgttgatggactgtccgatatgtttaattattttcttatttcagccacttctctacattagatatttttgatagtcaatatacagaattgtactttgaatcattgagcacagagcattaaatcttatacatggaagattctcattagatatttatttaggatggctttctgattgctgtaacttacatttagttgacaagcacgaaagcattttacaagagttaggaagcagctgctccaacctcatgaacgaaggaaaggagagggccagaaggccattctacctcacgccctgtctcccaataatctccaatatgagctgttagacaacccctttaaggagaagtttacatcctgagtatttccaaagatcggtagtgtgtggcttacactctcatgcaaaattcagatcttagaaaagaggagctgagtgtagagccacccagagcctgagaaaatgcgtttaaaggctctcaaccttgcaggaggtgctgcaaatcgaacccagaaaactgaccaccccagtgtaatggcactgggcctctgtcacttagcaggacttgtttttctcctgtctcaggtctggttccccagaagcaaacccgaactcactagaattaagaccagaatttgccttcaagcaggtgaaactgacagggaagaggaagaagaggaaggggcccacccacagcctcatctcaggcaaggtccctggtgctgcagtctggccccagaggagaatcctgagtgttcactctttccaggggccggggagtcaggctttcagacgctgtcacacaagtgagtccaaggcgcttcttctctctgaccctccaggcaaagcagctctgggagcccaaggggaagcccccacagaggcagctcaggagttaatgctaagaagcaaaggcagcagaggctgtcattgagatttattctttatcattccattacttttttaacgtttctttttggccaggc

SEQ ID NO: 1884161 - DNA, 4001 bp, Homo sapiens
ctcttgacttggtccactttgactccaccaccagcacccagtccaaatgaccaccatgacctcttccttagacatctgcagttgctacctgatagctcctcccaaccttctcttttataaaaacgactttataaagctatttattcagtcaatgaatacatgtacatagtataaaacttagaaagtacaaaggggtatgttataaacagggagtctcccatttatccctgtctcccaggttgcctgccaagaagactgctgttactattgtctgaagtttccttccagagatattttaccaaacaacacacttttgctactctccaaccactttccaagggatattctaaaaatgtaaacctagccaggtgtggtggctcacacctgtaatcccagcactttgggaggctgaggtgggaggatcactggagcccaggagtccaagaccagcctggacaatatagcaagacctcatctctatgtggtggcatgcacctgtagtcctagctacttgggaggcttaggcaagagaattgtttgagcccaggaggtcgaggctgcagtgaaccactgcactccagcctgggcaacagagtgagaccatgtctgaaaaaaagtcaagtggatcacaccactgtatcggctcatcagtgacctgaatatagagtcccacatgctcctagccctgtgtgatgggactctgcccattcctctggtctcactcaccctactccagccacactggtcttctctgcctgtcaaatgccctcagctgccagcctcttgactcctttgccacgttaatgattcctcctcttgcctgttacccagggtttaaatccatacaggcctctttgtgtctcctcctgctccctcacctggtacaagccactaccatctgtcccccgtctccataagcctgctcaggccccttcctctgacccaaatgatgcccccagcctcctcactgcttttcctgcctccagactcaccctattttcatccatccagtgcctggggccagataaatattcctaaagtgatgtttccccaagatgtttatttatttttttaattttattttttttgagacggagtcttgctctgccgctaggttggagtgcagtgcatgatctcagctcactgcaacctccgcctcccgggttcaagagattctcctgcctcagcctcccgagtagctgggactactactctcaacaccatggtgatgtgactgggactactactcgcatggatgtgcatcaccatgccgggctaatttttgtatttttagtagacacagggtttcaccatgttggccaggctggtctcgatctcttgacctcatgatccacccgcctcggcctcccaaggtgctgggattacaggcctgagccaccgtgcccagcggatgtttacattttttaaaggggggtagggaggaattctctggtcaaataactttggaaaccacaggtgaaacctatctttactgggcttacttcctagagcctgaaggatgttgctgtgcattgtgggactgggcatgtagtgtttcccaaactcatttgacatttaaacccctcctttgaaaattaatgttcctcagaacatgctttgggaactgttctataaagccttgctatccaaagtgtggtctggggaccagcagcatcaacttcacttgggagcttgttagaattgcagactcttgggcccttccccagacctactaagtttagcatctgcatttataatatacctgggtgatacattaaagttagagcctctaaagtatcaaattctgagggtgttcactgtcacagaataaaacccaaactcccagctgggcatctgtggccttccatgacctggttccatctgcctccccagccccattttctacctgtgctgcaccaagaggcagcctttgatggaagctcttggagatgcctttttaaacggagctgtcccaacaccacccctggcccaccttggcccagtggatcttgggaatttttttttaattattttttattagagatagagtctcattatattgtccaggctggcctcgaactcctgggctcaagtgatcctcctgccttggcctcccaaagtgttgagattacaagtgtgacccaccatgcccagcccagggccgtttattttgtaaaagctctccagatggagccattacctagccagacatgggacccctggagacaccctattctttagctggaaagggctgatgcttcattaatgcctgtccatggaatactgggtatttgacctattccttgaccaaagactcatttttctcatctgcaaaatgcaggataatactatttcatagggttattttagaattaactgagataatagctaaatcatcacttgctgtagatagttgctgacttaacaatggttcaatttattatgatggttttattggtaagtaacccatcgtaagtaagcatctgtagaggttacttactgttttttgttggtttgtttttttgagacagggttttgctctgtcatccaggctggaatgtgtggcttaattatagctcacgcagcctcaacctcccaggcccaagtgatactcccactcagcttcccaagtagctgggactacaggtgcacgccagcatacttggctaatttttgtattttttttgtagacagatctcgctgtgttgccaaggctgatcttgaactcctggactcaagttgtcctcctaccctcagcctcccaaagtgttgggattacagatgtgagccaccgcgttcagcctacttattgccattttgattatttgggatcccagaggagatgaagatgccactgcgggacaaactagtaggccaccagatggttgaattagaagtactgtgcccagatgccgggggcaatggcttacatctgtaatcccagcactttgggaggctaaggtagggggactgcttgaggccaggagttcaagaccagcctgggcaacatagcaagaccctgtttctacaaaaaataaaacacttagctgggcgtggcatgtgcccgtggtcctagctactcaggaggctgaagtggaaggatcccctgagcccaggagtttaaggccacagggagctatgatcatgtcactgtactccaacctggatgacagagtgagatccgacctcaaaaaaagaaaaaaaaaaaaatgctgtgcccatggcttgccactctggcaatacttacaatgtttactgtggttgctgagattgactggcaggtctgtacctacccatctgtgtccccaacaatcctggcatccctgattgaggaagaaggggaggaaaggagctggggacagggcagaccacatacctggttgtttttccctttttgatgacatttgctttgcatctctggggaggcttcccagtggatctagtggaggcaaagggaataggctgatgcactgaccccaatacctattactcataggaccaggcaataggaccccacagagttggggaaattggggtggggatcaatttcaggaggaacactgaatgcaaggaacacctgggctgggaagggcagtgctgtctgaccagggggctatggaaggctggcagggttttaaggaagttgaggtcccagggagctggataagcatagagaccctctgggtggtccaggttccagggcctgacctctttgtgagccccatctcctatgtcgttggcactgagagagaacagggcacctcgggctcccaccagcagccttgctgaggcctcctccagcagcagtgttgagtagttctgggcttggcccttgaagtgccgggtcccagagagctctggggagagcaggaacagtgagccctagttctggggtgcctccccacccccagccctggcttctgctgccttttgaggttgagggtctaaccttcatagggtatggtcatccgaggggtggcatctagttctctagacggtct

SEQ ID NO: 1884162 - DNA, 4001 bp, Homo sapiens
gcacattctggaaccctccctgcctagtgtccttcctcctttcatagctactcctatgagtctcctaggtgggtcccttccattgatattcctcaaggttccaccctaggctcttcttgaggtgttcttacttacatttcacactttggctatccattgacttaattattcccaaatgtttatctccagccctctctcctgagcaccagtcctggatatctgtggcaagggcatgtgtccctcagcatttattctccatttctccctctgagtaacagaaccccctgaatattagccaggcacatatggccactcacaatgaggacctaatattacctagccacccttgaagctggctgtggcttatggccgagccagtcaatgaatgttagtggcagtcatgtgtgcaccttccaagccttgcatttttttctttctttctttttcttttcttttctttctttctttctttttctttctttttgaaatatcattactttagtgttccaggcattttaaatattcatacaatttccttatttcagcagtcatttcctctccagtatagattttgtgtccaggatcagagccatgtacatcactgaattttctctacagcactcgcatgctacataggacccactccggcacccatgtctttgctagtagagcctctcaccacacccgcaagagggctggaccttccgttgcttgacatggcctccactgcgaatgaaaacacactttgtagcttcgatcccggtacatttccagcactcccaggtgttccatgtatgtggcaatcatcctgcagagctagtgatacatcaggtcagctggtacctatgccagcacctgctccactgtatcatacagatgctgaggcacttaagtgttctgggtaaaatggagttcataattgccataggagttgagtgtggaggaaggggactttctctcaataattaatacccttaatacaaatttagcagatttataatttcaggtctgtttacatttgttgtcaaagcttcataaactatttacataaatgaaagcatgttcgagtttctaaatgttgctatgacaagcaaacagagaaactgcttagacaacacttgcttgcgccgtaaatacatatggcaacacctggtcattcttaaagaaatgcttgtgtttccaaggccgggcgcagtggctcacgcctgtaatcccagcactttgggaggctgaggcgggcggctcatgaggtcaggagattgagaccatcctggctaacacggtgaaaccccgtctctactaaaaatacaaaaaattagctgggcgtggtggcgggtgcctgtagtcccagctactcgggaggctgaggcaggagaatggcgtgaacccgggaggcagaggttgcagtgagccgagatcgcaccactgcactccagcttgggtgacagagtgagactgtgtctcaaaaaaaaaaaaaaaaaaaaaaaggaaagaaatgcttgtgtttccaaaaagaattttttttcaagtcataagccttatgcaattcttccaaggtaataatgtgtttgtccttccttctcaagcagtggttcaaggcatctcaaggcacattgctctctgaggttctgatttaactggccgaggggagaggggaagagtgggcactaacattttttaaaagcttcacaagtcattccagcatgtagtcagtgttgagaaccttggtactaaaggctcttgcatcttcctactgtcacttgtcctcaccaaaagcccttgaggtagtccctgggtcaggcaatgatctctttcatgcaagccctgcatttcaacagaaggtttgtgcccttcccctcatccttttccctccccattggctcccaaaatacaccggtggtttagggttcctctgctgttcctagggtgttgccctcatctctactatttaacccattatagaccagagatgagagaaacaccctaggaacagccgagcagcatgacagcgggagactggacgctgaccccgaggagccaccacaccaaccacagctgctcgtgcccagacaactgcatgtgacagaaggaaacacatgttggtgatttgggtttctgtgaccacaaatgaacctaagtcctaactgatatatcagctgccaactagacatctccgtttgttcatctcaagcactctcagttcagtttgtcccccagctcatcttcccccattgcctcccctaaattccctgcccccaagccctcagtatctctctgaatagcatcagagtgtccctaagttgcccaagtcacacgcaactctggatataaccctagacccatccctcttcctcagcacgacacccaatatttagtcagttacaagtctcatgatgctacctcctaaacacctcccaaatagtttcacttccctccatccctactcccaccctagtccatgacacagtcatctctcacctggaccaccacagcctcctaattgatgttcatgccttgtttccttccaatataccttccacagtacgaaagtattggagatactttcattggaaataattggctgaaaggaatcttcttaaatgcagatataattgtgtcacttccctgcttaaaaccctttagtagctccccactgcctttaggataaagaatttgtccattagcctagcttatatggagtgtgagtatccttcccagtatgcctaggagaaacccagtttaggctaaagtgccctgcattcatcagcaacaccctctttcactctcaaaagcatcctgatttggatgataaaccacatggtcacctacatatagggctgctcataagctcacctctgactgtccctccaagcttgcctctctcatggcaaatctcttgttcccgttatcatgaccttttcattgaaacctgctgtgctttttctacttcatggcctttgcacatgccattcctctgcctaggatgttctttcttctcgtcacaaggctgattcctgttcatcctttaggtattgctatgggttgaactgtgcctcccccaaattcccgtgttaatatcctaacccccagcacctcagaatgtgaccttatttggaaatatgatctttacagagggtaatcaagttaaaatgaagtcattaggatgggccctaatccaataagtctggtgttcttatataaagggaacatttggagacagacacacacagggagaatgccatgtgaaaataaaagcagagatctgggtgatgtgtctgtaagccaaggactgccagcaaacaagtgagcagaagttggtgagaggcgcgggggcagattctctctcacagccctcagtaggaaccaaccctgctgagaccttgatctcagaattctagtctccagaactgggaggcaatatacgcatgctgtttaagccacccagtctgtggtactttgctatggcaggcctagctaattaatagaagtatctgtttaaacattacctctccttccaggaagccttccctgaccattcccctccaccaacagactatgtgagatgcccctactacaggttcccattgtgccttagatcaatgaaagctataaaagagcttagaaaccaaatgagtttaaagcccactcagcaactcaccaactatataagtttaggcaagtagctataagaacaaaaaaaaaatgaaacttggaaaaaagaaaaattgtgttggcttgatttctcatatcatgctgggaagcattttccagcaagcctcctcgaacaaaaaccagactttgtaccttgctttgccccatatctgacactcctggggaatgtaactttgttgtcataatacatactaacagcctcgatgtgataaaggcaggcatgcttttacaggttaaactctagaacatgttcaatgctatgattgtatgccctggtagaacagttaagtttaaggtcctaaggttttagagacctctggaaagataat

SEQ ID NO: 1884163 - DNA, 4001 bp, Homo sapiens
tggccctgtatacgtggaattaattttctggcaaggctgatggtgaaggtatccagctttcatgggcaccaattggggtgatctgatatctagtactcagaatccataaatacatggtataatatacttcaagtatggccagcagcagagacagtaggggccttgctggcaccattccaaacaaacacggaaaaagaaaactaaaaaaactccacatgttaacttagtgccctggctttttaacttcttgttgtttctctttatgtcttattgtactgtctatgtcttgaaaagttgttgtagctgttatctttgattggttcatcgtttattctttctactttagtcaagataagtttatacatcacaactacaaagttatactattctgtgtttttctgtgtgcttactatggtaataatgagttttatatcttcagatgatatcttgttgctcaataacatcattttctttcagattgaagaactctctctagcctttcttataggataggtatggtattgaaatccctcaggttttatttgtctgagaatgtctttatttctccttcaggcttaaaggatattttctcaagatatactaatctaagataagagttttattctttcagcactttaaatatctcatgccactctctcctgacctgtaaggtttgcactgaaaagtctgctgccagacctattggagctccactgtgtgttgtttcttttctcttgctgcttttagaatctttctttatccttggccactgggagtttgattattaaatgccttggggtagtcttctttaggttaaatctgcctggtgttctataacttcttctacttgaatgttgatatctttctctaggtttgggaaattctctgatactatccctttgaataaactttctatccctatctctttctctacctcctctttaaagccaataactcttagatttgtccttttcaggctactttctaaatcttgtaggcatgcttcattcttttttattctttttcccttttgtctcctctgactgtgtattttcaaatagcctgtctctaggctcactaattctttcttctgcttgatcaattctgctattaagagactctgataaattcttcagcatgtcaactacagttttcaattctagaatttctgattgattctatttaattatttcaatctctttgttaaatttacctgataaaatattgaattccttctctgtgttatcttaagtttctttgagtttcgtcaaaacagctattttgaattctctgtctgaaacgtcatatatatctatctctctgggattgatccctggtacctcatttagttcatttggtgaagtaatgttttcctgaatgatgttggcacttgtagaagttctttggcatctgggcattaaagagttatgtatttattgtggtcttcacagtctgggcttatttgtgcctgtctttcttgggaaggttttctaggtattcaaagggacttgggccccaagcccaataatacggtgggttttgtacactcatagaggtactgctgtggtggttgtgggtaagatccagaagaatgctctggattaccaggcagaaacccttgttcttttcccttactttccccaaaacacatggagtctctctctctctgtgccgaaccacctggaactggggggtgtagtgatgcaatcacccctgtggccaccaccactgggactgtgctgggtcagacccaaagccagcacagcaatgggccttgcccaaggcccttcccgtcagggtagtgagttcttgtaggctccaggtgtgtccagagatgctgtctgggagccagaagttggagtcaaaaaccttagaaacttatgtgatgttctattctacggaagctaagttgagggaaaggaagtaaagtggagggaaaaataggaaggactttgcatggtactgaaccacaatacaaagtccctcctattcttccctcccctttccacaagatgtaagacaaagtaccctttaactttgatctcctctccttaaacggaaagaaacagtcacttccattgctacaagctgcaatcctgggtttgggggagggatgacttctctttactctcccatagctgtgccagctggtgtctccctaggtcatgttccactcctagttcactggcttgaagcccagcctagcactaggagttgcctaggaattgcagtctttgtgtcctagactgtctttcaagtttacctaggaccccagagcactttagccctaagtggtgaggtttgcacagaaactcaagtttggaccactgggatgggtgacccccctctggctagggctggtccagatgctcccattgtgcacaggcaatggctgagctcaatacagctttattctccactgtaacagggcagcactgagttcaatgtaaagtcgcccagcagctgtgctctccctccccaaagtgctcaagttctctctctgcactgcatggccactgctaggggatggaggtgaggtggtgtcagtgattctaaagtatctcttctgccctcctcaatgcctctgtcgttaaatccaagtactgtgaatatgacgttaaatccaagtactgtgattgcacacttgattgttggtttttgtgatggggcttttctgtgtacagatagttgttaagatttggtgttcaagccagagggacaaacagtgaaggcttctatcccaaccatcttgctccacctccctagatcttatttaaaccttttattttaattggcttttttttttttgacactgctctggcagggtataagtgagggcactgctttgtttctgccaggtggatgtcaaagtccaggttgcccattcagccttcattcacaccaaagggaggctcctcattattgctgagcaggtgggtaagttccacatctccagagtctcaactaatactgcagtgaagtgggagggtgttccctcaatatcaaccaatggggatgaagtgcaggctctctacttggacaccatcctggcaaggatgttgcaggagcacattagagtttcatgagggtaagtccaggctccctactcagcctttgtttgtgtgagaaataggacacaaattttttatgacatttggctagggtggagtggttattgtgtaaaacctttctgtcttgctagattggtcctttattgttctccttggctagagaaaactggcttttgttggggtcttttgtgtttgtattcattgagatttccaggtttccagcttcttcagcgccaagtttgggatattaaagacaagaagaaaacccagggaactcaccatcatgttgttccttgggttcttggctgacttcttttcaacctctgagtcttcttacatgttttttatatataatatttagagtttttagttacccttaataggaggaataggggaaagtatatttactctgtctttttggcagtagaagtaggtgtcattgccttttaaaatactgaatatacattctttattatctatatccccctggtagaaagtgaacctcaaaagggcatgctttttgtatggccatagtaacttattgaatgaatttataaagccacaaatgcgtgctattggaaaatacatcatttttaagttttattttttaaattggtgctgaaccagtgggaggaggtctgaaggtcaataggaatgaaggaaaggtctacataagaattacaagtaggagacaaaattaatattaaatataaccagatggtagtgaaacagaatttacagagctcaactgagggaaggtaatggtacaatacagctaggattacccactcttggaaacagatctaatttagtctccttcatgataagcaagcactaaataaagcatgagaaaaaggaggcatgcttcatattagctttttgggtagtagaaaaagtttggtccccttaaactgtcaccaacctgtctgc

SEQ ID NO: 1884164 - DNA, 4001 bp, Homo sapiens
gttggtaagctttctgaaaagaaaaaagtaaatagtacattttgtcagctttgcaggccatcccatctctgctaccacaaatccacctgtagttgcagtgcactgctgtagacaatatctacatgaacgagtgttgctgtgttctaataaaactttctttaaaggcactgaaatttgaatttcatataattttttttttttttttgagacagagtttcactcttgttgcccaggctagagtgtagtagcgtgatctctgctcactgcaacctctgcctcccaggttcaagtgattctctggcctcagcctcccaagtactgggactacaagtgtgcaccaccactcccggataatttttgtattctagtagggacagggccaggctggtctcgaactcctgacctcaggtgatctgcccgccttggcctcccaaagtgctggaattagaggcatgagccaccatgcctggccctgaatttcacgtaatttctacatgtcacgaaatattgttgttttgattctttttttgaaccacataaaaacgtgaaaactgttcttaattcccaggccacaaaaccaggtggcacctgggccttggcccttggccatagcttggtgactgtcctctaagatagagccgctacagcttcccgccttcccacaggttttgcccacccttcatgtcacactatccttcaggtctcacttggagattgtcagcagagctcttctgcaagccctgtactaggttgaatccctttgctccattcaggatgaatatcccttatccaaaatgcttgggaccagaagtgtttcagatttcagatttttttttggattttggaatctttgcattatactagttgagcatccctaactggaaaacctggaatctgaaatctaaaatgctacaatgagcatttcctgtgagcatgacctttgagcatcatgtgggtgctcaaaaagtttcagatttgggagcattcggattttggattttcacattagtgatgatcaactgtgcaaccatggcaccagcccactgtcaccctccttaacagtaatttctctttcccttagtgtctaacatctctctccttgctagacagtaaatcccttgaggacagggcctgcttgggtcacatttatttctgaaatcctagtgccctgccaggccaggcagtgctggatactcagtaaaggttttttgacttgcacatgacattctcatgacatctcatttttccttccttccttccttccttctttcttttcttttcttttttctttctctttctttctttctttctttctttctttctttctttcttttctttctttctttctttctttctttctttctttctttctttctttctttatttctttctgtctgtctgtctgtctctctttctttcttctttttctttctttcttttttttttttttgagacggagtttcgctcttgttgcccaggctggagtacaatggcgcgatctcagctcactgcaacctctgcctcccagattcaagtgattctcctgccttagcctcccgagtagttgggattacaggcgtgccccaccaagcccaggtaattttgtatttttagtagaggtggggtttcaccatgttggtcaggctggtctcaaactcctgacctcaagtgatctgcccacctcggcctcccaaagtgctgggattacaggcgtgagccaccgagcccggccccatgacatctcattttctattattattgttcactgcatgctctgtttggaagctcagcacttcctgattctttgggggtatttgaatttagggtgcagttagaactttcagagtagataacaaacctcaactccttcgtttggcttgagctgttccccacccctggctggaagactccaggagcaggtgaaggttgtgcccacaggcacgactggtttggcaattcagtaaaaatgctcaaaccggctgtgcctgtggacgcagcccagcgtgaactcaaccgtttggaaaacagaggaaaacagagacgcttactccgcagggagagctccacgaccaggactcccccggtctggtctcgcaggaggcgcttccgtttatcgcaggtctgaagacccagagaggcagacaggagagaagcggggaaggtgggatgatgcgtgagcaaaggggagaaaagagaaagaaaagatattttaaaaaggtcacaaatggggtggagtcacaattccccagtcaacagagatgagttacctttttaaaaaataacccagaagacacactgttcatcccttctccaacttgaatacaaagagaaagctttactttgttaactcttcaagccagagggaatccttctggaagaggtcattgagtgtggaagggattgatcccatttcctttgataaggcttctacttaccactctcaccacaataattagagaagtggacacttgcaattgtattctggttcattttcttttctttctttttaaaaatatggcattgatacttatcctttgatcaactgtacagtgtctctcccctcctctccctggctctgcactctctggtttctttcccttttgctgtttgtgctcataaagaaccattttctggccaaatgaaacaacagcaatagagattatgaccttatttttgttggttactataggctatgtggatagcagcctctttggaaacaccgaggtctccagttgaaagagaccagaaaggagaacagtttgagatttggcatgtctaagtgtctaagtggtggttctcaggcttgagtgagcaccggcatgactgctggcttgttaaagcacagcctgcccaggccttcctctcacgtggtcaaatcagccatgatccagtgtcgggaatttctgcagcatctctctgaagtcacagaggtgaaccctcgggctgttcagtcaagactaaaaacacccaccttttgagttatttccacggcctgtccctgccacctagaccttgaatttcccttgcccttttcacttcttccaagtatttccaagtctgttatcactttcatttacctacactgccctctgatgagggaagggccatcattacttaacacactttgcttaaggatgagaaagcaggtcccagcaggttaggcgacacatgccagaccatgtgggttgttggaggcagggcagatagggccctgagcatctgccctcacgagcatctgcccttatactcagtgccatttcctccagatgtcctcagcacacagctgccctggcctggttatgatctccccactcaaactccagctcctccaatactggcaccctttaggtaacattgtccttctggagagaggcagctcaccactgggcaggagagtttctcactgtcgcagatgaacgtctcacagtgtaaccacaccttggagagtttggggatgttctggaaccggaaagcattgaattggaaggttgccctgtgatctctcccattctcatgcacgaggacggtttcatccgtggggcagctgaggcagatggggaaagaagagtgaactgtcatctccttgaactccagcaagagctgctgagcgatttacacacaaggctcccgaggtggttatatgacctctaaccttcccaggcattttgattagcagcacctcacttgatcttcacaactgtgaggtcaagttgatgagctaggagatgggtattactgtcctcattctatagacaaggtacgatgggaggggagtgacttataagagtcacacttttagtaagttacacctgtgtcccaaagaaagaaaatccctaggagataaggccctccgaggactggaatatgtccagcccttgagggacatacaaagtaaggacaatggcaccaggtgcagcattgcccctgctgccacagctgcctaagctcaagtcacacccaacacatttctgtgtgtgaactgtgaggttttgcattgaaaa

SEQ ID NO: 1884165 - DNA, 4001 bp, Homo sapiens
gggcaatgctgcacctggtgccattgtccttactttgtatgtccctcaagggctggacatattccagtcctcggagggccttatctcctagggattttctttctttgggacacaggtgtaacttactaaaagtgtgactcttataagtcactcccctcccatcgtaccttgtctatagaatgaggacagtaatacccatctcctagctcatcaacttgacctcacagttgtgaagatcaagtgaggtgctgctaatcaaaatgcctgggaaggttagaggtcatataaccacctcgggagccttgtgtgtaaatcgctcagcagctcttgctggagttcaaggagatgacagttcactcttctttccccatctgcctcagctgccccacggatgaaaccgtcctcgtgcatgagaatgggagagatcacagggcaaccttccaattcaatgctttccggttccagaacatccccaaactctccaaggtgtggttacactgtgagacgttcatctgcgacagtgagaaactctcctgcccagtggtgagctgcctctctccagaaggacaatgttacctaaagggtgccagtattggaggagctggagtttgagtggggagatcataaccaggccagggcagctgtgtgctgaggacatctggaggaaatggcactgagtataagggcagatgctcgtgagggcagatgctcagggccctatctgccctgcctccaacaacccacatggtctggcatgtgtcgcctaacctgctgggacctgctttctcatccttaagcaaagtgtgttaagtaatgatggcccttccctcatcagagggcagtgtaggtaaatgaaagtgataacagacttggaaatacttggaagaagtgaaaagggcaagggaaattcaaggtctaggtggcagggacaggccgtggaaataactcaaaaggtgggtgtttttagtcttgactgaacagcccgagggttcacctctgtgacttcagagagatgctgcagaaattcccgacactggatcatggctgatttgaccacgtgagaggaaggcctgggcaggctgtgctttaacaagccagcagtcatgccggtgctcactcaagcctgagaaccaccacttagacacttagacatgccaaatctcaaactgttctcctttctggtctctttcaactggagacctcggtgtttccaaagaggctgctatccacatagcctatagtaaccaacaaaaataaggtcataatctctattgctgttgtttcatttggccagaaaatggttctttatgagcacaaacagcaaaagggaaagaaaccagagagtgcagagccagggagaggaggggagagacactgtacagttgatcaaaggataagtatcaatgccatatttttaaaaagaaagaaaagaaaatgaaccagaatacaattgcaagtgtccacttctctaattattgtggtgagagtggtaagtagaagccttatcaaaggaaatgggatcaatcccttccacactcaatgacctcttccagaaggattccctctggcttgaagagttaacaaagtaaagctttctctttgtattcaagttggagaagggatgaacagtgtgtcttctgggttattttttaaaaaggtaactcatctctgttgactggggaattgtgactccaccccatttgtgacctttttaaaatatcttttctttctcttttctcccctttgctcacgcatcatcccaccttccccgcttctctcctgtctgcctctctgggtcttcagacctgcgataaacggaagcgcctcctgcgagaccagaccgggggagtcctggtcgtggagctctccctgcggagtaagcgtctctgttttcctctgttttccaaacggttgagttcacgctgggctgcgtccacaggcacagccggtttgagcatttttactgaattgccaaaccagtcgtgcctgtgggcacaaccttcacctgctcctggagtcttccagccaggggtggggaacagctcaagccaaacgaaggagttgaggtttgttatctactctgaaagttctaactgcaccctaaattcaaatacccccaaagaatcaggaagtgctgagcttccaaacagagcatgcagtgaacaataataatagaaaatgagatgtcatggggccgggctcggtggctcacgcctgtaatcccagcactttgggaggccgaggtgggcagatcacttgaggtcaggagtttgagaccagcctgaccaacatggtgaaaccccacctctactaaaaatacaaaattacctgggcttggtggggcacgcctgtaatcccaactactcgggaggctaaggcaggagaatcacttgaatctgggaggcagaggttgcagtgagctgagatcgcgccattgtactccagcctgggcaacaagagcgaaactccgtctcaaaaaaaaaaaaaagaaagaaagaaaaagaagaaagaaagagagacagacagacagacagaaagaaataaagaaagaaagaaagaaagaaagaaagaaagaaagaaagaaagaaagaaaagaaagaaagaaagaaagaaagaaagaaagaaagaaagagaaagaaaaaagaaaagaaaagaaagaaggaaggaaggaaggaaggaaaaatgagatgtcatgagaatgtcatgtgcaagtcaaaaaacctttactgagtatccagcactgcctggcctggcagggcactaggatttcagaaataaatgtgacccaagcaggccctgtcctcaagggatttactgtctagcaaggagagagatgttagacactaagggaaagagaaattactgttaaggagggtgacagtgggctggtgccatggttgcacagttgatcatcactaatgtgaaaatccaaaatccgaatgctcccaaatctgaaactttttgagcacccacatgatgctcaaaggtcatgctcacaggaaatgctcattgtagcattttagatttcagattccaggttttccagttagggatgctcaactagtataatgcaaagattccaaaatccaaaaaaaaatctgaaatctgaaacacttctggtcccaagcattttggataagggatattcatcctgaatggagcaaagggattcaacctagtacagggcttgcagaagagctctgctgacaatctccaagtgagacctgaaggatagtgtgacatgaagggtgggcaaaacctgtgggaaggcgggaagctgtagcggctctatcttagaggacagtcaccaagctatggccaagggccaaggcccaggtgccacctggttttgtggcctgggaattaagaacagttttcacgtttttatgtggttcaaaaaaagaatcaaaacaacaatatttcgtgacatgtagaaattacgtgaaattcagggccaggcatggtggctcatgcctctaattccagcactttgggaggccaaggcgggcagatcacctgaggtcaggagttcgagaccagcctggccctgtccctactagaatacaaaaattatccgggagtggtggtgcacacttgtagtcccagtacttgggaggctgaggccagagaatcacttgaacctgggaggcagaggttgcagtgagcagagatcacgctactacactctagcctgggcaacaagagtgaaactctgtctcaaaaaaaaaaaaaaaattatatgaaattcaaatttcagtgcctttaaagaaagttttattagaacacagcaacactcgttcatgtagatattgtctacagcagtgcactgcaactacaggtggatttgtggtagcagagatgggatggcctgcaaagctgacaaaatgtactatttacttttttcttttcagaaagcttaccaacccctgctttggagagaaagcgttgtgagatgaaactttgtaaacccccagtataaactgtctgaaaggcaatggagc

SEQ ID NO: 1884166 - DNA, 4001 bp, Homo sapiens
actaccaaacatggattgagaaaagatgcagtcccagagactgaagaagaaggaagttaggcacccaatgtggggtgcctgaatgctaaggctgatttccaaactggaaaggtacctggggaaggggattggtccagtaaggatatgggttatttccataccagacctctccctaagggagccccgtggccccaaagacctaataaaaacaacaacaaaatcgaaggtacagtgctagtgattggatgtggctcccccaagcagacctgatgagggggtcatctatttcccccttgcactgcagaacacagctgcaaatgttaacatagacaaaggaaccacaaggctgagtagaagcctatctactgcccattgctctcaaggaccatctactagattgtagcccaaactacaacaccaaaatcactttactaatcctgcccttgcaaaaccaagagtaagaattctgcaacgaagacaccatacagagccttagttctctaaaaactttcagaaacaaagccaacaaagtacactcaatttacaccacaattaaaagaataccatccctcccagatgagaaagaatcagcataagaactctggcaattcaaaaagccacactgcccccttacctccaaatgagcccactagctccccagaaatgtttcctaaccagtctgaattatctgaaatgacagacatagaattcaaaatatggatggcaaagaagctcattgagatcaagaagaaagttgaaactcaatccaaggaagccaagcaatccagtaaaatgattcaagggctgaaaggtgaaattctcacttaaagagagacaaaaacttaatttcttgagctgaaaaattcactacaaaaattacataatataattggaagtattaacagcagaatagaccaagctgaggaaagaatctgagagctcaaagagcaattctttcaattaacacagtcagacaaaaatacagaaaagagaattgagaaagatgaagagcagagagtgggccgagacctccaattagaagtagctatggtgcatggcactcataaagaggaagaaaagcagtgagtaaatacagcaccttcaactgaaatatccaggttttcgcactgggactgatcagggaaataaccaatccacagaaaacagagaaaagtagggcaggatgatagcccacctggaagtgacgcaaagccaagggaacccccaccccagccaaggaagtggtaagtgaatgtgccaccctgggaaaccacatttctcccatggatctttgcaaccctcagatcaggagatcccctcataaacccactccaccaggaccttgggtcagatacacagagctgtgtggagtctcagcagggcagccactcaggtatgcacagagacccaggagatttacataccccagccacaggatccctggcaaaggtgactacaactcagtcaaggcgggaggtccatacatacccctaggaagggggccgaatccagggagctgaacagcgtccatctgtgggccccatttccaaggcacctcacaaaataagacccactggcttggaacttcagccagccaccagcaacagggtagtgcctgcctgagatggaatggagctgccagggaaaggggtgggctgtcacctttgttatttggacaactcagctgttcaagtctgtgggctttggagagtccaaacagtctggacaagtaagggacccccagcacagcacagcacagctgctctatgaaaatgtggccagactacttctttaagtgggaccccaatccattccaccccactgggcaggacttcccaatagggacctccagccacccctgcccatattctaggaaagaactctgatctctcccttggctggagtgcccagtggggagggatgagctgccaatgttgctttgagcccattccagcctgtaggctttgcagaatccaagccaatacaggcagagatggatccccagcaacgcatggctgttttgtcaaggtgtggccagactgcttctttaaatagaaccccaatccattcctccttgctgggcaggtcctcccaaccagtgcttccaaccaccctcacccatgttctatggctgacaaagttctaatttctccctgtgatggagtgcccagggggccaggtgggctgccacctgtgctgtttgggcatctcacccagtccaacctgtgggccttggaaagtgcaaaactatatgggggtgaagggaagccaaacacagcacagctgctctacaaaaacgcaggaaggctgcttctttaaggaggtccctgatcccattcctcctgactaggtgagacctccaaaacagggtttccagccacatcctatgggtgcattcaggctggcaacaggtcagtacttctctgggacagagctctgagaggaaggggcaggctgccatctttgctgttttgcagccttcaccggtaatacctacaggtactgaaaaaactgaggtgactagggtctgaagcagccgcccagcaaatcatagcagccctacagaaaagtggtcagactgttcaaagaaaaaacgagcaaaacaacaagaacaacaacaacaaaaacccatccaaaggtcaacaacctcaaagatcaaaggtagataagccaacaaagatgagaaagaatcagcacaaaaacacagaaaactcaaaaatccagtgtgctccctttcctctaaatgaccacaacacctctccagcagggatttagaactggactgaggctgagatggctgagatgatagaaataggattccaaatgtggatctaaaaaatgaacttcactgagctaaaggagcactttgcaactcaatgcaaggaagctaagaatcatgataaaacaatgcaggagctgacagccaaaatagccagtatagagaggaatataaccaacctgatagagctgaaaaaaacacaacaagaacttcacgatgcaatcacaagtattaatagcagaataggccaagcagaagaaagaatctcagagcttgaagaatgtcattctgaaataacacaggcagacaaaaatagagaaaaacaatgaaaaggaataaacaaaacctccaagaaatatgggattatgtaaagagactgaatctatgactgattggggtacctgaaaaagatgaggagaatgggaccattttggataacataattcaggatatcatccaggagaacttccctgacctacctacagaagccaacattcaaattcagaaaatgcagagaaccccagtaagatacttactccacaagaagatcgtccccaaaacatgtaatcatcagatcctccaaggtcaaaatgaaataaaaaatgtcaaaggccactggaaagaaaggcgaggccacctacaaagggaagcccattggactaacagtggacctctcagcagaaaccatgcaagccagaagagattgggggacaatattcaacatttttaaagaaaagaaattccaatgcagaattacatatctagccaaactaagcttcataagagaagaaataagatccttttcagacaagcaaattctgagggaatttgttaccaccagacctgctttataaaagctcctgaaggaagcactaaatataaaaagggaaaactgttgccagcctctacaaaaatacactgaagtatacagaccagtgacattataaagcaactacataaacaagtctgcaaaataaccagctagcatcatgatcacaggatcaaatccatacataacagtattaaccttaaatgctccaattaaaagacacagagtaaaaagctggataaagaaccaagacccactggtaagctgtcttcaagagacccatctcacacgcaaaaacatacacaggctaaaaataaagggatggaggaaaatttaccaaccaaatagaaaacagaaaaaagcagggattgcaatcctagcatctaacaaaaa

SEQ ID NO: 1884167 - DNA, 4001 bp, Homo sapiens
caggttcaagtgattcttatgcagcagactcctgagtagctgggattacaggcacccactaccatgcctggctaattttttgtatttttagtagagaaagggtttctccatgtcaggctggtctggaactccagacctcaagtgatccacctgcctcagcctcccaaattgctgggattacaggcgtgagccacctcgcctggaccaagacaaatatactttttggtttgttgtttgcctttcaatattggctataattatttgatgtaacaaggtttaaattagcatgcatagaaatttaatatttttcctcttaagttcttttcttttatgcttagaaccttcttacccagaaatgagttattcacctaagttttcttcatttattgtttagtgttttctactttttaatattttcttttggtttttattttggtgtctgacatgggggagaatctacactaaatattacattattattatattagattacatacagattataataattggatgtaattgattagattaaataggtttttgcacactgaataagtagcttccccattggcctcattgcttcctttatcacatcatattttattctttaatttaccagtatctgtttctgggctactttgtcctggagtcttgtgcccatattgcatggccttaaatactgtagctttataatatgttataaaatctggtaagccaaatctggcttattatacttatgtttttcaaaattttcttattcttccagaagttatatttgattttgatgggaatcatgttgatcctattttgactttaaaatagtcagtctttccatctgggaattcaaatggagaatacttaggaatcttgtaggccaggcgtggtggctcacacctgtaatcccagcactttgggaggctgaggcgagtggatcacctgaggtcaggagtttgcgaccagcctggccaacagggtgaaaccccgtctctactaaaaatacaaaaattagctgggtgtggtggtgggcgcctgtaatcccagctactcgggaggctgaggcaggagaatcacttgaacctgggaggctgaggttgcagtgagccgagattgtgccattgcactccagcctgggcaacaagagcaaaactccgtcttaaaaaaaaaaaaagaaaagaaaagaaaaagaaagaaaggaaaaaagaatcttgttttgcaggcaagatacagaagctcagaggagggaagcaggggcccaggtctcctgactccctctccagtgtgttctacactcaccctgctgcccatctttctccccactggaggcaaactccgtgtccaacctgaggctccagtcccctgtgaccaccaaccggcccctggttgtggggtgctggggcctgtcccctgcttaccaggcgggcagttctctagcagatggacagtgagggtggcagggctaaaggtgggccggttgtcattgtcatccaggatggtgatgagcaggtgggccgtgctgttgagcagcccgatgtcctcagccagcagcagcagctccaggatgggtggcgagaatgcctcccggtcaatgatgacacctgacctcacggtcaccacacctggcacccggtgccgccagccagggaaacacacagaaaaggggtgcggtgggaagacagggcaagaaccaacagggagagagcagagaaagacaggggcaccatgggacagagatgaaagaggagcagaggcagtaacaaaatgactttctcccccacaggctcaaccacccgtgctgagggagggccccatgcatttcctgtggttgtcccctctgcaggtgccctctgctgtcttcaagactcttgcctgggaagagtgacccagggcacagggttgaccgtctctgttgacagatgtgctttcctgtcggcacctgtcaccaaagcggcctcctgtccaggaccagacggatgtggcatggtctggttggaggacaggaaagtcgctctggctacttctgctggactaggggcctgagcctctggcctgcgcatggggagatgacgggagtgggctggggggctcccggcccaggctgagagttcgtgcaccaacagaggtcctgtgtatcgtctccaagcctcttcccacgtccccctgccaggccactgggtgatataacccagctgcaagatggggactctgggctgtgaaaaatggggtctccacggacagcctgggtccagcactgagaagggaggccctcaatccagcagtgtggccatccccaccccagaatcaggctgggagtgctgggtggcacagaggcctcaccggtgctgctgttgatgtcaaagaggccactctgggcacccagcagctggtaggtcaccacggcgtagatgtcttggtctgcatccagggccaggatgggcccattgagcaccgtgagaggggtgcctgggccagaaggagaggggtcaccacaagaccaacccagccccctgccctcccacctcccctgccctgtcccggtgagccatggctgacgatggatgagaggggagggaggtgaggtggacagggtggggaggccctgggggcgggcctgcggcagccttggcagactgaacgcagatgcctggggagcggcctcaaagccctgctggggagaaaacatgagagtggtgagcaaggccccggctgcccagagccacatctgccttcccagcagcctttgaggctggccgctcctcgggagggtctggggctccctgacatcccctccccatgtgtgggtctcgcctgtcaacacatgtgttcacacaatgctctgcctttgggggcctggccatacatgactagaaaaacccactcatgtgtgcatcaagttctgtgttcacatggccacaggcacttgtccaggagcacgcacaggcctgggattccctggttgtgcactcgtgtgcctctgcaggtgggcatgtctgcacacgagcgcatcagtgggcacccatgtacctatatgtgtctgtgcacatgtgtaaccccacgcacatgccttggtatggacacacacgggcacatgtgtgagcatacacacagacaggtttaagaatgaaattcacctaggggggatgcccagccagagatgaggaacaggggctggggagactggaggagtgcaggtgccacctcaggggacatcacagaggagattctgtccctctggagggaggtgagcctggtcagtgcatgtgtgtggggagagggctacactggcctacccaggaccccctgacctcccacttctagttatagatgctccccagggcttccagaaggccctgggatgccctgcactcctggggtggagggagcagtgaggggtggacccactcccctccggggtagtcctcacaccttacatgcccttcttgagggatggtggggcagctctcagaccaccctggggaacaatgaccacgactgtctcttccaaccagacctgtggcttctttgtgctcataggaggcccgggagccccagcccaccatctcccggagctgcacccatccttcccctcccgcacccactggggtctaggttcagctatgccgttaggcataagggaggtcctcaggcatcccaggccccagtggtgcctggcaacagcaggagctcccgggtgggcccagcacctaccagcgggagagttttccatcacctctgcctggtaggtgcttttagtgaagagggggtggttgtcattctcatcagaaaggaagatcagaagcaagtcataatcctgcaaggggcagaatggggcacgttgtaggccatgctcagcaaagtgcccccacctaggtgggaggagggttgggaggttggggattggggcacagaggtggatgatcagaaaagcccacaccaacatgaactcacatttttcaaaagaagacatacaagagggcaacaaacatgaaaaaatgtggccgggt

SEQ ID NO: 1884168 - DNA, 4001 bp, Homo sapiens
gctgcaggtgacccagggactggtgtccctgctgctgcagactctgagcctcttggctcttcagcttcacctgcaggaagaccctgggcatgagggcacatggtggctggcttccagattctgggcccattaatagggtattgagggcactgtggggctctgttgcccgcccaggcccctggccccttgctccaggcctaagtgactgcctccctttcctagaaccccatgccttcttccccagcctcaaatcttacacctttcttcccaccatttaaactgtaggccacaggctggtggaaaagcagagggagccaaccaccatctgctaagtgtgctatatgactaatactttccatgtattatctcatttaatcctcagcacctctgcaaggaaaatgctaacttccttttgaagttaaaggaacagagacttagagatgcaaagtggttgaatggcgaccagtggaactgaggctggaatctagtttgaatctaaggagacttttttgtttttgttttgttttgtttcgttttgcgacagagtgtcactctgtggcccagactagagtgcagtggtgcaatgtcagctcactgcaacctccacctcccaggctcaagcgattctcatgcctcaacttcctgagtagttgggattacaggcatgcgccaccatgcccggctagtgtgtgtgtgtgtgtgtgtgtgtgtgtgtgtgtgtgtgtgtgtgtgtgtgtgtgtgatattggtagagatgaggttttgccatgttatccagactggtctcaaactccagaccccaagtgattctcctgcctcagcctcccaaagtgctgggattacaggcgtgagccaccatgcctgacataaggagcctcttataccacgactcctcccctgtgattggggggctccatgcctctagctgggatgatgatgtccacacctgggaggagcccagggctacccacctctaaaagtcagagggcaggaagcaagaaacagtcacaggactgccctggagggagctggggtcacctgcccccgggctggagctgcttttggcctcacacctcccctccccagaggctggtgctcacctcccagcccttcttggatgggcagaggttacagtctccttcagcttgcccagcttctcctgcagctcctttacttgctgctccaactgtagtgcactcttattctcgttgttctggacagagagaagcaatcagtggccacccactgcagctggagaccccagaacttggtgtctgcctcccatggcaccaggaagggtggaggcaggttagaaaaattatcccctctctcccacagccatcagagcagggctctggctcacaggtgcctttagaagtaccatttcacgtgagggctacactgccccatcttacaggtggggaatcaaaggcctggagggcaagggaggagggcaggctcacgaggcggggcaacgcaccagctcctctaagccgctctgtggcccagccagctgctagtcgagctcatggttctgagagagcacgtggttgatggtggtgtggttccgcagggcctgcatgcacgtctctgcctgctcctcccagagcttggctttccgccccagctcgagcagcctgtcctcctgctccgcagcctctcctcccactcccgtagcctctcctcccgctcccgcagactctcctcccgctcccgcagactctcctcccgctctcccagcctctcctactcctgcagcttctcctccagctcctgcagcctctcctgctcccgcagcgtctcccgttccagcagcctctcctcctgctcccagttcaggtgactcaagccttgattgttttgcacctgagcttggagctgtcctgccagactctcctgctccttcctcgggtgctcggcctcagcttgtagctgctgttccacctcagagggccctgctgggggctccaggggcaggggttcagctgagaaaggaagcagacaacaagggcctctgggttaacaaaacaaaacaaaacaaaacaacaaataaaagcccttctcttggtgcacagatcctctcaggctccccaaacttggcctcactgctaacgattcctcgctctcggatggtagccaatcttccaagccactttcagatagagagcactgtgggtggctgacaatgagcactcctccctctttgttgatggcgacactgaggttcatggagattataagacttgccgtctcctggcacagacctctttccctctgcctcaaagcccttccatctacccacctccctggggcattctaagccatccccacagccctctgatgccagtcctgctcccaggccatgccagccccatcttacccatctagtttttgagttcggccaagctcctctccagctcctgtacccgatgcctgtcatgcttcttctcctccttccatgtgcaaacctgcccaaagcacgggggacagggccctggagagaggggctggtggttggacaggctaccaactccctctctgcctccacctctacaaagcccagacccatgaccacctctggctgtactattcccattttacagatggccagaaagatccagtgacctatctaaagtggggggcttaagggtcaggtctcacctcctctgacattttccataccctctgctgccaccgggccctctctccttttagatgttgagtatattcatctgtctctagctggacttgttccaacatctgcaagaatgggcacagaagttaggaaaggctgtcactggtcctcacctgctcctggccacctggcgtcatcttcctcccacatccctccctctacaaagcttcacctgtgtcacgtgtgcttccagctgtgcccgagcctttatggactgccataactgccgcttgaggactgcttcacagcggctcgaggactgtatggtgaagagtgagaagtttcgatctggggagcctgggccgttccacacagtgccccttaaaagggctagggttaggctcaatatacaacttggtcagtaaaggtcaaggcatttctaagcctgtggtctggtttttaaaagaactcagtaaagttggaagggacagggaaaaagatcgaatttacagctggctaacagaggcccagagagatcagataatattgctgttgttattactgttattactaccactgtttgaatgtttattgagtgcttcgccagttaccatgctaacgatcccactgaatcctcataaccaccatatgagacagttactatgattacctctattattagtattagagttactattagagtattagagtttctattattagtattagaggttaagtgcttgcctaaggtcacttagacagagctgggatttgaatacccaggtctatcctattctctaagcccatttttcttgctgggggttggggcacagataggaagggggaaattaatcttttattcattttttgaaaggatgatacattcacatagtccacaactcagaaggtacagacgggaagtatctcccagccaccctgttgctctctgctgaattttttacaaatccttgcagacatgttttatgtatattatcatagtacgtacgtacacacacacacacacacgttccccctctctacacaaatggtaacatactaaaggtactcttctgtaccttcacagtacaagtatgcaatcccccacctaggactttgtcaaggccacagccaggtaacagcagggtgggcacttggcctccaagctctgcatccagtgctcgctccccacagtgccccgcaactaacccacagcagctgactcagccccaggctgcctctaacaaccacacacaaaagcagcaagaaatggccatgctgccttctgggcaggacattccaccctgcagcaaagagggcagtaacagaagagccatgctgcatgctccatgctctggggtccctcagg

SEQ ID NO: 1884169 - DNA, 4001 bp, Homo sapiens
agaagtgtcaaggaaatcgacaatctgaggacttttgagagtaggggcttagccaacttgagccacacgaacacggacaggtatgcagacttgatcttgtaaattctgccaaggccttagtgttcaaattcagcaaatggcagtaagtaccagcctttattgcatctcagctagctaagaggaggaaggaacaatctcagaacccatcctttcaacccagaagagctgttcatgagagtgcagaacatacctccctcagggtttctgacctgagactgagaccagtttcaccaggtgcccctcagttagcacccggtctgttatcaagggaatgaacaagtctaaagccaacggtgttgagtcacttttcatccaaactgccaatctaaaggcactgaacaagcctgtaaaactccccggccctggccgacttaacttacggcactccagcatccaatccactcccacacctcagaagaacctactgctgaatctccggcagcaccattgacatactcagcacttcacaacagattaaatgggccagagagaaagacaaagtcccagcctcagagtcctcacctgggcccagagcagagtctgcccccaggcagcaggtgcgacgcacacaccttgtcactgtcagccttaactcaagcaattcttcctttggaagtctcttctggggtctggacaaacgctgcctctccttctcactgaagttttcccatgtctcatgttacttccagttcccaagtcaacagtcataaaagtattttctgtgcctacatatgtgtgaggtttgttttcttcctatatcatgattttgtaaattaaaaaccaaacaatttggcttcctggaaaatgttgtcaagtagttttcacggcaatagaagtctatcgttttcaggtaatatatggtacattaactctacatgtggcatgttcttttgttgctttaaccccaaaagataaagatttatagtcaaatgttgaatcgcacccccttccctaccttaacaaaactctcctccaccgccgtgctctccacattctcaatgcttcacaaactctgctcctgatttgggtacaagctgcaagctcacgacttaccattccgtaacgcttttatgggctctgatgaccgaggtctcaatgtcgattgggtggtaccgcatgccccgcagctccatggcttcgtccagtgcccctaccacgtagagggcatcatggcgctctgtggagtaatgacagcctgcgtaagcttccccataatgccgctcaagccgtttccttcttttcttaaaaaaagattaaaaacgacccccaagtgagacagggatgcaaaggaaggggctcacggatccagggacgtttgtttccttctgccacggagctccttggcaagtgctcggctcgtgtgccagtaccccacaggctggctgcaaagccgccatgcgccctctacacttgtgctttgggagaagatctttcctggctcagcttcgatatccagtcaactgcctgattgcatgttcatcgggagcaactgaggggcgaagtcggcacccagcggtctgagttccgtggacccatcggctgaggcctcgtctgcccaagatcacacgggatacagtgcagccacagtcagaccagctctgtgactctatcccacacatgcttctctgtgctactaattctgtgtataagtgggaaaagaaagcatagctcttgctcttgttcatgaacatttccttagctcatagagccaggaaatttatttctatccttcttgcaaacctcagaataatgacaatgacaacaagtggtcaggtcctatctttccttaataaggaaatatgtcctaaatttttataaggtagtaagcatattagggaaaatttgaaaggcatgattgacatataaaataacatcagagttaagtattttctcccatccaagtactaaccaggcccgaccctgcttagcttccgagatcagacgagattgggcgcgttcagggtggtatggccgtagacagagataagtattttctaatttaaatcagacaaagaaagatggagacattgactcggcctctgccccctacagcagctttgcctcttctcctgtggcagggacacgtccttcagggtatccctgcttccaggactcagcgggacgtggctttcctggcctttctctaggactataaattgccaccagcttttgcagcttccaggaacctcaggcagtagcctcaaactagtctataatttcccacaatgcaaatgtcatgccaggatatttctgtatgattcctaaacatagcctgttgggccaggccattgtaggtatgttagagaggtatgtaaggaagccttactgatgtctgcaaactcatctccctgaggttttggtgagtcaagatctcaccaggaacctcaactgccactgttgtgaaacagccaagtcctgcctctatttttagcagaactaaggaggtgagaaaggattctggaataagcaaagaattaactatacaagtgcacttttacatgtccatgtcatgaaatacccctggcttcaccctgctctcctctgatggggcaaaggcaatgctgtccacctggctgctccacaccaggcaccagcatcagcagcaccaggccctactctctgatgaatgcatgggcagagacagctggccaccagggcccgagagcctcgcggcctcctcttccctgacaggggcagacccagtcctagaagcagcagcatgcacgttcctgcagccactgggacagcttctgtctcagatggaccccgtgggagcaggcagccttcaggcttgctgaggagactctgtggtctgagactctgagcactttgctgtgggtgacactgcagcccatgctcagcagccatgcccctctccggttttcagtcagctcttggttctcaggacaggacagggtatgtgatgcacagctcagcttgttggacacatttgcattttgctttcctcttgctcttaaactcggttcttttcacactgggttgtagctagcacacgtgccctcctggctttggctgctgtaaaccttgggaaaggcttctgtatctacaggagcctaacctctctgcccatctgttgggggggggccgccagcctggactctcacctccatttgcatctgtgagctcagttctccgcaggaaccccaagtagcctgtgcgtgcccagatggtctgggtgtctccaaaacttagtcttgagttgaagtgatctgactggagggattcgtctccgtaaatagtgaaataaccgctggcattgtgggcactgtgaacccaaatctgcaaacggagggaaatgtcactgtggatgacattattttatctccagggaaatgagactacaactactttgacaattcagtacattatattcagtgatagtaaacgtttccttggactgaataaccaagatgatgttaatctcattcgggtttctcgagagacacacagaggatactgaaataaaggcagtctaccaagtttgtggccaagcaaccagccaaggcatccctatggggaactgaattaaagcagattagttgaagatttaacaaataggttttaaaaatatacacatcaaatgaacaaagtcacactagattccttacactttaacgaatgattatttctaaagagcaagaacaatgctgaaaagctttgagatttcttttctcatttcacctggttagctaatacttttggacatatattgcaataaaacaacacacagaaaaacaaaacctaagggatgaaggcacataacaccaaaaaccggaaacgaaaatgcctgatgtctgacatttggggaaataggtaagcaaagactgatatggtgagtcaaagcgatagccacgtgggttacggagaaccatggacagggctgggtaaaagcaaaaccagtgaagttccacagatgccca

SEQ ID NO: 1884170 - DNA, 4001 bp, Homo sapiens
aataaaacacaaagacacaaggaaactttggaggtgatggacacgtttatcacctggattgtggagatggtaaatgtaatataaagtttatttgcaatgtggaatatggagccatatgagtgaatgtttctcactttgtggtatttaaatccattggtctttctttcattttggatctttcttattcatgcatgatttggaaaatactggctcatggaaataaatgttagcacattttataatgccaaatacaggagtgtatacatttgtccaaactcaacaaattctatacattgattatatgcaggtttttgtataccaattatatctcaataaagctggaggggaagaagacttttcaagagatgaccgctgatttcaacaaatgtaatttttttctaatggtattataaaatgtgctaacatttaattccatgaatcagtatttcccaaatgatacatgagtaagaaagatccaaaatgaaagacaggtcaatggattttaatgcaacaaagtaagaaaagtttactgatatggtttcagattccacaccgcaaataagctttaagaaatggccacttgcagagtttgatgtagcatcaaagggaatatccacaattatcagaaaagactattaaaacacgcctccatttccaactacagatgtgcctgaggttggattttcttcacatattccaaccaaacaacaaatcacaacagattgaatgcagaagcagttatgagaatccagctgcttctacgaaaccagacgttatagagaaccgcaaaaatgtaaaccaccaccactctttccctaaactatctttgtaaaggtatttttcatacagaagtattatttatgttcatatacaaaagggttattatgttttgatttttagtttttatgagacagggtttcgctctgtcactcaggctggagtgcagtggtgtgatcatggtacactgcagcctcaacctcctgggctcaagcaatcctcctgcctcagcctcccaagtagctaggaccacaagtgcacactaccatatcctgttaattttttaaattttttgtagagacaaagtctcactatgttgcccaggcttgtctcgaactcctggcctcaagtgatcgtcccacctcggcctcccaaagtgctgggattgcaggaatgagccaccacacccagccaggttattatgttttattgaattcataaatactctaaaatttcccacttatatttctaatatggtaaacattgatagatataactcatgtaaagcaaaggtctttgaggtccttaataattgttaagagcgtgaagcggtactgaaacaagtctgaaaactgcagctccaaggatatggagctgaggtcaaggctgtgcttgttcaagtgagccttcaggaattaccttattctttgagttcctgtttgaacaaacgctaaaagttggaagctcagcagagcccaatgtctggcctagagcaccaagaaccaccagccacagccatcctgagaaagggccttatgagcagaatattttgtattaggctcgggtgtgaggttagaagacctcgggtgggggaagtcagcagcactttttccttcttagctcagcacatacctctttcttgagattctggtctcaaaaatagctaaccaggccaggcatggtggctcacacctgtaatcccagcactttgggaggccgaggtgggcggatcatttgaggtcaggagttcgagaccagcctggccaaaatggtgaaacctcgtctctactgaaaatacaaaaaattagccaggtgtggtgacacacacttgtagtctcagctactcaggaggctgaggcaggagactcgcttgaacccaggaggcggaggttgcagtgagccaagaccatgccactgtactccagcctgggcaacagagccagactccatctcaaaaaaaaaaaaaagctaaccatatcagtccagactagcagactagtggattaaggaagctgagatgaactgtttcccgtgcgcttcctcctctggttaactcaagaaatatcaaaacagccatcccaaccaacagaaatctctgcctttttaacagactggtaaattcttcaggaccagacttaacacaaaagtcacttaaatcttaagaactggggcaagaagtgcagtctcagctctccaatatttttttgcgtgtttaagagatgtgtggccaagagctcacaaatacagtgtctaaggtgagtgggccactatggagactttgcccttgaatctgcgtgaaacggcaaggttctgagcaaatgagtgacaggatccacccgaacccactctgggctttgggtggagaaatggagaaaaggttttaggggcaggggcaagagcagagaagtcactacagtaagccacatgacagataatgatttacttcttcccaaaaaggccgaaacattgattttatttttttcctctttgagacagagtctcatgctgtcacccaggctggagtacagtggtataatctcggctcactgcaacctccgcctccctggctcaagcaatgctcccatcttagccacccaagtagctgggaccataggcatgtgccaccacgtccagctaatttttgtattttttgtagagatggggtttcactatgttgcccaggttggtctcaaactcctgagttcaggccatccatctgcctcgacctcccaaggtgttgggattacaggcgtgtgccactgagcccagccaaaccattgatttctaatgctattacgctactattgatacatacagtacataaagatcttctattagtttctcttggagcaataacaaaataaaagtatgccttgtattgatgccctatatcctttactaagtggccccactcacgaattacagtctttttactttcctttttttttttttttttttaacatagagagtatttccagcatatactaaactggaggaaagagtataatactacaaggaaacttcttgaacttcttacctaccttcaatttatggccagtcttactttatctgcaactgccccacctccccatcccagcttattataaagtcatttttaatcagattttgttttgttttgttgagataagagattcgcttttgttgcgcaggctggagtgcaatggcacaatctcgactcactgaaacctctgcctcccaggttcaagcgattctcctgtctcggcctcccgagtagctgggattacaggcgcatgccaccacaaccagttaacttttgtatttttagtacagatggggtttcatcacattggtcagactggtctcgaacgcctgacctcaggtgatccacccacctcagcctcccaaagtgctgggattacaggcatgagccaccacgcccggccccaatcagttttcttattaaacaaaaaggattttaggaaaacagactaacacgtgaaagaagtaactcacctagaatcttaatgcccattactgatatgaattgaactgtttttatttgaacattcacactcatacagatatgaattaacagtacatggacaatatagagttgtacatgaaaattaacttattctcttgttacaaaattaggattatcctgatgacacgattttgtaaacttttgccaccatatattaacaatgtccatggagaagaagaataaatgcctactgctgcacagtttaggatgtttctagtatttcaggatattagaatattatcatgaacagctacatatataaatttagtgaacatctactaacatgtactagcaaatgccaaacatgcaataatgtaaagaaaaatggactcccaggtaacgcaaaatacagcaactgctataaccactgatgctggcaagaccaggaaaagtagctcctttggataggatgacagctagaaacattaactagggattaagactgatattggcagggtacggtggctcacgcctgtaa

SEQ ID NO: 1884171 - DNA, 4001 bp, Homo sapiens
agagcattggaagcatgtccctatgaattcaactgctggggggctgctgcctgatttcattttcaatctttgcctaatttctttcaggaaattaggggatgaatgtagtgatatgggggcacaatggtccaattacaggacaggctttaacactgaggctgtcccagagaaactgggctttcccgaacaaggatgagcgcccatgccctgtcatgccagtgggggaacttgggcctctggactaacagctctcctggctagtgggagctcagctatgagcttggggttcctctcagattcctgcacccgaggggaacagggcacaggcagacagaattgacacacaatctaatctcatttctactcgaatggtgttctagattgttctgtgcctatttttccttcctaaggtgcttctcacgactcatagtgaaagggagtgtgtgccagggagttggtggaggagaggaaactctggtgactgcaggaaaagccctggcccaagcagttaccccaggagaaggtgggagacagcaggtgggaatgatccagcgactcaccctgaggtccctggggtcctgtgagacctgcagaaaatcagacacaagagggaagagttgaagggtggaggccatccctggtagccacacccacacctgcagaaaccggtggacactgcagtggaggggtcagtgggtacagaaggacacgtctcatgccggggcagccagcatccttggacctctcagctctggatggagagcagttcttcgggctttgcagtgaagcgacccaccactttctcaggcaatggtgctgagcctatctgggttcacagacccttttggaatctgaggagagccacaaatccggaatgctcaacactcacggatcccaatgctgccccaggttccccctctatggctcctgtctgggcacccgccaaaggaggctgaggaggcccctactctcagaggcccccgatgaatgcccacccgccttgaccacacagctttcttggctggttttcatttgttcttcctgcaaccctgagaagtttgctctttgctctcggtggagactctaacaatggcttcctcctcggcctcgtgggtgttggtgagggcccagtacaggagaggaggacaagaggagaagggctcagaggagcaagatagcgaggtgaccttcaagtctgcagttttaagagtgtccttgcccctttctagaaatccttatgtttagctgttaatcccactcttctgaattgccagacttagttacccagaggtgccagggcctacagccactgcacgcaaaacaacctaacactatggcagttccctgctgagctgctggaggaaaacgggataaggcacacatgggtgcatttgtaaacacctgcatgcacacacacaaccatgcacatatacaccccttcccccacaacctgcacacctgcacatgcacacgcacacacatgcctacatccacacacacaaagcacacacacactaagcagggccatggctccctcttcctgctctgttacctggctttcctgggtctccagaaggtcctggtgggccacggattccaggcatcccagtaagaccttgttcacctagagagagaatggccaacgtggaagtgtttacatttaggaaagctaaactggttatcacatctgaactgatagtttctgagggttttcctaattgacttgctggcaggtggaaaggagaaggggaacagaactggacactgcacacttccacatgctatatgctcctctgcactatggttaaggggactgagggctgcatgctggaacaggggctgtgacgggagtgaggctgggggcagcagatgagtgaccaacctcttgggccttggtgtccgtctgggccagcaggacctggtaaagtagaagcaaggtctctcagttgctcctggagtgatttctgcgattcctccctctactgtcccagtggccttgaagcacattgtgtcccaggagcccacgcagccatcagccacgggacagccctgtctgtcacactctctggatacggtactcccactgccccttctcctaaaccagcaattgtctcttttcctgttgagaattgttcagtgccttcccattgcatctcaagcgcctcgatgctcaatgcttgtcgcgtttacttgagggcctagaagtcaaggtcctccatgttcttgtctcctctgctctaggcattattgtaacctctctccaaaatggtggccttctgggaccatatcttgctctttcccatttctttgtctttccctgctcgtgctgtcatccctgcatggaattttccagactggtcatgcttaaaatctttccaactttttgggaccacttgaaatgccccctcctccgtccttcctattggaagaaatctctcctttgactgtatcctcacagcactctgtaccttgcgtgacacttgtcacctcatgcaagtcttatctccccttgagggaggtaaagcatctcatttgcctagcacagtgtcagcactcacagctggggaagtgaacgagagtacacatgctgcatctccacaggtaaggcttaaacccttcttgggtttgatcctcaacatggtcttttttttttttggtttttttttgagagatgaattcttgctctgtcacccagactgtagcgcagtggtgtaatcatggctcactgcagcctccaactcctgagttcaagcgatcatcctgagtcccagggattacaggcgtgaatcactgcacctggctacctctgagattcttggtcagtttctgcagccaggctgacaggcacctcaggtgaacaaaagggtaaaaacctggatttggccatgagactagccctgggattcctggaacacttgaggctcctaaggacttcaacactgtcttccccaggggagtggggagctcacaggcagctcttaggtgaatggaccatgccctgcaaggcctctcccaaagtggaaagaaacccacagaggtacctgcagctctctgatccccagaaaggatgcccagacacagaaatgactggtcaagggagactctaccaggagtgggcagattagagagtaggagaggcagctctagaagacggatctctccagggtcgtggtgacccctcagatggggaactcactgaatccattcctttggaacacttacccattgctcctttagccccgggctcaccaacagcaccaggcaaacctctcatgccaggctcgcctgcaaaggacaaagaactagctggttggacacttgcaagctgtgtatgctttaacaatggtggtctgctccctcctccaagaggtcaaggaagcagcttctgctttgattccaaggtcagggccacttggaacccctgggaagtggcatgggctcaaccagaaaccacacctaatcagaatcatgggcatgtgcatgagtcttatttccttggaaactgaaaaccaccccttgagtcacagctttatcactgtcaatttcctttataatcatgccagttggcaggaggtcagtggttgagaggataccggggtgcaaactttctgctgcttcgggaagagcttaattttctcaactgtattccccaaaagaatcagagacaatcctacactttcttttttgctccaaacatttactgtttggactatacatctggatacctccttatcctccactccaggctttattttctcatcttgtgttttttctagatcacaagttccctgaagggttttaaacagattcggtctcttacttctggattttttccaacctagtgactgatggatttacaaaagtcgtggatagattaaagtagattcccatgacagactgacctgtgaggcctcgaggtcctttctcaccctggtcacctaaagcaaacaagggggaggtggaaaaagccacagttgtgagcaaggaaaacactctcaccc

SEQ ID NO: 1884172 - DNA, 4001 bp, Homo sapiens
gctgagcattgttagaccctcctaaggagtcttaaccttcccatgcccctcaccacacccagacatacggcaccagaatctctgggtgggacccaggcatgggaatttttttaaagttccccaggtgaatcagcgtgcagcccaggcctgttgcacctccacatcagatggagaaacacacaggttggctaaggtgctgtcagtggcaaaatcaggactgtaagaactcaccattttcttttataaacagcagcatcatttacatagtaaagtttgtcacttggggatgcattttatacacatattattagagaataggcaattaacattttcttagtcccagaacatgaaatattggggcacaaaaggaccctatgcaaaaacgaaggggtagaattgtgatgagaacaacattcaaacaaatcctgtgaaccaggagaaggaccgaaagactgttctaactaaaaccccacaatggcatctctcttcaagggacccgtgctatgggaccacttatctgatctgaagtatagtcaatacatatgattatgaagttccgggttctttctcacactcagtggtgaacaactcgcttctagaagtcagatttaataaaaccacatacatagacactccctggtgtccgcgcggttttaaaaccacttttcctggctccatttctccctgtcattaatatacataacttatgtgctgacttgaaaggtttgtattttgttgtggttttcatcctatctcagaaatatgtgactacaattatagacattggtcatccaagaaaaacagctaatgataccagcataaataagttcctagagcaaaagcattgaaaaaaaatttccccctggatttttatttattcactttgctttccaaaatgctacatgccacattttaacctaaaaccaatgtacacatcagttttacccaattccagagctgaaactgaaaattataaagcttaaaatgtgctcctctgtatctatcaacaagatgcttctaaatcgttattagggagaataatgcattaatgcattctttctttaaaagtagaaatgtgtttaaactgaactatccatattctttcaccatagcatctagccacttttgtccccagttctaggagaggtttaagcctgaggcacaatttgcaactactatatagaatgaggttcttgccataggcgcatttcaggattgaacctgtggctttcagctctgatgcagagagaaacaggtgactgacggcctaccataaatgcaaagaacagcctggagagtaagagcctgggctcatcagacatgagttcaaagcccagctctagtgctttttagccatgtgactcaggctaattatctcctcttctaatgacaatgactttaaggttgttctaaggattgatgacattcacatttgtaatagtgcactccgcaccatgcaggcttctgattctgctaccaggtggcatcatctcctgctcagcaccggttacctctttcctctccctctctctttcttctcttcctcattatctgtacttttgtccatttgatcattattcagtttgttgatggctgagtcctttattctcctaattgtttctctttgtaccagttcattgcttgttgggatcaccaccagttcgatttagctaaatgttgacacagtatttggtatctacgtgaaagatttggcagtgatctttcaaaacatggggccctggattattaggttatatttcaatattttgcttttaacaatttatggagctattggcaactctaaacacctacaaaagaaatgctgtccacgacaaaagagttctgatcattttgcaatgacttaggagaaacttaatgatgtttcatgaagtgccccctggtactttaagtgttcatgaaggcataccaagttcttaaaggtgtaccacggttcatgaaggtgcactgggttcacctttaagggcacatggtacaccttccaacatgccgtacctgcttaacctgccttgtctcaccctcccttctctgctgtgggacaacctggatcccaggccccaaaggctcagaggtattacatacactcttccataaaaggcctgggcaggtgaagtgttcactgccagaatgatttgggggaagaaagagaatgcaaatgtttttattcatgattataaattcttatgaagtcaggccttctatgaaaatctatagacctatcaatcatgtacatttgtaaactgcagctttcaagtggctttgcaatataatgtttaaagatgcaaatggtcaagcctgaaagaagactaaatataatttttttaaaaaagaaagggagaggccgggcgctgtggctcacgcctgtaatcccagcacttcggggggccgaggcagttggatcacctgaggtcaggagtttgagaccagcctggtcaacatggtgaaaccctgtctctactaaaaatacaaaaatcagccaggcgtggtggcaggcacctgtaattccagctacttgggaggctgaggcaggagaattgcttgaacctgggaggcagaggtttcagtgagccatgatcacaccattgcattccagcctgggcaacaagagagaaactccatctcaaaaaaagaaagggagaggtatatcagttgttttaaaatcgtttcatgcccaggaagatgataatgaaggacttcttaccatcctgacgactgaaactcgagactccttccccttgctggatgtgttttgctttggaggtaaataaataaaagcaagtgcagaacaggacaaggctgtggccatgcatggtatttagtcccagctgggagaaacgatgtgaaagatcccccacaaaccctgccctcccccctcatcctcgtatcacagagaatgaaaatgcaaataagatttccaaccctttcttctttataaagaagaaaaagagaagcagggggagaagttagtaattttgtttcctgaaagactaaaaataggaatctctgtatttccaagaaagagttctgtggggcatgctgtgaagcaaataaaatgctgtatgtactcatatgaagcttttaaagcaaaaatggaaaagcattcagtgagcagatgcttgaaatttggtctcaaccacagtgaaacagctctggctcccaagaattataatttatggccagacagttcatctaatttcttcacctgtaggttgaaagcatacttggttttcaaatttaatagagcagctggctggatcatgaggaaggtgatgaaatgatataggaatgagcaaagggaccctgccctctcaaagtgatcacagtatcttacttcatggaactactcacccagggccggccagactacattctgaacaaaacagatattgaaaagagcatttaatgggcacctaaggcatatgttttcaaatgacctaactgttatttttggaattgcattcaattcatataaaattaggctgctaatagatgtcatacataaagtcaggacttgatccgcaaaggtgactatgtaataagcccacagtacagtctttaaaaatccaatttacatttgtaattttttgactcatgtgattgaataaagttaaaaagtggcagaagaatatttcacagtgaaatatttccgcccccttccccatttctgaggtgccagttacagtagtcgccccatgtccatcgcttcctttttcaaggttgcagttatccatggtgcagtacaataagatattttgagagaaagagaggcaccacattcacataccttttattacagtatcttactagaattgtattttattatttattattgttcctctttttttttttttttgagacagagttttgctctgtcacccaggctggagtgcagtggtgccatcttggctcactgcaacctccacctcccgggttcaagcaattctcatgcctcagacacctaagtagctgggattacaggcatg

SEQ ID NO: 1884173 - DNA, 4001 bp, Homo sapiens
taagttccatctcctttgctgcgtgcagatccttggctttgggcgcgcttcctcttctgcacttgggccaccgcgggttggccacctgggctgaactcatcccatccttgctttcccccatccctatacccagcggcgagggcagcctcaccagcccttgccccggaggtgaatgtgtgcctggctttgactgagacaactaggaccccagaagcccagtgacatcagaaaagaggctcctgggcactagcacttcccgcaatacgctccagggctgtaggtgcaaaacggagctctaacttccctccagctaatcgagaggaaaatacagggcgcgtcacagtggcctctcccgcctagccacgcgcagtgaaatttccggcaatcgggccagctaagacacgggatttgcaccgcagcctctcagcttctggagccggagccgagcgctcccggcagcttctccaatttctctcctaaagtgcgaagggaaaagccccgtctgctccacgactgcaaggccggcggatctgggagccgcgcccggctccggaggactcggcgggcccggggctccccggcagcggctcctctgctaggggttaacagcagcccccgcggccgggcgggcgcggacgcttcctctccacccgcccgggaacgtggataccgcgcccgcaggatgttcgccggctgggaccggcagtcaggaaacatgagaaggcctcgctattcctgttcccgggcggcgcgcgccgggctgggtaaataaagccgagacgacggcggtggcggtggtgagcgcgctggagcccgcgtggagaacatgcggcggggatgggagtgcgcctagtctcgaggcgggagagccagccgccctgcagccggccgtcggccccgcagccacaggtacagcccccgcgtcgccgagtctcagccggctgcggcggaacgccaggctcgctctggcccctgcgccctgggcgccggtgctctcccgcccttcccccaacttccctccaaggtctggtggagaggcgctcgggtagcggccaaggctggcccaagggtctgcgcggagcttgggagcccacctggccgcgcctcctttgctttaaaattattcgccggcgttgggggagggggacacttctgcagggagtgacctccccggccacagtctggagtgaatcggggtaagtgatttgagaagaggcgcgggtggccgcgcgcgggagtcctgggagggtcagcaagtgtggttcacacgcccccggaccccttgcgacaggacagcgctcggacctttgccatcgcttgcctctgagcctgctgcctgcagacctacagcgcgccgggtgtctgtgtctgcgatctctgcgtgggcttggggctgccggggaagtgtccgaggtggctaacctcgtgatgacttcgctaggaaaaacacgtcgtcgcatctaggaggacgcgctggggtggctcggagaaggccgggccggggaagggtgtcttgtacaaataaagcagcatgaacacacatccctaagggcatgattttaaaagaaaacaccaacgcgagtcttgactgtagaacaggggctgcaagcacgaaaattctctttgacacttatcaccgaggctatgtgcacaccccaggcacgtacctgtctgcgcgggaggacgcagtcctaggggacacacgacatccagcagaggtctgacttcacttccctacgaacacagaccgtagccgtcgtttgatcgcggtggtcacgcgtggtcctaaatgtcacgcgtggcctctgctgcggtggccgaagggcggggcgggggcgttggcgagtgtgggcgcttggcgaggcaaagggtgtgtgtgtgtgtgtgtgtgtgtgtgtgtgtgtatgcgcgcgcgcgtgtgttagtggagtagcagcccatgccgcggctggacgggcaaagggggcgctggcagcgaagctgaggccgctcggaggaaacgggagctgtcccgaggcgcgaggcgaggagatggggcgggcgaagtccgccgcgcgccttggggctgtaactctgcggctccgcggccgcgcggacttgctcctgacgccggtgcgcggcaggcagaggctcagggcctccgcgaccccagaggtgagctgctggctctccccgacagtggcagcagtggcccgggaggtgcgccgaccaagctgcctcctgccttgggcttctgacacctttacagcctctgaaagggtccccggagaccccagagagaggcgggtgtcgaggggctacgagctcgcggctgacacccgcgctgcggaagagaatggcactgattgagggctctggggacctgggtcctggcgccttggaccttaggaccatgcacttcccggggcgcgttgggggatgataggaagattctgggagagaagggggagaagtggtgctttcgtcctgacgccacttaactttttcctgtccttgaacccaacctcaccccgggggaccttggcggacagaagatgcgggggtttcaaccaaaccatccacgatctagaaaacacgaaaatcccccaaatcccggtatggcctgggactcatgagctggggggtcttgtggatacggttggcacattaccccaaatcttcccttccatccaacccctcctgacgccccgagttggggttcctagaggctttagtcttctgctgtgattgaagaaccacgcgcggcctcacgccggtcgcgctccgcagtccggagtatgcctctcccagattcaaactgaaacccagaggctcgtttgggaattcgtttcctttgcctctgcgggtgaatgattcccggttgtagttctggggagtgaagggattggggggatcgatcgcccaggcaaggaagagggcaggtacctgtccggggaacctgcaggggcgggggcgtgtagccaactggggagagccgcagggtccctgccagttgcggcggcgccgctcctcccctcggctccgcagcccggcgacccggccaagttcaaggccctgaacctgcaggggtctgagcactctcagccagtaagtaacgagatgcaccttcctctcctagaagccgagccccgctgcggagctcccggcggcccagccccgaggctctgcggccgcgccgcgcgtccctaccaaccgacaccatgaacaccatcgtcttcaacaagctcagcggtgcggtgctgtttgaggacggaggcgcctcggagcgggagcggggtggccggccctacagcggtgtcctggacagtcctcacgcccgccccgaggtgggcattcccgacggcccgcccctcaaggacaacctcggcctgagacaccggaggaccgggtatgcgcactcccctgggggccctgcccgcctgcggcccggaggggtgggggtggtgagctgtgacggggtcccgtggcaacgcgggcgggtggacgggaaagggcccggagttccctgggagtgcaggtctgcccctccagggctcgcgcattctcatgttaaggggctcctatcttaaaacatgagggatcaattcgtcggggcagctccaaagagcttggtggagactaagggcgccaggagctgcccctcggccctccgctgcctggacctcggagttgggggttatttgcccctctccggactgtgggtgccggtgcgcggctgagggcgaggaaaaaggactgagctcggtgcagagaaacaggcgaagccgagcagtcggggagtccaggctcaggctccgcggacttctcttcggtcactcgagcccctcgccagagccccgcggctcgcctggcccaaggagtcgggaaggtcgcctcccgccagggagtcccgggcgtgagcgcggctcggctgggcccgcggcgaacccggagggggaggccccgggcctgcggggccgggtttgagtttagcggggtgaggggtatgctggggggggcgg

SEQ ID NO: 1884174 - DNA, 4001 bp, Homo sapiens; identical to SEQ ID NO: 913878

SEQ ID NO: 1884175 - DNA, 4001 bp, Homo sapiens; identical to SEQ ID NO: 913879

SEQ ID NO: 1884176 - DNA, 4001 bp, Homo sapiens
ttaaacataacttaaagttcaaaggttagatgtaatcagctataatgtcacatatcaccaacattcttgctctgaattttgtgcttacaatttgaaaaagagaataagatattcaaactatatttcatgatctacagttatgaaaatgtaaatgtttaaaaaaaaactactgcctttcaggcgatcacatactttttttcccctcgtcatacatttctaatgagctctgaaatatttttaaaagacagctgatcctctctgacagcaaattctcattttatttgcttttgaggtggacttgtgaacatggcagtgagtgagtggctcaggggctgttgaatttggtgaatcctttaaagaagttacatcttctggaaagtcaaacagtacagcattattatgaatatgtccatcagtgcagctgtttaagaggcccagaaaccaatggttttcttttgtcatgaaaagctgcagccatgatatttttttgaaatgacagaaatatttgtcagagcagtggcagttggtatgtggcattattgagtcttaatctgtgcgctagcaacggaatgtgttcgcttctttgttataaccaatttataataatcctagctgactcttccgtggagcttcccttgagccaggccgattgaagcagttcggaactgctgactcatttaatcctcacagcaggagagtagaagctgttcggtagctgcgtccttattcccattttgtagattaaagaattgaggcatagagcgactaagaatttgcagaaggtcacatcattagatggcggggtcaggctttgaacccaggctgtgttcgattcattttgctgcctctcatcaagtgagtccaataacctgacatcttattaaaaggaagaaacgattcctgttccctttggtttcatcctaccctgagccttctacttgattttctggctcttctggtttggactacgagtttgtaattgctttccttaatgcaggtgaagaacttttcccagatctttgcggtgttgaattgcaaaacaatacaacgtatacatccacgcacacttaaaacaaaacgagccatattcatttattaatcaagagaggctcgactcgggcctaaaatgaccagtcgctctgcaaggacaggtattaaaaagcgcggggtctgggagccggtgagagaaggctctttctcatccaggatccgaggacttcccgcggacacgagggagaagcgtcctctcggaagaggcccgtgggagcgggcgcggtgcaaccctcggcccctctgggacgcaggtctccgggttccccgcggatctcccggcccttgggcctgggtgcgtcgctgcgcgcagcagagacggcctccgccctggggctgggtgccgctgtcccgggtttcactggctggaggaggagggagggcgcaccctggccccgcactccccgcgacatttgggtgccagggacgtcagtcagcctgggatgagggtgcccccggctggggaagagaagagggagggaagggagtacgcgggtttgagcactctccccaccggtgtttgtcacctcccccgcctggatccctccctccccagccgccgcccacctgggctccccggcctgcagcggcggtggcgcgaggctcactccccaggccgcacagtcgcacccacggcggtctgcggagctttccgggtctctgcccgccccctcccccgctgcgccctccctcccagggtgcccgacgtgcacgttccctgccacttcggtccgggcgcgccggtgggtttggcctgcgcggcggcggcggcgaggcgggggagcgagtgagcgcgaggggcgggcgcgagtgactgtgtgagtcacccgtacctggagtgcgagcgacgcagagccagcggcgcggagccggagccggagccgagacccagcgcctgcgagcccgagagcgcggccggccccaggcgccaggccccgtcgccctccccgtgcactcacccgtggcccggcgccgactccctacccggcgcccgccgcccgcagccctcccgcctgccaggaggcggtgcggggctcgccgggggatgtcacagcggctcctgggagccagcagccgccgccgccgccgcccccgggaaccgcgatcatgaacccccagtgcgcccgttgcggaaaagtcgtgtatcccaccgagaaagtcaactgcctggataaggtgagcgagggggcgccgggccagcctggacctgccgggcgaggggctgcacctgcttcgagaagttttggcacctgggatggaaagcaatgagtgggtcggtgcgtgtgcgtgtgccttggcacggggggagggcgcgcgaacgaagacgccagcgggagtgtcagagaccacgcttggcgattgtgatgttggaaccgggaagggcttttgtcgcggtgcggggcggtgcgacatcggcagagcctctgcggagggcgcacggcggtgcgcagccccggaccccggagggaccaggctgggcacccaggggggcacttcggcgagccgcgccccctccacctccactcgtgttccacaatacccccgccccccgccccacagatccgcccgcgatcccacctcaccgcccacccgcagcgcctcctgtgaccgcggcgagggggagaggcaaatagtaattaatatgtcatggggcggccgctgccgcattgctaagaataatccctgctggagagctccggctcagcgcggcaagccggacccacgggtgtctaatccaccgggtggggaattccaggggaagtagttctgtagccgggcccctccagccctgccccctgcccttcccgggcagggacggagatgaacagcccgggagagagacacccaggagcgatccggagtgactgacagttgaaaccagccaggggcgttctggggaaatttgcgtctgaagatacaaatgcttccttagaacaagctgccatcctgacagtcatcccgggcagagtccgaggtccagcattttagtggaagctggtcaggtgtaggggtacttacatagctctcgtgcagccccctcagcttgcctgacttcgggtgaacacatatttattgagatcctacaaaccctgcatttagacactttgaactggattccttttggtttcgaagccactctctgggccccgtttcttcattaaccgagctcagaaatcgtttctggctgctcaaagaagtgctgtttcgacagaaccttgacagttcgtccatggtgcgtctgtgtattgcggtgggttttcctttaagactccattttcagagctgcctgctttatttacttagctgaaagtaggtaaacacatccccagttccctacactctttttgttgtaatattttcagctacagggactgtgatgcactaaaaagccttccttctgtgcccatcctggtgagaactggcattgtactgtatttttaaatgttttttttttttttccagtattggcataaaggatgtttccattgtgaggtctgcaagatggcactcaacatgaacaactacaaaggctatgaaaagaagccctattgtaatgcgtaagtattgtcaacacgctgtccaggtgtggcacagcctcagagcttgagagccagtggacctgcctgttttgaagaactgactcactgtgtcacccaggtgtggcaggggccagttacctgtttatatcacagactctggggccatgtactttgttgacgatcactgctttttatacctttctaatgtgttgggtaacgtctatgcatcttcaatcaggttagtttttgaggttcgcagtgttacagccttagggacacttattagaagctgctgaacttccccactgagaacgtgtgggctctgaagtgcatgtcaggtagatttccattttaatcctgtgtcaatttccattttaatcataggatgttgccatactgcaatttcatacc

SEQ ID NO: 1884177 - DNA, 4001 bp, Homo sapiens
atctgggtgtggtgccacatgcctgtaatcctagcactttgggaggctgaggtgggaggatcgcttgagcccaggagtttgagaccagcatgggcaacaccgcaagatcccatctctacaaaaaatacaaaaattagcagggcatagtggcatatgcctgtggtcgcaggtactcaggagactgagacgggaggatcacctgagcctgggaggtcgaggctgccactcactgaggcagtgagtcatgactgtgccacagcactccagcctgggtgacagagttagaccctgtctcagaaaaaaaaaaaaagattaaacataacttaaagttcaaaggttagatgtaatcagctataatgtcacatatcaccaacattcttgctctgaattttgtgcttacaatttgaaaaagagaataagatattcaaactatatttcatgatctacagttatgaaaatgtaaatgtttaaaaaaaaactactgcctttcaggcgatcacatactttttttcccctcgtcatacatttctaatgagctctgaaatatttttaaaagacagctgatcctctctgacagcaaattctcattttatttgcttttgaggtggacttgtgaacatggcagtgagtgagtggctcaggggctgttgaatttggtgaatcctttaaagaagttacatcttctggaaagtcaaacagtacagcattattatgaatatgtccatcagtgcagctgtttaagaggcccagaaaccaatggttttcttttgtcatgaaaagctgcagccatgatatttttttgaaatgacagaaatatttgtcagagcagtggcagttggtatgtggcattattgagtcttaatctgtgcgctagcaacggaatgtgttcgcttctttgttataaccaatttataataatcctagctgactcttccgtggagcttcccttgagccaggccgattgaagcagttcggaactgctgactcatttaatcctcacagcaggagagtagaagctgttcggtagctgcgtccttattcccattttgtagattaaagaattgaggcatagagcgactaagaatttgcagaaggtcacatcattagatggcggggtcaggctttgaacccaggctgtgttcgattcattttgctgcctctcatcaagtgagtccaataacctgacatcttattaaaaggaagaaacgattcctgttccctttggtttcatcctaccctgagccttctacttgattttctggctcttctggtttggactacgagtttgtaattgctttccttaatgcaggtgaagaacttttcccagatctttgcggtgttgaattgcaaaacaatacaacgtatacatccacgcacacttaaaacaaaacgagccatattcatttattaatcaagagaggctcgactcgggcctaaaatgaccagtcgctctgcaaggacaggtattaaaaagcgcggggtctgggagccggtgagagaaggctctttctcatccaggatccgaggacttcccgcggacacgagggagaagcgtcctctcggaagaggcccgtgggagcgggcgcggtgcaaccctcggcccctctgggacgcaggtctccgggttccccgcggatctcccggcccttgggcctgggtgcgtcgctgcgcgcagcagagacggcctccgccctggggctgggtgccgctgtcccgggtttcactggctggaggaggagggagggcgcaccctggccccgcactccccgcgacatttgggtgccagggacgtcagtcagcctgggatgagggtgcccccggctggggaagagaagagggagggaagggagtacgcgggtttgagcactctccccaccggtgtttgtcacctcccccgcctggatccctccctccccagccgccgcccacctgggctccccggcctgcagcggcggtggcgcgaggctcactccccaggccgcacagtcgcacccacggcggtctgcggagctttccgggtctctgcccgccccctcccccgctgcgccctccctcccagggtgcccgacgtgcacgttccctgccacttcggtccgggcgcgccggtgggtttggcctgcgcggcggcggcggcgaggcgggggagcgagtgagcgcgaggggcgggcgcgagtgactgtgtgagtcacccgtacctggagtgcgagcgacgcagagccagcggcgcggagccggagccggagccgagacccagcgcctgcgagcccgagagcgcggccggccccaggcgccaggccccgtcgccctccccgtgcactcacccgtggcccggcgccgactccctacccggcgcccgccgcccgcagccctcccgcctgccaggaggcggtgcggggctcgccgggggatgtcacagcggctcctgggagccagcagccgccgccgccgccgcccccgggaaccgcgatcatgaacccccagtgcgcccgttgcggaaaagtcgtgtatcccaccgagaaagtcaactgcctggataaggtgagcgagggggcgccgggccagcctggacctgccgggcgaggggctgcacctgcttcgagaagttttggcacctgggatggaaagcaatgagtgggtcggtgcgtgtgcgtgtgccttggcacggggggagggcgcgcgaacgaagacgccagcgggagtgtcagagaccacgcttggcgattgtgatgttggaaccgggaagggcttttgtcgcggtgcggggcggtgcgacatcggcagagcctctgcggagggcgcacggcggtgcgcagccccggaccccggagggaccaggctgggcacccaggggggcacttcggcgagccgcgccccctccacctccactcgtgttccacaatacccccgccccccgccccacagatccgcccgcgatcccacctcaccgcccacccgcagcgcctcctgtgaccgcggcgagggggagaggcaaatagtaattaatatgtcatggggcggccgctgccgcattgctaagaataatccctgctggagagctccggctcagcgcggcaagccggacccacgggtgtctaatccaccgggtggggaattccaggggaagtagttctgtagccgggcccctccagccctgccccctgcccttcccgggcagggacggagatgaacagcccgggagagagacacccaggagcgatccggagtgactgacagttgaaaccagccaggggcgttctggggaaatttgcgtctgaagatacaaatgcttccttagaacaagctgccatcctgacagtcatcccgggcagagtccgaggtccagcattttagtggaagctggtcaggtgtaggggtacttacatagctctcgtgcagccccctcagcttgcctgacttcgggtgaacacatatttattgagatcctacaaaccctgcatttagacactttgaactggattccttttggtttcgaagccactctctgggccccgtttcttcattaaccgagctcagaaatcgtttctggctgctcaaagaagtgctgtttcgacagaaccttgacagttcgtccatggtgcgtctgtgtattgcggtgggttttcctttaagactccattttcagagctgcctgctttatttacttagctgaaagtaggtaaacacatccccagttccctacactctttttgttgtaatattttcagctacagggactgtgatgcactaaaaagccttccttctgtgcccatcctggtgagaactggcattgtactgtatttttaaatgttttttttttttttccagtattggcataaaggatgtttccattgtgaggtctgcaagatggcactcaacatgaacaactacaaaggctatgaaaagaagccctattgtaatgcgtaagtattgtcaacacgctgtccaggtgtggcacagcctcagagcttgagagccagtggacctgcctgttttgaagaact

SEQ ID NO: 1884178 - DNA, 4001 bp, Homo sapiens; identical to SEQ ID NO: 913889

SEQ ID NO: 1884179 - DNA, 4001 bp, Homo sapiens
ggaatcctaactagaaggcccctggtgctggggaaattagggtaggagatgctgcattgtttactatgaaaattccagtcactgctcttttagcagtcatgctagtacattagccaaggctgtttataaaggtatagtaaactttcacttctgcaaggtcagtgagactctcatttgcaaaagatcatcttgttgccaagaacaaatcaccacctagtgaaacatttagctcagccatgaaagtgaaaccagatgacgaatgaactagtgtccacacagaccctaggtgtctctgggcagtaggagctattgaaagttttagatttgctttttggaaagatcgtgctggctaccctgtggaggatggagttaagagggacaagttggaagaccacttatgaaggaagtgaagttgtctaggggagggatgctgaagcctgaactacagatgtggtccaagagaggaaggaacacgtttgaaacatatttaagaggtgtgctttggccgagtgcggtggctcatgcctgtaatcccagcactttgggaggccaaggcaggtggatcacttgagtccaggagtttgagaccagcctgagcaacattgcaaaacaccatttctacaaaaatataaaaaattagccgagtgtggtggtgtgcgcctgtagtcccagctacttgggaggctgaggtgggaggatcatttgagcctgggaggtgaaggttgcagtgagctgagactgcacgactgcactccagcctgggtgatagagtgagaccccatctcaaaaaaaaaaaaaaaaagaaaagaaaaaaataaaaggttgtgtttggcagcactgataactgaatgatgcaggcggtgagagtgagggaataatccaagattattcctggtgccaggttttcaggtgactgggagaatggtgatcccatcaggaccccaagcagaaggcgggggttggagggaaagatgataggttgagttttggccagggtgtgtcagaagagccctgagatatcctgggggagacgctgggttggcaactccatgtgtgagcttgaatctcagaagagagatcagggccacaatgagttgtcagcagtgggtgtcacttaaaccatgagagtggttgaaatatcacagggtggacagaatgaaaccatgaagaaggtgtgggagaggtacaaggagaatcaggaaaggtcagagggccagagaggccaagggagcagagtttagaggtatgatatggcacagtgcagtggttctctaagggcctacgaattgcctggagagcttggaaaaatgtagattcctcctcaggggacctggaataaccagtacgattctggaagaaagaaaaacctggaggacttacacttcctgatttatttactttcctttctcctttctcctttcttccttcctccctccctccctccctctcttccttccttccttccttctttggaagaaaaacctggaatacttacacttcctgatttatttcctttccttttcctccctccctcccttcctttcttccttccttccctccatccttcctccctccctccctcccttttcttttttcttttttgagacagggtcctactctgtcacccaggctggagtacagtggcgtgatctcgtcttactgcagcctccacctcctgggctcaagggatcctcccacctcagcctcctgagtagctgggactaccagcatgtgctaccacgctcagttgatttttaaactttttgtagagatgaggtctcactatattgctgaggctggtcttgaactcctaggctcaagcgatcctcctgccttggcctcccaaagtgttgggattacaggtgtgagtcaccattgtgtgacctgccctataccattactcaccttcttcaaacttctaataataaacaagaaatacctactgtttaatgacctcctactgtgtaccaggccctgagccccaagacccacagctctgacctcatttactcaacacaatggctttgtgagctaggagctaggtgggtcagcctgaggggctggtttccgtagtgagtcctctcctgcccacatctggcctttgcctgagctggccccaaatttcatctcctctgtgtctcctctgagttgataggactggaagcccctggctgtctgtaatcaagtccacaaaggttcatgagtcaaatcagaagtcaatgtactgtttcccaaagagaaattttctgtcagatggacttcctggcaccttctcccctgcagcagctctttgagtgctgggtgaacttgctctaggcctggcaagttgagaacacagtctgagagttcaatgcctatgggctctgagccttgcccaggccacttcaccaacagggaaatgcctgccaggaggacccaacacttgggcctggcaggccaccatctccctggctctgctcccgtgggcctcaccgcagtgtgcctcagtgacatccccttttcaccgatctttggcatccaatgaacacatcttttcttcacctccagccaggtatcctttatgtctcttgagggtaactttgcatgccctgatccatgaacagtcaatttcctagactgaaatttgggaaagcttattgccaagagccatggactgggagtaccttattttgcccctttctccacttactgcccacacagtttcaggaaggaagcagtgggttaagtaaatgatgacgtctattcacaggaataccttgcagctttacacattaatgaggtaccatgatttaaaaaaaaagtctactatattattaaaagagcaaattgtgtaatatgtatagtatgggcctgtttgcatttagagtgctacatttttccttccccctcttcctctcccttcccttccctccctctctctccctcttttctttcattcctttctttcaaccagtatttagtcaatgcctactgtgtgccaggcactgttctaagtactaggatacagcagggaacaagtcctctgtctcatggaattatattcttatgaagagagacagatttttaaaacccaaaaacatgacatatggatgtcagatgatgaaaaatgccctggagagaaagaaaccatgagtgaggcagatacagggattatgagttggggggtctggggaacagcactttgaataggttgggccagagaagacctgatggcatttgcaggaggtgagggagtgagcagtgcaggtatcttggggaacaactctattctgtggttccataccttgatatctacctgtgcatctagttatcactcagacatatttactttgtttgtttgtacacacacagaccaaggctgagtggatacccacccaactgttaccaggggctacctctggagaattggctggggttgagtagtgttggggaacgggatgcttttactccacacaaatcagtactgttatatttatttatttttaacaataagcacatattgcttttacagtttaaacttttataggcgcagtgtctcatgcctataatcccagcactttgggaggctgaggcgggtggatcgcttgaggttagaagttcaaaatcagcctgggcaacatggtgaaaccctgtctctactaaaaacacaaaaaaattagctgggcatggtggcgggtgcctgtaatcccagctactcgggaggctaaggcaggagaattgcttgaacctggaagatggaggttgcagtgagccgagatcgtgccatcacactccagcctaggcaacagagcaagactctgtctcaaaaaaaagaaagaaagaaagaaagaaaaaaacacttttttaaaaaatgaacttttatagccctgtcccctcccaaaagagagtatggtcagcagagtcgtcttgctgctttgaccagtggtatcaaggaataaatgagataattgatacgtgattgccagtggttgtgcctatgtctagaaaaggttaaattttgt

SEQ ID NO: 1884180 - DNA, 4001 bp, Homo sapiens
agtaaaagtgtgtaaacaattaaaattagataatgcagtaagagaagtgattggagactaagtggaggtataaattttgtcagtattacagtgaatggtcagtagataataaagaaatgtaggattataaatattatattggccaggcacagtggctcatgcctgtaatcccaggactttgggaggccgaggagggtggatcacctaaggtcaggagttcgagaccagcctggccaatatggtgaaaccccgtctctactaaaaatacaaaaattagccaggcatggtggcaggtgcccgtaatcccatctgttcgggaggctgaggcaggagaatcacttgaacctaggaaggttcaagtgaggttgcagtgagccatgattgtgccattgcactccaggctgggtgacaagagcgagactccgtctcaaaaaaataagaaataaaaaaatatcacattgtatttaaaaggtaacaaaaaaggtaatagaaaaacatgagaccttcagattattaatagtaacacaaacaggcacaaaaagaacaaagtgaaatattgaaaaaaaaaacctagtattatcatgaggcatactgaaacacaatataactaattctgaaaatatctaccatattaataaacgcattatttatcaaattttaataagaaagttatttccacaagaaatcaataggaatggatatctgtgcatcacataacatagactcacattccataatggaaaatctacagaaatttcagggcaaaagagaagaaaacatattagttgcaggagacataattcagtgtgtgaaaactgtcagtaaaaattagtaagcaaatagaagaccactaaaacatgattgatttcaaaatgttacatatcattgtgtttttctccattaaagatatgtcttcataaattctctaaaatttttagttaaacagttttctcttaaattggattaatagtttctgaattaagaacatttaaaaaatatctttaagaaactgctttcaactttatctttcaagtttttggctactcacacttagtcttcactgactcctacatgaactgaaactctaagcataggactaagagcaagtattataaatttgaaggcccatttgcaaattactatggtaggtctctcagttttgcaaagaatcagatgttcagttggctgggaggatatagaaaggaaaaatagagtcccttctctcaaaacccccaagtccagcagggaaaacacaccttatatatcataataaatagaatatgcaagataagctccagtgtatgcagggggaaagggactttggtggaagcagctaaaaggatcttgtaaaaatataaattaacgtcttatgatgcaagaatccagcctgttttaacatggattggatgacttgcttatcagagacttggaacaaaaaatagtggatatggatcacaagttttctgtgatctttggaggaagaatatgacaaaatcctgtatgttgtccttgggataccctcctgacatccccactccctctgtgttgcttgtgcttacagtagagatggctcttctcctaacaggtgctcctcaaattccagatctcattttgctgtcttctctcaggtacctcagacttctgaccgtttttctggttactaatacagactttcattgtttttctcttttgctgcatctataaatattatgatttgtcagaaattttgttttgtatacatttatgagacaatcggccagatggggctacaagaggagacacaggagagactcgagaaaataaagtattttctactcacaggtcctagagacaggaggcatgccatacatggcaacatggggaagaccagagtggtcaggaggcagaaacaggagcaaggtaagttgtaaggcatggcctttgttggggtttctgagagaagggtaaggcaggataggatgaacagtttaggactactttgaataatttctccagaatttgggaaacaggagtgttctctagttgcctggtacctggccctgggttgcttaagacagaagaatattgtttccagggtatgtgggcaaggtagaggaaatgtggctctgggttggttagtttgcgtgcttcaggctggtccctttcctatcttaagtattggcggctgttcgcagtggctcacgcctgtaatcccagcacttcgggaggccgaggcaggcggatcacgaggtcaggagatcaagaccatcctggctaacacggtgaaactccgtctctactaaaaatacaaaaaaattagccgggcatggtggtaggcacctgtagtcccagctaatggggaggctgaagcaggagaatggtgtgtacccgggaggcggagcttgcagtgacccaagatggcgccactgcactccagcctgggcgacagagcgagactccatctcaaaaacaaaacaaaacaaaacaaaaaaagaattggctagcctcaagcaaaggtgatctcttccccagttagaaagattttctaagatatcaaaacatcacaaggtacagaaaatttaaatatacatttatctacaatacagccttgttctgggccttcttttccctcactttctttctatcatgactttcaatccagtagcctaaaatgccatctatcttctaatgacttgcctgagattcactcttgtgtatctaactgcctctttgccccatgaattttcagatatgtccaaaacatacctcttggttctcctccccactcttgcttctccctcagtcttccctttcaagataaatggcaccatcagccaaccaggaggtcaaaccagaaaccattggcttctttaattccattactcttcccttcctatcccacaagcacctacttacacccacatttaagaaccttttaaccatctactcatccacaaaacttagttcttccttcaacagaaatctcaaattcagcaacttccctacacttctgctgccactgccactatcaccctgcaccaagcaagccgctttcatcttaccccttttctgtcacagtatccccccatcatattctccacatttatactcctagctgctctacaaaccatttttgattaatattggtaaaacaaacgacaatcactccccggctcaaaaccattctcattgatttctagctgtattcaggatgaaacatgcaaaccttaccagggtccaaatgccttcctagcataacctgttcacttctctggtttttccaacataatttttttcactcttctttctcccccaactcactacgctccaataccaatggtcttttatcagtttctggaacgtgttcctggtcttgatttaaaggaaatgtaattaaataaagatctccatagaaacactgtctctgtctactctgtctaaattattcccttcctatggtattttccatttcagcagtttgtctgtttccttcaaagcagctgatcacagttgcgattacatttacttgtgaccttattttgtgttttgtcatctggacgttatgttccaggagagtagggataatatgaatggttttctcaccatcagatctccagttcaatcacagagtaataacattataggcaatcaagggtagacacatgcaggacatacccaataaataattgttgaatgaatgatttaagttcaatttgttacaatattttattcaaaatagagcaatcattattaacaaaacatgaaagagaaaaatgagagagagctacagcagggacagcatcgtaaaagttaactgggatttgggcttctattagtggcttcagctcactaagatctttataccaagtcaagtcaggagaggctggagagagagctgagaaggctggctgacaaggctgtctacactccaccttacctgccatggttgtgaccatgctatgcagcgggtctccactgataactttcttccttcagccgtgcttgccttgttactgtgtaat

SEQ ID NO: 1884181 - DNA, 4001 bp, Homo sapiens; identical to SEQ ID NO: 913912

SEQ ID NO: 1884182 - DNA, 4001 bp, Homo sapiens; identical to SEQ ID NO: 913916

SEQ ID NO: 1884183 - DNA, 4001 bp, Homo sapiens
ctgaagaaattctctccctcaaggtcacacctccttccagggacagccatatctaatgattgatcaacatggggtataaaggcttggccccatcactccaattcagggaagctagaagggacttcccagctccagagttccagatggagttggctgaggcttccattgggcctgcattccagctcaactgctcactttgctcaatcctgctttcttctccttctttccccaggtgttgatcccaagaccactccctagtaaacatcttgtaatctaatctcccttttggagtctgcttcccagggagcctgacctgcaacataagagtaccttccttatagggtgatccttaggaatcaataagtcaccatacataaagcatgtgaaagggtgcttgcacatagtaagtggaatgtgtcagctattattattgaagcaatcctcttatgaagctatcaactcctgcaattgtctttatttttccctcagtcataaaaggcttgttatagtggtttgagttaattttccatatgttgcaaataaatttaactggctttaggtgatgagaaacggaagaagaaaacaggtttctgacatatttgttgctattggaatccccacattcttgtcagagaggctgtctctgtgtttgcaacctgactataagcatcttctctgtttgcatattgtgtttttcttttaattgagaaaaggtaggtgtgaattattgtattttcattaggcttggattacatacatgtcccgataaaggcacctgcatgacaagaatctgcatttgtagggtcttctcctgagatgagaagaaatcagtatcttcagcttagtttattctgttcagacagaaagagttctgataaccagagggctggatctaagctcattttgtcactgcattttttttttttttttggtctggttcataagcacttgatccttgtggaccaaaatagagattgaacttttcccataaaactgaagctctaaaaaaacaaaaaggaaaagccagagagctcccatactcaaaaggaaggaatacaagaccacataaagctaaatttaaaaaataaatgttaactcaaaagtcagattatacattagattatgccacattaaaacatcaggagaaagaagaattgacaaatgcaaactggctgaaaagtagaggctatggttgttaaggaagatgtcattgtttttcttacaattctccaaagagcagtagctgtgtaagttagtttaaaccatgtatacaatatatacagcatatgagtatattcttcttctaacaggaaagccaaaaattctgtgatcccatttccccgtatttgtctattattattccttaatacaaagccttcacacagcacagttttggaagtaatcaccaaagaggtgaccctccctgtcctgtttagtgggagttatgtgctgtttgcctcttatccactcttgatcatttgaaggcctttggctcacatgagactccaagctactatccctggcaatcaggatacatatcctcacatcagtgggcacctcgtttctcagccacaagttgaataaattgggagaggctggcataaagctcaagtttatcattaatgtccacccatttcactttcttggcatcatcgccagcttccagaggaagatggtccattatttcatcacggtagttcacagcctctgtctctatccagcagttatctgtgtttctagaatcatccacgtagcctttatagacctcaaaatgttcctgactgaggagtttgtgcaattgtctctccaactcctgcatttctttcctagatttctgtaaagagttcatggcttcctcgccaaattctctcttcaatgtagcactaattttctctcctggatccaccataccccctgggattgcctattctccacagtccttccttttgatggctacaaattgcaggatattttttccagaaatagggtggataatttcgtttcccttgctatcccttttccatctggttaagatggaatctacagcatgattggggccccaacaccccaaaggcccttggccaaccagtcctgtccgaggtgcaggatttctaagtctacccttctcaatctcatataagccatgctggttccttctctccacatgcccatccttttcgttaaacttaggagagaagttcctttcacccacttgagggtctgcccacacgggcccaggcaagacagagctggcaatgtactccacgggcgttactctcgccactcgaccagccagctcattttctcatggggaaccaggcttcgctccaccttggagccagggtacggagatgtccgggccttctcgtggggcttctcagcagtgcgcttcgaacctgacgtgatgaagtttagagaaaacctatgtgaggaaaacaggctccagctggccaggatgttggggcagctgccgggcctgcctgtcacagaggccaaggtcatgaagggagacacggtcgcctgtcacagaggccaaggtcatgaagggagacacggtcgctaaagccttggacaggcggcgtccagccatgcaagcaagacccagcggcccgaggggatttcggttgctctctgcgtgggggcgcagtctccactgcagatcagcacccgcccgcggggaggtggccacgtttctctcctgaacaccagttgatggcccgccttcctaaaaggccgtgtggcgtctccagtggctacaacggggcgcgccaatggctcgtgcgtggaggtaacggtgccgcggggttgccaggggcgtaccacgaccgggccgcgcactctcgctgccgccctggcgttttggttgtaaattgagagattttgacctctggaaaagctcccaaatggaaagtgctggggttgaggacatcttcctaacgacaataaaattagcaaaggagaaccaccaaagtgccattagcccactagccatttaccagtaaatttagttcacaaggtttaggatgctttctgttagggagagggcagaatgaacgtggggttaggagtggacaaaactccctgtttgggatgctcagaagccgagtgggggtggcctaaaaaaacaagggggactcacctggtacactgagcgtggtgctgatgagaactccatgagagggtgtgatgagcggagtatgtgttcaaaacgtgggtctatcatttactacctgaatggttttggcaagttccttaatctctcttttcctaggagtatttgctacagaatgccaagtactgtgccaagcacaaaagagtgaactgaaggctggaccacgggccctttgcttttaaaatgattctgctcggagaggcagcacatttttattaatatatatatatatatacacacacacacatatatacatatacacatatatatacacacatatatatatgtgtgtgtgtatatatatatatatatatatatagagagagagagagagagagagagagagaattagcactgaaagggcaatgccaggtatcaggtaaaagtcgaacacaggttaaaaacccagctctaattcctccacatgccactttcttgggggaagttacataagctctcttcaggttcctcatgtgtaaaatgaaaatattaataactacctcatagggctgtggtgacaattaagtaggatgttataacacatgttagctcaacgtctggtccacagcataaactcaataaatattagttgtcatcactgtaattatcgttaacttttttgattctgcaccttgaaaactgtagattagaacaggacagctgagatgattatgggaactgagcagctcacatatgaggtcagaattaaacagcttatggttagagaaaatcaggatgagaaataacagaaattcaggctgagaaataacagcatctgtcctgaaatgataaataatgagaagaggcacggtcttagacattactcaga

SEQ ID NO: 1884184 - DNA, 4001 bp, Homo sapiens
ggtatttagccattttaattttaccagttctcttggatatgtaatgacatctcactgaggtttttattttcattttttctgatgaccaactatgtcatcaggagtgaaatcactgagtcataaagtcattgcctgttaaactgtttgtttgctttttaaagaaagtatcaaattgttagagaatggctttgttattttacattcccatcaaccgtgcagcagttaagtagtttctttgcagccttgctagcactcagtgttgtcattattttttattgtaactattccattgggtatatattgaaatcccattggggttttaatttttcattccctaatggctaatgatgttgacgtcttttcatgctctgattttccaaacatatattcttttcagtgaaatgtatattcatgtcttttgcccactttctaatttgactttgttcactcttaagttttgaaagttctttatatattcttgctactagtctttttcagacacatggcaagcaaaaggggaaggaaggagcacctttttactgtcaagttgagatgaaggtcaaggttccccattaggcctcctttgccacacaaaaagtaaatactctgtgtttttaagataaagtaatggatgccaagaaagactcaaattttttttatgtactaatcataaaaatgaactatgatttataattcttctcgtccattttcattatacataagttaagaaaacaaaatacatcatactcaataataagaattctgagtagaaactcaccagttcaccttagctatattttcccttttgggtttcttttacttttttttctctctctcctttttctttaaaaattttggagtgtgcagagggataagggtgagggagcgtggcaaggagaggagttcagatcaggacagggaatggaggagggcaaggagtgaagggcacaacccacagcctgggaaagagaggcatgaaacccagcgtgtcaggtggacggatcatggaatggggggccagcggaggttaaggaaggagggcccaaaggtaggggtgggaaaaagagaagaggaggaggaggaagtgcgcgtgtgaagagtgttaagaaaacgacaggacagagcggggaggggaaaagcgggccgagggacagggtgaaaggtgagaaaggagggtatgaggaaagagggtccggggcgctggggatttggggagacgatggagcgacgggtagagcagcttgggccgagccgcgggggtggaatccagacgccgggcgggggagggggcggcggggcggcgggacggtgggtgggggccaccaggcggcgccggagaccaccaaacattacagcgagcgagcctgcttcctggagggagtgcagacaaggaccaggagcgggagccgagcctcgcggcccggggcacggcgccgcccgcccctccccggcagtgcctcccgaccccctgccctccgctgggacatggcctgaggccccgcccgccgcccgggacccctcccccacgctgcccccggaccctcgccccaggaccgcggggtctcttcccggccccgccgcccgccccggcgagaacaggcccggcgggcaaggcggcggcggaccgagggaggcctggcccggcagcggggagaagggtgcggcgcagcccgagtttcccaccttttctcctggcccagacgcggctggggcggacgggatctctcgcgctctgcctcctcctcttgcttcatggagccatgcgcctgggtggaggctcccgagagaagctggcctgcgggcgggccggacgagctgcgcggacggggcggggcgaaggaggccggcaggcggaggaggaagcggcggggcggaggcggcggcggccgggaagaactagaggtattccccgggcggctggaggactgagtcgagccgggacccgagtcctccggtatcccagcagccaccggaggcagtgagataatggaggaagaatgtagggagacctccagtggaccgcactccttctagcgagccgcggaaaccatagagatcagggctcagccggagggccggcccactgctgtcacgtggcctccatccgtgcgctttattggctggtgctggctttacggggttgaattttggacgctgcctgccattcgtgggaccgagtttcaggcagctggaataaagagagacatcgggggaaagccgcgagaaggccagcgtccctggctgggagcagagctagccgagtagggcgcccggctgtcaaactggccggcgcagtgcacgctgggccgccccggagcggtcgcagagcccgtcgggagtcgtagtccgggacgggcccgcggcattgtccgcgacgcagctcgggatccgggtcggggtgtcggccgggttgctgccgggcaccgtcgagcgttagccacccagcattgagctgccagcggctgttctccctaagcaccctcgctcacgtcgcctcgcctcgcctcgcctgaccggccgcagccttggataccagccttaaatcgagccgactacggcccagccccgcccgcggcgaggtgcgcggggttcggtgccagccgctcgcccctggcggggccagcctcttgatgcaccggggacgggcgcccccatccgactcttcgaggggcggcagggccccatctgtgtctttcgctctcgagcccccagctagagttggcttcagcggaatacctactgtgcgggattattcaacaagccgattgatcacattcttcagctctagcagtgcaaaggcttcactgaaaaagaacattacaaattttttttgaaagaaatttgggggtaaatttaattttaaatactgatttttgataacatttgatcttatgacagcatttgtatttttaattacagataggattacactaaaagtcatttctgacctgctcccttacccttatggctaaaataaactgctaggccctgaagcaaaggcgagccatgttctagagcaatgtctttcttgtattaaaatacggccccatgctcacaaaaaaaaaaaaaaaaaattttggagtgtaaacatatacatcatcttaatttgagtccttatgtgttgacggtgtgcagggaagaatgggaaagtaactgtaagtggagctcagaaagaactaacaaattcatgaaaaagtgacattattgctggtctatttttttttttaaattttctgcttcctcacactctcccatactaaatgaattatttagtgggtttttttttttgttttttttttttttgtgatacggagttttgctattgttgcccaggctggcacgatcttggctcaccgcaacctccgcctcccaagttcaagtgattctcctacctcagcctcccaagtagctgggattacaggcatgcacccccgcgcccggctaattttttctgtttttattagagacggggtttctccatggtggtcaggctggtctcaaactcccgaccttaggtgatacgcccacctcggcctcccaaagtgctgggattacaggcgtgagccaccgtgcccggccgacaggtgttttttatgagttacagactatgtgctttcagaatgaggcaaccgatttaaggatgtaagcataatttaaggatattgaaaatgatataggaataaattttgtttagtcattcatggatttattcattttcagatgactatgtgtgtgaatatttaagaattctaaaaccgcatgggattacttataactatataggagcctaacacgataatggaatcagaatatactttgctgaagggaggaggcttttaactgaaagtcttctctctacgtttttatgtctctaacaggaatccactgaagacctacatttcccggaaggttaacagcccccttctcagttttcctggtaaagtgtttttatattggtagaataccttctgtcacactctatatttttcttatctcaagta

SEQ ID NO: 1884185 - DNA, 4001 bp, Homo sapiens
attactctgctgtaaatgcccaggagtgaaatcactgagtcataaagtcattgcctgttaaactgtttgtttgctttttaaagaaagtatcaaattgttagagaatggctttgttattttacattcccatcaaccatgcaccagttatgtagtttctttgcagccttgctagcactcagtgttgtcattattttttattgtaactattccattgggtatatattgaaatcccattggggttttaatttttcattccctaatggctaatgatgttgacgtcttttcatgctctgattttccaaacatatattcttttcagtgaaatgtatattcatgtcttttgcccactttctaatttgactttgttcactcttaagttttgaaagttctttatatattcttgctactagtctttttcagacacatggcaagcaaaaggggaaggaaggagcacctttttactgtcaagttgagatgaaggtcaaggttccccattaggcctcctttgccacacaaaaagtaaatactctgtgtttttaagataaagtgatggatgccaagaaagactcaaatttttttatgtactaatcataaaaatgaactatgatttataattcttctcttccattttcattatacataagaaaacaaaatacatcattctcaataataagaattctgagtgaaactcaccagttcaccttagctatattttcccttttgggtttcttttcttttacttttttttctctctctcctttttctttaaaaattttggagtgtgcagagggataagggtgagggagcgtggcaaggagaggagttcagatcaggacagggaatggaggagggcaaggagtgaagggcacaacccacagcctgggaaagagaggcatgaaacccagcgtgtcaggtggacggatcatggaatggggggccagcggaggttaaggaaggagggcccaaaggtaggggtgggaaaaagagaagaggaggaggaggaagtgcgcgtgtgaagagtgttaagaaaacgacaggacagagcggggaggggaaaagcgggccgagggacagggtgaaaggtgagaaacgagggtaagaggaaagagggcccggggcgctggggagttggggagacgatggagcgacaggtagagcagcttgggccgagccgcgggggtggaatccagacgccgggcgggggagggggcggcggggcggcgggacggtgggtgggggccaccaggcggcgccggagaccaccaaacattacagcgagcgagcctgcttcctggagggagtgcagacaaggaccaggagcgggagccgagcctcgcggcccggggcacggcgccgcctgcccctccccggcagtgcctcccgaccccctgccctccgctgggacatggcctgaggccccgcccgccgcccgggacccctcccccacgctgcccccggaccctcgccccaggaccgcggggtctcttcccggccccgccgcccgccccggcgagaacaggcccggcgggcaaggcggcggcggaccgagggaggcctggcccggcagcggggagaagggtgcggcgcagcccgagtttcccaccttttatcctggcccagacgcggctggggcggacgggacctctcgcgctctgcctcctcctcttgcttcatggagccatgcgcctgggtgggggctcccgagagaagctggcctgcgggcgggccggacgcgctgcgcggacgggacggggcgaaggaggccggcaggcggaggaggaagcggcggggcggcggcggcggcggcggccgggaagaactagaggtattccccgggcggctggaggactgagtcgagccgggacccgagtcctccggtatcccagcagccaccggaggcagtgaggtaatggaggaagaatgtagggagtcctccggtggaccacactccttctagcgagccgcggaaaccatagagatcagggctcagccggagggccggcccactgctgtcacgtggcctccatccgtgcgctttattggctggtgctggctttacggggttgaattttggacgctgcctgccattcgtgggaccgagtttcaggcagctggaataaagagagatatcgggggaaagccgcgagaaggccagcgtccctcgctgggagcagagctagccgagtagggcgcccggctgtcaaactggccggcgcagtgcacgctgggccgccccggagcgatcgcagagcccgtcgggagtcgtagtcccggacgggcccgcggcatcgtccgcgacgcagctcgggatccgggtcggggtgtcggccgggttgctgccgggcaccgtcgagcgttagccacccagcattgagctgccagcggctgttctccctaagcaccctcgctcacgtcgcctcgcctcgcctgaccggccgcagccttggataccagccttaaatcgagccgactacggcccagccccgcccgcggcgaggtgcgcggggttcggtgcgagcccctcgcccctggccgggccagcctcttgatgcaccggggacgggcgcgcccatccgactcttcgaggggcggcagggccccatctgtgtctttcgctctcgagcccccagctagagttggcttcagcggaatacctactgtgcgggattattcaacaagccgattgatcacattcttcagctctagcagtgcaaaggcttcactgaaaaagaacattacaacttttttgaaagaaatttgggggtaaatttaattttaaatactgatttttgataacatttgatcttatgacagcatttgtatttttaattacagataggattacactaaaagtcatttctgacctgctcccttacccttatggctaaaataaactgctaggccctgaagcaaaggcgagccatgttctagagcaatgtctttcttgtattaaaatacagccccatgctcacaaaaaaaaaaaaaaaaaattttggagtgtaaacatatacatcatcttaatttgagtccttatgtgttgacggtgtgcagggaagaatgggaaagtaactgtaagtggagcccagaaagaactaacaaattcatgaaaaagtgacattattgctggtctattttttttttaattttctgcttcctcacactctcccatactaaatgaattatttagtggttttttttttgtttttttttttttgtttttttttgtgatacggagttttgctattgttgcccaggctggcacgatcttggctcaccgcaacctccgcctcccaagttcaagtgattctcctacctcagcctcccaagtagctgggattacaggcatgcaccaccgcgcccggctaattttttgtgtttttattagagacggggtttctccatggtggtcaggctggtcgcaaactcccgaccttaggtgatacgcccacctcggcctcccaaagtgctgggattacaggcgtgagccaccgtgcccggccgacaggtgttttttatgagttacagactatgtgctttcagaatgaggcaactgatttaaggatgtaagcataatttaaggatattgaaaatgatataggaataaatttgtttagtcattcatggatttattcattttcagatgactatgtgtgtgaatatttaagaattctaaaaccgcatgggattacttataactgtataggagcctaacacgataatggaatcagaatatactttgctgaaggtatgaggcttttaactgaaagtcttctctctacgtttttatgtctgtaacaagaatccactgaagacctacatttcccggaaggttaacagcccccttctcagttttcctggtaaagtgtttttatattggtagaataccttctgtcacactctatatttttcttatctcaagtagaaaaaatttttgcccttttgcttgggactgttaacagccctggtagtggaaaagtagaaggaaatgattctgtgaattt

SEQ ID NO: 1884186 - DNA, 4001 bp, Homo sapiens
gcatagccagcaaaagccacacacgattagaacacagccagcaaatggcgagcagcagagctaacaggggaggtgtctagggattttcacagctgctggtcatgttacaataggtagtgggacaaggagcccatccctggcccttctcctttgagctcccaatgactgaacatagtgaccaaccaaaaaccaggggttcttgggccatgggccgggtgaggcaaagttgtctggaactcatccctgttcaataggacctcatgcagtctctagtcaaggggaataagggatacagcacatgcacctcatcattcaggacacgtatcctaacttgaataataataataagagaaccatcttcctattcgtgcgctactctccttcctctactgaaaaggaaaccagcctttccagacccttccactgagaaccagcaagaatccacacctgccccccgttcatgaggtagtataaatggaataggagcaaattcttcatctccacagtaacacaaagtgcagaggacaggccatgagctagcagacaagaggaagtgggtctgaagacctgagcttccacaaaagggcaaacaattcagaacaactcaggaaacccaggccctgtgttgcctgaacttcctcatctgcccccacccctgttaaatcaaagccaacagctacctgaactgatggagaagccatctctagggagagagctgaggggctctgggctgtggcagttacagcagcccccagcctcgcccacccaggggctgtcactacatgctctgtcacagccaacccacccaacagttttctggctgagaccacttctccccactcctccctaagatctagaaaactccagtccaaatctctctgaacactatggaagggcaccttccaggtgcctgaagatatggcacagggttcaggcttgcctatcatcctcccggggccaccagcacaacatgatcccaccactccctacaaacacacaatgacgtgacctgtctccttctagaaaggatcaatccatccactctgtcctttctcctacacggtgtattcccccaggcatcttgttccacctctaaggggccgtcctccctaaacacagactcagggtgccatggccatccccaggtgtgatgtccttggggacatccagtcttccctccctcctcaacatcagccctatcaactgtccccggggcagtgtcaaatttgaattcctaaggagttgaggcatggcagactcagataatgcccccatccctacaggcttacctccatttgaagccatcccctcaggctgggcactgactaccgctgtctggcagtttccacaatgagaaaagccaagggtaagacccagagagtgacctggctcaccagatgctcctgagtccaactgaaacaggaaaatttgaaagtaaacaggttcctggaacataggaccccagacattctgcagagggggaggggcagtgggcagctgttaggggtgggggacattctgtgaagggcttcggccattaggcaagaacctgagtttcccttccaactggaaggcagcagcagagatggcgtgtgcctctttaggcaacttttaaattgtccttctgactcacagcaaaagcttctacctgatggcccctttacttccattctttatcagcagacctacttttgtgccaatcaacccatgctccttcccactttggctctttcccagtcttgacgaatttcaacagcggcctcacttcgtgaacaaagttcaaaacacattttcagtctgagaaacacaggggttcttaggaaggcaaggggactgggtgtttgaaatcaggatggtctcagccgatccagactattaggtggctgtgtgcttatcattgtttaggaagcaatccttgtacccccaggtcatgcatgttgctggaatctctgtccacaccagcaggccagccttacgtcccagcccctttgctggaaagcctcaatccaggaaagagtggctatgtgacctacagcaccgagaccagaaatcctttcattttgtttcccagcatattgtgctggtgttaaatatttatgttttatcttttgaatgattttaatttaaccaagcaatacttttcatggctccaaattcaaactgtgcacagtggaataggcaatgaccggccttcctcccatctcttttccctggccacattttctttcctggaggaaacaggtgttatctgattgtttctcatcttcactgaaacacaccctggctggcctctctcagctcactgttggcctcatcttcaccatacgttcttgctgtctggaatccagtgtcatcgcatgtggttctctgcatgggaattattgtagcctgtctttaaaaaaaacttcattctcatttccacactgagaatcactgtccgtttattagtgtcaaaatgataggaaagagcactcatgttctgtgttgtgaacaaggggagtattagaagaaactggtcaaaggagatgaggagtgagaactcagagcacagcaacaaaatcttctgagacacacaagtcactccctgctgggcagggtaattttgcacgatgggagggtgttggggaagggaagaggccttcagccagaccggtgcacactgcaaacattcactgaaacacaccctgtcggcacttacgagcatttgcccctttcgaagacatttggactcaagaaggcagagttgcaggaaaaggtaacagcggccacactgcaggggcaggggcaggggcaagtggtggattgcaagtctcaagcccagggttctcccccactgccccagttgtgtgagaaggtcatttcctaactcctgtccaatatccccatgagttctcggttttgtcccaactctgaacctgaatggtccagcaagcatttctgtgaaatgtctccacagtggccactgggaggggagtgacctccatgcagtgactgtctgtctgggtgctcccaggccttttgtcctctgagacagaactgccttcttacatgcagccctcttccactgtgcaactctctacctccatcttagctgagaagatcaacggagagcaattcaagcaaaatcatggtaaacttaccaaaacaaaacaaaccgtaaacactttggagatctttctgaggacttgatcttttaccatggggcaaacttaaatgattttcaatcaataacttcatctaagagggatgttgaagcaaaatatcatactcagatactgaagaagcgcagaatttttggttgcttcctcccttgtcaagtcagtcagctgatgctttctcaagattctcacacgtggctttgatacaggatttgaatgagtctttttctgagccagtgatacaaaaaatatattgtggaagtgtcttgtcttaattctgcaatcgcttctgtacatgtttgaagtcctagaccccaggaggagagacagtcaaattagccaagggtaatttgtgaagactggccatgggaggtggtggctaaaagtcctccggcccgctgtctgagcatccccacagaaagtcctgggccgcactgacagctgagaaagaacatctcagggcttggatcccctgttcagaggacacatgctcctccacccagtagaggaatggcggctccatgctgtgtcctgcagagctctcagtctctgcacttgaggccctgggcctgcatcaatgtgaaggctcttcagtgttatcacgtggagacagatgataggaatcctgcaaatgagcagaaaggatgtgacgattaaagtttcttctgacggtattacaaactgaagtcagtgagttccttctctactagttttttattgccaactggaattctgcactgtgttgcagagtcaggggtggggagcgtggaattgttcccttactatctgctgctttatcgactgaaattgatcaaggctacaacaaaaacatttctagaaatc

SEQ ID NO: 1884187 - DNA, 4001 bp, Homo sapiens; identical to SEQ ID NO: 913925

SEQ ID NO: 1884188 - DNA, 4001 bp, Homo sapiens; identical to SEQ ID NO: 913935

SEQ ID NO: 1884189 - DNA, 4001 bp, Homo sapiens
gattgtgccattgccctttagcctgaacaacagagcaagactctatctcaaaaaaaaagaaagactgactcataacctatgagatctatgagatggatatggatatgataagctctacttctctacttttcagctgataaaacgggctggagaaagagtgactgttgtgtctaaggcactagtaagtggccaaatatggatctgaacctagatcagtgtgatgtcctatgtactctggttattactgaaaaatgactttcgattagaattattttgagaaagccccactctaatttattatactcaagctagtatacccctctgaactagtgtagcatcaaaactagtatacattctctgccgcgcggtggctcacgctgcaatcccagcactttgggaggctgaggcgggcggattgaccagcctggccagcatggtgagaccctgtctctaactgaaaatacaataattagctgggcgtggtggcgggcacctataatcccagctactcgggaggcggaggcaggagaatcatttgaatccagaaggcggaggttgcactgagccgaaatcacgccactgcgctccagcctgcgcaacagagcgagacttggtctcaaaataaataaataaataaataaataaaaataaatacataaataaatgtaaaaaacacaaaataaaataaagtagtatacattctaaactagtagtatactctcccaatgcatgaaaacagaaacaacacctataattatcagtaattgttgttgtggatccaagtatctatgtaagaagcaaaaaacccacatcaacagttgttgtcatcgttgtcacaaacttaattactggctagaaatgtctagtgctgcagccaaacagcagtaggaggagcctttcccatggctgagtggaaggagggaaacctagactatttctgggtctgccttgagctttctctgccgccttgggcaagtgactttggccctgggtcaatgtcctggagtaagatggggctaacaccactgcactgatttgctgggacaggtggtggaaagtggtggtccagggctgggagaggagaggaagggcaatgtttcctaggagaaactgcactatgctggggcagctgcggtgctgcaaagcgcagggagtgtggcaagcggacgaacctcgtgtcttgtttccttgttttaagattggaggtggagtgggatggatggtcgatcgccagctcttccagctcttaagtgctcaagttctgcgccaacccaggggagcttgattgctttcacgtgtcttggaaacaactggcaaaaaagaatttcacatagtctggaaagggcttgggacagggaccactctttgcagacatttgtcattctttaaacataatgacatacatttattaaggactcatagtccataactaagacaaaatgagcttcagttacgttccctaactcggtccacgttcctttagaacgtctcaagcccgcatgtcactcatcgcggagtcgcagccttcccctgggttcgggcgtctgcgttaagcgccggcacatcgtggggatccccgcgtgagatttctctgcgccgtcggaatagactgttcacggattcgcgttaggattccttatgctgcagaacttcaaagaaataaatgtatcagaattgcgatgtttaagttctaatctatttaagcgggtgggtcagcagagggtcaacaggaaacttcaaggtaaatagtggcctctggaaaaggcccggtcgctcacggcttccccactgtctccccagagcagactattaattcttgcgtttcaggcagaactgccgctgccggccctgcagcagagctagggagcgggcagggcagaaacccagccgagcaagctgcaggctcgagtccccgcgggcggagaggctcgggctggagcctccggggcggtgaggaggggactcaccgcactgagcacaaactgctttccccgggagcgcctgcacccaaaaccctccagttcgaggaatgggattaaaagtgacaaagaaaggggaaggggggctccgtggagacttctggaggcgtggaaggggcgtccccgaggaggggcgacgcagccctgcagggtgctgggcgggcggggtgaagggggctggggggcgcctgggccagggctggtgggggcagacggccgcctgcccgtgctggcactggggcgaggggtcccgcgcccccggagggagggagggagggagggaaggagggaaggaggtcggcccccgagggcggtggcgggggcgcgagctgcggtcctgcgctccgccccgcgcgggtagccggccgcgcctccccctgccgcatgtgcgcggtgttgtgtgccctgccctgctcctccccctcccctcccctcccctcccctcccctcccgccgtcccctcccccagcggccccgagcgagcgccagcgccacacagccccgggcagccgccggcgagcgcgccgcgacgccgaacaggtggccggaggctgcgggcgccgcggcggggagaggcgaggcaagccccgggcgaagcgaggcgaggcgagggcggccgggccgggcatgcgagctgagcggccccccggcgtcgccgccgcctgcccgcgcccctagccgcccgcgcgcccgagtccccagcggctcctccgcgcccagcgtcctcggtcccggcctcggctgctccggctgcgctcggcgaggggcgcgggcccgcccgcggcggcggcggcatgaaagtgaccgtgtgcttcggacggacccgggtggtcgtgccgtgcggggacggccacatgaaagttttcagcctcatccagcaggcggtgacccgctaccggaaggccatcgccaaggtgaggggccgggggcgcgggcggggagggggcggcggcggggacggcgccgggatcaatatggcgcttcctggaagggggaggagaggcgcagggaggcggggaaagggaaagtgcggccggtcgggcctcgcgggcgccccccgccccggactgcgggcgccaaagttctctgcgcgggccggggcgcagcctctgggacacccagccgggtcccgcggcccccgccctcaccctccgcccgggagctccggcctcggtagcgcggggcgagccgggcagcggcgcataggccggccctgggcgcctccccggagtctgcagacccagccaagccccgagccagcgcgcggggggcgcaggccgggaaatccagccccaggcctttcccggctcccaggccccgggggcacaggccggggactgggaacttttggtgtgaggagagtttcgtgactgcccttccgacagaggcgggttgcgagccttctgcctcctctcccttactcgggcgggggcggaacagcggcggggggcttttcctccatgtcccctgctggtaggggccggcaggggcggcccgtcgcgtccgggggctgcagggtttggggagtcgccggcttggggtcggggaggcgttcccgggagggccaccgctggcacttggcactcgcttgcgagcatttactgagctgatcccacttgctgggctctggaaagcacaaccttggaagagtcgcggaatgaaaagttttcctgcgaggacctcagctcctacctatcccgggctggttccatgtggctgggctgcggggccgggcctgacttgggagttgagtggatttccctttttcctggtggactgataacattgtctccacttcacagcattcctctactgtgtgtcagaagtgaaaaggcgttttgttaaattgttttaccgactgtgtctgtgtttgacaacagcccacgctgaagtttctcccaagcacccggggatatatttcctttgtagtagagtcctctttggtggggagcgcattcgtttgggtgcagtatttcccatttgttcccgacagtggcctggcccctgtgggcttgggggctg

SEQ ID NO: 1884190 - DNA, 4001 bp, Homo sapiens
cttctcttcagtctactcttaaactttggtgttcctaaggcttctgccctaggtcacctttactttctctacatgtttatgttatctatgcccatagcatccattataatgtttatgccatgaactccccaatctacttctccagcacagaaatatttcttctcaagtatcccattctttcatgaatccatccccttccctattgccagcatccaggcctaagctacaattatttccaacctagattaactccttaactgagtcttgatgctccacttgagttccttttcaatccattctttattttccacacaccagccacacagacttttcaacaaataaataagtctaatcaagtcactcccctactaaaaacccttgagtagcttatcaatgcccttagagttcaaaatccttagcaatgtctacatatccaatttgatctgacttttctgtaccaccctgcagcctcatctctcacactctcttgcgttcactctatatatcaattgcactcctgtttttgttttgttttgttttgttttgtttgaggcggagtttcgctcttgttgcccaggctggagtgcaatggtgccctctcggctcactgcaacctccgcctcccggatgccagtgattctcctgcctcacctgcctcagcctccggagtagctgggattacagttgcccgccaccacgctaggctaattttttgtgtttttagcagagacggggtttcaccatattggtaaggctggtcttgagctcctgacctcaggtgatccacccgccccggccttccaaagcgcagggattacaggcaaaaccaccgcgcccggcctccattgcactcctgaaacacttcttacttcctcttcatctaactcctactcattctacagtcctcagaataagcatctcatcttctggaggactattttcgattccataaattcagttaggtaaaacaatctgtctttcatctatcagaacatccattaccttttattatattaacttttgctatcgtctatctctccagatagattttaaggtatgaaggcagaggccaagtttctctcattcaacactgtataccagggacgggtacaatgccagcttagactaatagctctgcaccctgggacccagaatctgcacaagtgaagttgttttcttcctatctagaggctgaagcgccctactgttttacatacacaattagatctccttgacgactaaggcaatttctcaatcaaacctgaagaagcaaacaggtggtggagtctcctgccattttccgccctgtgagtgactgctcatcagagtttctcacatcaatcgcactgggaaaaatgcggccccattcacccactagtggctttggtagctcagcaagtggacctcagagtgatgatgcacacaagaccagaaaggagtgactggagtccctgagaccagaaggttcgggccgaggcgaaggacaaagatttttattttcccacgtaccaagcgaggtggcgctgcctctgtgctgtcccgcctgccctgggacgcaggctggcgaggacggtgggaccctgaactgcacgtgagcgtccttggggtcgaggacgcgcctctgcctgctcggaaagctccgggcgtccgaagcagccggcgaagttgtagcggcgccccagcggggtcgcttggtgcagggttcacagccggggcccgcattcatgctgggaccagcagcgcactgtccccgggccggccccgggcggagagcctcatttcactaacctgagagagatggactgcgcgtccttctcagcgcctgcctgcaccattccctctctgccgctgcctgcttctgcaattgctgatccgccggcctcccaagtcaggccgtaaacactcgcctgctttctctcttccactggcaccccacctgcctcaatgcgccgctttgattcgggattcgttcactttcccaccaccggaaagctgccgtcaggcgcttccagcttccggggcgcacattgccgcaaagcggaagtgtggcgcttaacgggaaccggcgcccggaaggtcagcgtgtgaagtaggcgctggcaacgcggggttacccgctgttattgaggagtaacggcccagcggaccacccaggcttgaggcagcggcgggaaccactcggtttgctgcgataccatggaaggaggcgggggaagcggcaacaaaaccacagggggattggccggctttttcggagccggcggagcaggttactcgcacgcggatttggctggcgtcccgcgtaagtatggggcctagcttgcgattatttctgactggtttttgcgtctacactaagttgcgcgtcccatgttttatgttgttgttttttttttccttgctggcatttacaagcttaagtaccagtggtggggttagtgtatctgcatggctgctctttcaagatagaaaggcctaaaaaagggccacggatctcctggggaagctgtccgtgattgacctggactcgcgagatgatgcatgttttcttaggtttatatccaagcctcctacgttttgtgtgtggtgggccgtgtgattgacccttgattaagagtagagccgagctttgggagtaaatgtattccaaatagcaagcccgtagttaactttttagtacacagcgacatattctgagcctccaagtagccgtcagggcagaatattcagtaatattgtttgtaagtgagaaataaatgacttgggacaggctaggaaaccttctttaggagctaggaagtaagctgaactttaaaggtgatatatagacatgaagaaagaagccaggtaagaattatagaaacggaaataggcaacatcaaggtatacagaggcataaatatcttgcctttgcctctcctcggtcttgtgaaaatgttttccagaactttggtactttgtaactgtggttgttcaactagataaatacaacttggacctaaagataggcagttggtcgtggataaagcctttacgaaagtactttctttttagagaatccttgtaatatttctctaggtattttatactaaggaacaacaacaacgaaatatgttcagactgtagtgcaaaaaaatataaaagacctttcatttccctggtgtcacctttgtcaaaaaactgaatctacaacacatggtgttttgtttcgtttttttgtttgtttgtttttagagtcaggacctcgttctgtcacccatattggggtgcggtggcatgattatagttcactgaagcctcgcactcctgagctcaaacaatcctcccctctaagcctcctaagtagctgggactctaggtacgtaccaccacgcctggctaatttttttttttttttgacttattgtggagatggggtctccctgtgttgtccaagctggtctcaaactctcgaactcaggccatcctcctgtctcggcctcccaaaatgctgggattcctaggcctgagctactactttacctgtttagaacacagtttcatattaatcttagtatctctgagtttcagagcacaaagggcatatacacttccttaatgtgacaatattgttaaattaatttgattaagatttgaaggtaaattgggggaccagggaatgaacaccatttactgagcttttacagtgtgctagctacttttctgggggcaggactatagtggtttttgtgggggttttttttgtttttttttgaaaagaggactcttgcgctcacagagcttacataatactgaggtaaaccaacaaacataaattaaaacattgccgttagtgataagtgctgtaaagggaataaagcagagtcttgagattgtgatggaagcaggatgccattttagagccggttagggaaaacatctcaagggagttgacatttgagctgtgacccaaatacagtacaaatgcttgggaggcaagtatccaggaaaatagctagtgc

SEQ ID NO: 1884191 - DNA, 4001 bp, Homo sapiens; identical to SEQ ID NO: 913945

SEQ ID NO: 1884192 - DNA, 4001 bp, Homo sapiens; identical to SEQ ID NO: 913946

SEQ ID NO: 1884193 - DNA, 4001 bp, Homo sapiens
gttttatttttgtttaaacgagttatttccaagaccatttgaccatggaacaatccctcccacatttttttttgcatgatatctattaaagttccacaaaattcatgttctttggaaaataacttgggaattactgattgagcccaatttctgaattttattggtaaagaaaaaggtcctgagaggggctgaagttcttacaggaagttagtgggggaggtaggacgacaaccctatttcctgagtgtctggcccaaccttgtcaaccacacgcaaatacggcagcattctcaaaggtgggttctgggatcccagccatcatgggtactgcttgagatgatacgcaaaaaggacatgaacgttttcctccctaatgggtcctttgggggcaatttgctaaaacataacaggttgttttagatgcttcttaaaattggtaatcatatcccattctttctttatctcatagaactcgggatgcctacccaacacagcctgattatgctatatgtgcttagtaagtacattcaatgaatgactaaatgaaagacagggaggaagaaggaaacagtccagaactgaaagggatgagaagagaaaaaatgtggagaaagagaaggatgggtaacaaaggagccagcagtcactgatcagtagagtataggtgagagaggggaaaggagacagctgcagataatggaaaataacaaaacaaaactgaggtctgggaagctccgattttaaaaagtgaacatgagttatgagactaattcagatactggccacaccaggaggcccccgcccaggagatgaggatgaccaccaactgctgagaatctttgtaaactcaaatcaaggtgtatttattgcacaggcacaataaatgaacaaggcatcttaagtactacaatgacaggtgagtgggtcaggcacagtggctcacgcctgtaatcccagcactttgggaggccgaggcaggcagatcccttgagctcaggagttcaagagaagcctgggcaacatggcaaaaccccatctctactaaaaatacaaaaaactagctgggtgtggtggcacaggcctgtagtctcagctacttggaaagctgaggtgggaggatggcttgaccccaacaggttgaggctgcagtgagccaagattgcaccactgctctccagcctgggcaacagggcaagaccctgtctcaaaacaacaacaacaacaaaatcacagatgagtaagacacaggtctttccctaaacaaggttacagtctaatgggcagaagggctaggacagggactcagatgaaataatgccaggtagaatgtgatcagtgcccctggaggtgtggcaagccaacactgtgaggaatcagcggcaggaagatcatatcaaatcacgaggctccagaaaaactacgagggtccaggaatggtggctcacgcttgtaatctcaacgctttgggaggcagaggtgggctgattgcttgagcccaggagttcaagaccagcctggacaacatgatgaaaccctgtgtgtacagaaaatacaaaaattagctgggcatagtgagctgtgcctgtagtcccagttactcaggaggctgaggtgagaggatcgttgagctagggaggctgacggaggtcgaggcagcagtgagctgtgatcatgccactgcattctcctgggctaaagggcaagcccctgcctcaattaaataaaacaacaacaacaacaaaataaaaaactaccaggaagggccatgaggcacagaaggattgcatcaggcggagataggagatgagaagagagacatttcaaggtgatatataaagaactaccagggggtgaggaagcatatggggagatgtgtggagacacagcctgaaagtcttgaagtcacatcacggagccttgaatgaccgaccgaggcgctgacactcaagagaggcaatgggaagccagtgaaggtttgtgtgtgtgtgtgtgcgtgtgtgtgcagagaaatagtagcattagagatgattcccaggcagggtgactgggcagccaagggaaagcgctggcctgtgcgggatgaggcagttgggttctggagagcacaagcaatcattcggtgctgcccatcagacaactgaaaaatctgatcagaggcagtggctaagtccccgcctgggaacacaaaggaagcctaaggttctggttatcaccctcaggggaccgtgaccttgaaagagtaaggatagtaccagccaaaaccaatgcagccaagaggaaaagtcacagagaacagcgaggggaggtggaagtttcaatacagaaattgtagccatggctgagaaccccagcactggaggccggaatttgtgcgtttgaacgccagaggcttggctagtcatgattagcaaaggaacttcaaagagttttggagcctgctttatatctgtgaaatgggaattatttccatctcaaaggtttgaggggattcgctgagagaaacttcttagcatgggatctccagaaactggaagccacagagaaagcagcggccagagggaggaggaatcggacaggctgatcacttggagtgttcgcctaagcagtttctagaaatggaggcagggaccatcaggaagctcaaaacctttgcttcagccgagtttgcagaacgccctgtgaggagaatgggtgagctgggtcgaggaagcttcatcctcgtccccatcccccagcactgcccttttcccaacgctcccatcccgccacgcctcccaacatacccccaccccgacttcccgctcaactcccgctccagccagtcccaggagccacatgcgcatgcgccctcccgcgcccctccccaactttccacgtttcactcctctcccttttcctcctcagctccggctccgccgccacgattggccagccgaccacccggcctcggccaataagcgccgccctctcgcccccgtgttactgggtagaagaaaacaaaaacaaacagagcgagaagggccagagactctccgaggcggcggcagagacagaagagcggggtcggggccggctgaccaggaacctgggcgagcagcggcgggggcccgaggggtcagtaccagtaggcgcggctcacacgctcgggaagactgcgccctctcccccatccctcctcggaggcagccgcaagatgggagggggcgggggcggaggcgtgggggtcgcggtcctgtcaggtccgggcctgcggtgcgggggtccggctgccttcttgtagccccgcaggtccagccgcgccctccccaacgccccggactgcgggcatccggcctggttccctctttctgagcccagcctggagcgtgtcggcgcgggcccgccccctcccggagccatctccccactgagaggggcgcgcgaggcgctcgcccttgaaggtccccctcagccctcctccccctctggcggaggttgaattcgggggccgggattggaaggcgtgtttccggctggactgaaatcctgtgaggaagattcgcgccctccccgccccctgccctccctgggaatcctctgaagatgcggccccctgtccttcgtgaacccggagccccggcctcggccccggcccagccccttccgggggccgacccgggctgggacttcgggggtcctagcctgagcccgctgcgggagaacaggcccggccgctgtggggaggggccgcgcgctatcctcgccgggggcgctgggaggcgaacacgtgcccgccgccccatccctgcgcgaacttcgtcgcgcccgtcttccggcaaagggtctcttttttttagtttaggtaaaataaaatctcccagagaaaacaaagccgggaagggagccccctttctgtgaaacgcatgccatcttctccatttgtcagtttgatgctgtaacgtacatggggttttgcaagagcttcaaaactgtctgcagacgtcaatttcgcccccctcccc

SEQ ID NO: 1884194 - DNA, 4001 bp, Homo sapiens
cttgtagttagcatttgcaaagtctcttcaactagaggtgagaaactggggtcaggagtaggtgagccctcactgatttcctccaaaggtggagtctgaggtaaaacatcaggacaaccaaggtgaacacctggctccacttccgcctttgttgtcacttgtgccttgtgttccccagagaccaatggctggtaagtaatgcaggagttgccactggagcctgctcgctgagagaaagatgagccagaccgaagttttttggaaggagaaggcttcaagggaatcttcttaaataccgtgttgcacatgaagcgctggaaccattcagcatagaagcctgggcgatgcactgagacagtgtctccgtcatgtatcagggctttccaagagtgctccaacttcttaacaaacctgtaagactgtagaatgtcaatgatgccaatataaagcagaagcctttcccctttactattccgggcagggatgccacccatatggtcatcggtctccatggtgccaccccgtcgagcctctccctggatggattccatggctgtggaatacagagccttttggggggctggtcttcgagtatcaactgagtattgtgtttcgctgcttaagggctctcgttgtgcatgatctatattatggattgacatcaagaggctataatccattatcttgaagctctgcagcaccaaacagtcacgctgcagggtcttacagagagcgttgtgcacgtcagcatccaaaaaaagaccatcagggatgtcttgtaagaagtctaggtctttaaatgtgggaagaggcttctctcgctctttctgggaagcccgccgcctgtaggttgagcctttgaggtcatatttgatatgcatttttaccgatcttggtaaaagattgttcatcaccacaatccgaatgttcttgccacctgtctgcacacagtacagtccatagaatttaggcagcaaagtccgagggttctggttgaggtttatgtagtatcctggaagcagcttctgcagaaactccgcttctttatgtcggactgtcttaacaatgaactcatcgtcgctggacacatagaacagggaaccactagctccagagctacagagttcaatcagcggctcactgcagagggaatacaagtaatcatcgggccggataccaaatagctcccagaagtagcggaaggcaacaggtgcataggtcttgaaacgaaaggcattgtagtgatgagcaggggtcaggttgctcccttcactgggaaagaagatactctccaccatgtggaaatcttgcatgaggacatcactctctggtttggtactcaggctccccacagtgtgggtaatgcctaactggatggcacctttcaaggctgatgaggttgtccctcctgaggaatcaacacttctatggcctattttcttgatgggcatgccagaggcataaggcacctcagatgccatgggactcttgattccagatgctgaggacgaggtacaggaagggaccgcgggatcaacggagaaaaaccgaccgaagacaacggcccggaggaggccgacgccatcttggcagccccctccccctcaagggcctggctctctttcaatccggctcttcctcttctcggaatcgaatcttcccaatgtctctttatagaacccacgttctgtgggccccctccccgccccctccagggctccctcagacaagtcgagccggctgctggaccagctcaagtccacaccattcgcctggcatgggggagaactcacgtctcgcaccccctccacaagtttaactgctttccacaggggatactttcccctttcacagaagagtaagcttaagctggctgctgggaccttgcgtccagaccaagccacatctgaaaaaaaaaacgaggcatgaaaagtcccagaggagcaaacgccccctctccgtcctccctagccaccgcctgttaatcgcccaacccggccaggatttcttttctgagtagtggatcccatacatcagaatcatctggggcacttgtaatttaatccaaactcatgtgctccagtccccccaatttttatttaagtctggggtgagggccctacaatctgtgcttttaaaaagttcccgtttttctctggtatagagtttgagaattgccagtctaataagcctctgactggtggtgatggttgccagtctgataaggccccacctccaacattggggatcatattttgatgtgatatttgggggggggaatatcaaaactatatcagagactgttcattcagcaagcactataatgctatttacctgcagcaccttacactgtacctggcacacaggagatgcccagtgaatatttctgaatggatgaaatgcctgctgtattagtcagggttctcttagagggacagaacgaataggagatatatatatatatatacatatatatatactatatatataatatatacacatatatatactatatatatagtatatatacatatatactatatatataatatatacatatatatactatatatataatatatatacatatatatacacaatatatataaatatatgtacatatatatataaaagtttattaagtattaactcacacaatcacaaggccccacaataggctgtctgcaaactgaggagcaaggagagccagtccgagtcccaaaactgaagaacttggagtccgatgttcaagggcaggaagcatccagcaggggagaaagatgtaggctgggaggctagacccgtgtcttcttttcacgtttttctgcctgctttatattcgttggaagctgattagattgtgcccaccagtttaagggcccactgattcaaatgttaatctcttttggcaacaccaaaacaggcacacccaggattaatactttgtatccctccatccaatcaagttgacacttactgttaaccatcacacctgctataagccaagtatgataccaggtcctggagatacagagataaatatgataggtcagctcctgaacaaaccatctaacaagggagtccaaattattttttaaaaagatagtaatggagtacagcagttaacataataggaagatacaaaactgaattgggtgaacactagaggaggagttctgaggagagcactgaactgagactgcagatgagggggatcaggagagagttccaagcaggctaacacaagccaagtctagaaggaccagcagagagtcagtttggcacagaagtgaggtatgaatcttccagctgagcaacaccctggaccaggcacagaagcatgaccatcaccgtggttttgtgaaaccaacagaagatgaacatgctaactgttggtgggtagagagaccacaggactgagcatgtccagggctggggtgggaaggaatctatgttttcccctcctcccagcacatacgtttgctgggtgctcgagagctgtggtcttctgatatagatgtggctgaatggcaggaacactagacaggagagtgaaggcccctgttctcagcttcaaggaaaatttcttattcatttttgttctttagggccaagttcaagcttctgcaaagactgggtgttccccaaatgcttcagacagactggcagggcagcgacacagccaaaattgtgaacaggctccccaattgttccggggacttgctgttctccagctctttcccctgagggcctctggagcctggggtgtgcaggcctggtattatctgtctcaactgaaatagattttctggcatataaagagacgccacaaaggaagacatatacccagctacatgggtgtgtatccctagatgcatttttaccgctaaagtcaagatcggatatttctgactgctttccacaaagctaaacttggacaaaaactgcatgtaaacacattagtttccccaaatcactgtctttcatcatctaacaattag

SEQ ID NO: 1884195 - DNA, 4001 bp, Homo sapiens
gtgggagcacagccgcctctgacccctgagtgggtccagtcccagtgccgtgggcggtgcatggcagcacagccgcctctgaccataccgtgtccctcaggaacccaccttcaagccctggcagatgaagactcacttcctgatgcccttcccggtgaattacgtgggtgaatgcatccgaactgtcccctacacggacccagatcatgccaggtaggagggtgtaggtcgggacctctcaggcctgagccttacggaagagcttgtcaaggctgttcgagttcacagggcgtgttttagcacaggaaaagtctgtgctgactctgagtgttggacctggggctgtgtgagtctacgagtgctcctctttaaccagcagtctttgtgaacagagacccagttttagagccagtcatttttgtaaacaatttctattattgaggagtcctatgaacaatacagatacctatgaccttaaacacagactgctttcaacatgccccatgtactcacctcatctctaggtaaaaatcgaatgaatttaggctgagatttctgataaacatggtaggttaagccttcatgaggacagatgcgtgaatgacagcaaaggcagatcaagacacgaagctacaagggaaagagtgggaggtgacccggagagccatgggggctgcaggagaacctcgtgagccagactctgggtgggtggggggtgcctgacctggggccacagagggacagggcagtggggagaaaccaggtggtcctgcagagccctgcagatggcagggctggaggccgcctcacagtccctctaaggagtttgtctcccctgtctccccaccaagtcagaagctcagggaaggaggccctgggttgagcagccgaagccacagccaagagtcagggtcaggcctgttcccaaagtggcgtggggcgagggagtttgcagcctacagactggccctccagccccttcttccgaactctggctgccccttggctgtgttcatcccatctggggaaactggccagaccaggacagactcacagacgtgcacctttggggacccgtcagttgggtgtgtatgacacagatatgtgcaaacatgttatatcccggaaattcacttcctgtgtccttgtcccaggcagctacccccatgagggactaaaccaaggagtgagcctggtagagagggggaaggcaggcttaggcctgggcagcctgtcctgattggagaaggagccgggcctccgaggtgcacgtgtgtcacagagggtcacagatggggaggtgtgtaggaggcaggcgggaagaaacgtggggctgcagtgggggcccagaaagagctggctgtagaagtatgtggtcagctgttttgttcatttatttccatatttgtagaagatgaacagatctgtctgctatgccggcagaagagtggtgtctgtttccactatccaacaggaaaatgtagacagaaaacactaaaaatgtggaggttccccctgggcagtgggattccagatctttttttccttgtgttttgtattttataatctttcaaaagtgagcatgtttttaatatacaagtaatagaaatttctcaggaaggataatgtgtggacggatggaacgccatccctgccggtgctggtggagactccgtcccccagggtctgactccagcctcgctagtcccggctgacggcgccccagccacccgagtggcgctgggtttctcctggaggacccacacgagatggtcgtgacttctcccaccacagcccctgggaacacgcccactccttccttgatttcccacctggcctatttgactcccttcatccactttaggaaaaggcctgtctgtggaagcggcgacctggggctgatctcaccacgggcgtcttcaaggagcctgtgtctgtgctgcagaccctcccatcattgtctgccccgccttctgtcggaggtggatgtgttctagaatcagcttgaatgtgatgttaccgttcacagtggaaggcagaggaaattggccctgttcctagaaatgtgctttatcagagagtgtgtgttttcttaagggattcttataaaactcacttcagtttcctttctttccatattctgatgtgagacatttaaataaatgttcatttgctcatttgcctttataatagaaataacctctttctacttcacgagattttaaaaatgccacatgtgcattggaacaagttaagcagtgtggtgctggaagtgttaagattccctccccaccacctctcccttcaaccctgtaatctaagccaactgtttgaaaattgtgcttccttgtgctttttagttttggttaattgaaaagaaaatctcatgcctgtaagctcagcactttgaaggcaggaggatcacttgaagccaggtgtttgagaccagcctgggcaacaaagctagaccctgcctctacaaaaactgtaaaaatagtcaggcgtggtggcacacacctgtaggcccagctactcaggaggctgttgtgggaggatcccttgagcccaggagttcaaagctgcagtgagctgtgattgcactaatgcactccagcctggcgacagagcgagaccccatctcttaaaaaacaagaccaaaatatgggaccataatttatgcagcattattttacaactcgattttcattttcacttaatccaacaattacttcattgtctatgcttttttatcagccacggtattaacttgcattttttaatcatttcagtcttaaaatccttgcacgtttgatgactgccaaattcttgcatacagaaattcgagaaaaaggcggtgcttatggtggaggcgcaaaactcagccacaatgggattttcaccctttactcttacaggtgagttttgctctagttcacacattgggatgcacacgtcgttttagtcttctactcatgattatcagtgtcattttcttctactgcagtgaattttagacaaaagttgttctgtgtgcttcttttcactccttgggcacttagccacacccagcaatgtcctttctggcgcgaggattagggccagcagccgaaacaggaagcattctgccttcagtaaaccctggcttcagccagcatattttggcagaacacggtagtgcctccatccgtgggtttgccttccatggtttattacccacagtccccctcggtctgaaaatattaaatggaaaattccagacataaacacttcctaagttttaaattgtacaccattcttctaagcagtgggatgaaagctgacgctgtctacggtacctgcctgttggtcacccagtagccgtctaggtatcagatacgctgtgggtatccaagagcttctgttcacagaacccttgttttacttaatagtagcccatcagcgtaacttttattacagtataattgttgtattttgttaatatcttgctgcacctaatctataaactttatcataggtataggaaaaaaacatagtatccatagtggctgtctgaggttgcagccctgccgtgggggtcctgaaacacaggccccaggtgagggggctgatacagcctgagagcgttcttagctcatttcagttggaggtgcctgatgtggatgcagttctgttagctttcataaacataacaccgttactgtaaagcaatattcttgattttctatggctttgctgcctaagagaacatgtattccaacagtttttaagaaggagccagccggccgcagtggcaagtgcctgtggtcctagctacaggaggctaaggcgggaggatcccttgagcctggggaggttgaaactgcagtgagcagattgcgccactgcacaccagcctgggcgacagtgagaccctgtcccgtggatgcatagctagattaggtaggtaggcaggcatgtaggtagatacgtaggtagccattgccactctgatgagttctccc

SEQ ID NO: 1884196 - DNA, 4001 bp, Homo sapiens
gttgctgaaatcattgttataatacctcctaaatatctttattattataatttgccttgatgctcatgaagaaaaataccataaagtattcatttttcaggtcacacaatgtctttttataatagttaataattataaaagttataatactcataatttctaattgctaaatgtattaaatacttaagtactaggatttgtgctattttacgtacatctcctttaccgttcataatgattctacaaggtaggcggtattatctccattttaaaataaagtctgagagggatgaagtaatttgccccaagtttcagagtatatcagtcaagattcttttgtttgaaagtggcagaaattgacctaagtaaagggaactttattgactcatgtgcttaaaaatgaagacacacaggtttcaggtatagcttaaccaaggtacatgctttctctttcctcatttctcattccgcctccatcatgttggctttctcccctttattcccttctggttgcgagacggctacagcaggccagcactacatgcttccagtttcagcttcagtgtaagagtctcttccagaacttcccgcagaagtgtcattgtttctcattgggtcctttaccaatcactgtggccaggagatgcagtgctctgatggtctggatcccatgtcacattctccactctgagctgggtagcaaggccccacccaaaccacaaggaccaaggatggcgttgaagtggaaggagagatttcccccaattgaccgtttttagaagtacagtggacaggctgatgaaccactttccaaaaacagtgtccttttcaattaatgaatggtagacctatggctctgaagcctgtctgtctccaaagtcctgcccttacccgttatactgcctggcctctcttgtttcgggctgttttcaatgaggtactcaattatgtgtcccacaaatggggcaccagggggtagaagacaaacaagaaagtccctaagtacatggaactcagaaaaattcatctcctcatactaagaaaaaggattctcttgaatataatttctgagaacaggaaagtggctgagataggaggatcagtctaaatgttagtaaacaggatttatagacttggcctggagagaggcactaaaatgccctcatcttttcaagatgggctgaactcaggtccctcccagagcatatcttaagcacctggtctcacacagtgcctgacaaatgggccagaggcattgggctatttaaaaattaggcaaactgggtgtagtggtgcgtgcctgtaatcccagctaccagggaggctgagcaggagaaatgcttgagtctaggagttcaagcccagcctgggcaagatatatagcaagacctcatctctaaaaaataataattaaatttttaaaatcacagttaggtaatagtgagcttttcacacatcagagtaaaaaaaatcatattatttaatgatatgataaaaatcatatatttcatgatattaaaatcattttaattgtaagttttctcctataagctgtttttaaacttttggcagctgctactgcttgtctgctagcaaatcctgttgaggaggatatgaatcaataagtagccagcaaagatttcagagaaatgcaggaacctggccatttaagtttaatttcacagaccatgacctcatggcatataagtacaatatgaccattatttgcaactggcaaaactctttttctgatggagtaaaaccctttacctgtcaaagagcctggaggctggcatgtccttcattgcaggaacaaggatgagcgccactctgtccaagaatcacacccactgcagctcttattctttataaatgcagcggatgccacactcggaccattccactggctttgtcttttcttctcaagcactcagtaaataaggagcacaaattcccaaagatatttgaagtctgtgtgaaagataaagtctctgtaccagtagagaatcgtggaagatcaggaggtcatgtgatagagcttctaagcatgtggttgttcggcttattttaaaaattccaagtatgttgttttttaaaagtgttcacatagcatacatttcttcataggtatagtgtattttctctttagaaaaatgaaatttcttacattttttccctgattttatttcctgtctcaaaatagctaaattggattgccagaatgattgttataataccttctaaatatttctttttacaatcatttgtttgatgcacatgaggaaaatactataaactgttcattttgctatgccgtttattttaattttgctacattatcaatttcagtgtatgtcacctttcatcatcccaagtcccttcttacaagccatatgcaaaaaaaaaaaaaaaacccttcattgcaatgaggcactcaacaatcatgtggtatgaggcccacagaaaggaaggaacttccccaccatcagaagctaggtcagtggcagggcaagagccagaattcctgtcagctcccaggggtgggctctttgcaccacactatggaagtagttgaattttttcgacctgctttctcttagggtttatttctcggttgcatttagtacttctattgtcctgggtttttttctccttctaatagaaaaaaaaaaggatatggtatttttattttatgaccccatcaacctagtttccaatatcttcccacaagctcccctgcatcccccactctcctcaggcacctacatacactgccgtctttctagtgccaggccattgctcagagtgttctcaaccttgcctggccttccttctccccttggccccattccaaattccaaggacggggtccttggaaagtatctgagactcttcaactcattgtgacatctcctttctggagctccttcatttataggcatatgtttgggtacctcctagatacccagttgttccacagttaggagtgcaaccttgttcttttattttgaatttttttattttgacagctttagtggtacaagtagtttttggttacatggatgaattgtatagtgatgaagtctgggattttagcgcacctgtcacccaagtcgtgtaagtcatacccaccaggtagtttttcatccctcacctccctcccactctcattctgagtctccaatgtccattacgctgctctgtatgccttgacatacccatagcttaaaagattacaaccctgtaagacaaaaattattcagtggtgacaagatcatcagataagatcgtgggtcagagacctgggctcttggctaccatgctttgtgatttggccaaggcaaatctctctgagcctttctcactcaaaagtggagttgactagaatccttgtttactacacttgctgaaatctccagaatcacccaggccacttgattaacatacccagtctcaggcctctctaccagggatttacatttggaaggcactgggaggtcctggtccctgggtttctaaggcaggcaattcaggagcaggtagagccagatgatctggaagtctgattctgagggggattttgcctcattctcctttggatccaccacacagtccacagagcaggtgcccagggattccatggtgaggctcgtccggaagattctgtgacttccagggctcatttttattcctacactgaaggagccacatggggagagccttgcaagtgtcagtccattccctggacacacactgtcattttctcagcactgagagacaagctttgttcatcaaacagtggtttgctaacaagccatttgaatgacaaaagtagaaccctgctgccttggacagctttgggctagctgggtgtaggtccctggcactgagagttgcctcccccacagagagccttggccatcccccatggctgttctgggttactcagacccacagtagtgctgcaggttggaacaccttggagggcaaagggatgcatt

SEQ ID NO: 1884197 - DNA, 4001 bp, Homo sapiens
tgcttgtcatgcctctatgcctctctttttgcacagtgaatgtattttttcttcccctgctgccccataatatcaaatcctccttgttaactgactggtgctcgtgttgtctcttgtttctctctctctctctctctctctctctctctccccctcccctcccccccccaacacccttttctccttcccctctcccctctgcttccttggttatataaaaccatagtagtttctttgatacaatattcacatcaaggagtctcggaggctacctagagaagagtgagttctgactgttgctggcagtggcgacgctttatgtggtgccaattgggttgatgtttgtagcctcagtatttggctgtgttgttaaagatgaccccatttggtatccgttatttagggcacagcagtgagtgtgattaagaaaggaacaaagagttacaaaggaaagcaaaactggagaagagccttttaaatgatgacggagatgagaaaaaggaagataaaggcaagacgttgctgaactcctccttcatgccaccccccttgcttggtgctttacatacattattgcatttaatcccccagtgagaacagactaaacagattaggaatggtctgtctggaagacaggaggaggatgtgagcaaagtttctgaagtcataaatagttctagtgtaaaactacaaagataccccatgaagttacagcagagtgagtttaggacaagagaaaggtagtaagtagtacttccaaatggggctagtaaacagtggactctgtaaccaaaagtgtgaaaagatggacaatttaaatagcttttttttttaaggttttagacaactgcatggtaatacattgctgctggatttctaattggagttaggatgcttggagtctttagacattcacattgaggtcaaggagtctaaccgtatgtacagccctgtagtccatgaaggtatctgggggagcagaagagaggacattcagggcttctgtcatctctctttaaaccagaatctctctacttcttatctcttgaaagttctgggcttctacatgagatttcctttgtgagggacaaaaaaaagttgttatttatttattttttttaaagtctacaaacgattgcattagttgtttgactccactattccagacaagccgtgggctggatggactgtggatctaaccaacgggaggaaattttactcatggaccaaggctccaccattgcttctctcaattccatagcacaagctagagtctgacagccttgtagctcagccctgacctcagtgaggtgaggacttggtgaggtgagagaaggcaagtgcagcagcaagaactgctcctgtttctgaaagaacatcccagtccattggtaaggcctcccaaccccattccaccctatcacaagcaaggtgggagctcccctgcagccagtgccccaagtgccttgcctactgtgtgcctttgaaggaagagtcagggaggccaggagcctcagcctgagccctggctcacaggttctgtgctgtcaccgagctacttacttcacccctactcttgcctggtctttcccttgggctgtgagtcagaagacagtggttgaagtctctgcttactcattttgcagccataagattctctagcactcaacctctttctaacccatggtttcatctgtgtttctgtaacaacttctactaatcaggctgctaggaggactgactaagataatgcaaacaaaacacttttcagggtgcctgctgcatggcgaagcctcagtaaatggtagtattggtggttgtagttgggtcatttttataccccctccaccccctgcttcccctgctgatatcttggttcctagccctgtgacttggaagagacttgggcttctgctatgatacctgcttctgagccagtaatccccaaccctgacatctgcctgctgccttccagtcccatggcttgccccatcaatactgattttctgtccttgattatacctgcagtgacatcacaaagcacaatacatcatacacagtgatacccagtaacagccctctttgtatgttactgcatttaaaaaagaactttgtctcttaagagcacttcacatatgtcgtttcatatttgatagacttccttttctgcaattgaaatgtagaaatatcaatgacttgtcctaaggtgcaggcttgctagttgatatagacaagcagaaacccaggtcctctgattcccaacttctttttaccatttcctgccatcttttgagtttttgtatctagatatattggcctttgctttgatttatacagacttgtaggtttccctgtgaatctgggagcaggatgaaggtaagagtttaacttctgctttgcagttatactgtagtcagctgctaaaacataagaatactatctagatgttaatgaaaaaaatattatttttgacctatttttgtttcaaaatgttctggacttatctcaataaatagctgttaagatgtttatcaaatttattgcattccccaaaatctaaataaatacctgagataaaaagaaaatgtgacccacttgaggttaggagttcgagaccagcctggccaacatagtgaaacttcatctttactaaaaatacaaaaattcgccatgcatggtggcacgttcctatagttccagctacttgggaggctgaggcaggagaatcgcttgaacctgggaggcagaggttgcagtgagccaagattgtgccactgtactccagcctgggtgacagagcgagactctgtctcaaaggagaaaatatggccaaaaaataaaattaaatacaataaagctaaacttccttaataaatggaaaatggcattaggcttataagaaaggtattctacataaaatattttgcctctgcaaccagcaaattctaccatattaaagacatagcagttttgtctctctgtgccaaaaatcacaagaacttttattcttgttctcatgatccactgcaatgttctctattcagaaagctctgggatgttttttttttttttcctggctcctttgatgttcctcagacaaagactcttgaagttgcagatttgttgtatgtttttagaccagtgcagagatggggttcagaggaacatttcacatgggctttgatgttagaatcctttggcaaatcacgtttgcctttcaaattgatatcaggaggatagaccctttcctttttttcttttttcttttttttttttttttttttttgagatggagtctcgctctgtcacccaggctggagtgcagtggtgcgatctctgctcactgcaaggtccacctcctgggttcatgccattctcctgcctcagcctcccgactagctgggactacaggcacctgccaccacgcccagctaattttttgtatttttagtagagacgaggtttcaccgtgttagccaggatggtctcgatctcctgacctcgtgatccgcctgcctcggcctcccaaagtgctgggattacagctgtgagccaccgtgcctggccaaggatagaccttttctaagggttgtcaaggaaataacctcatgtgcagaaaaagttttatgcacaaatatgtgtatcacaacagctttacaatagtgaaaacccagaaacaaattaatagtaataagagaatggttacttacactgttgtgaaatcatgaggaggaatctcacatagaattgaaagtgaggtctaaagaactttatagtaatatggagaaaaacttggttaatacattatgtagaaaagcagattataaatgttgtgtaatatgacatcacaactatggaaaactacacagtggtagtggtatcacaggtgatcttttgcttttctttattttccagtttttctgtaataagcaagaattttgaaaattggaatgggaaaagggtgttttactgaaaacagaagcatcatccttctctgttgg

SEQ ID NO: 1884198 - DNA, 4001 bp, Homo sapiens; identical to SEQ ID NO: 913985

SEQ ID NO: 1884199 - DNA, 4001 bp, Homo sapiens; identical to SEQ ID NO: 913987

SEQ ID NO: 1884200 - DNA, 4001 bp, Homo sapiens
tcaagaggcatgctgccatttgtgttgaaggcctgcagaggcacacatgtgcacatgctcccatccttgccaccactggaaggacacaccaagagtccacaacaggagctgcctatgggggagaagttcagcgcagggagaatgagacttaacttcgttgcctcccattgatggcttttgaattttgtaccacacagctgacctctgaatacgtcacactacttattcaaaaagtaacataatgaaaacacgaaaatgtctctaaggccaaagctacacacagatgttttgttttattttattttattttattttttttttgagacagagtctcgttctgtcgcccaggctggagtgcagtggccaatctcggctcactgcaagctccgcctcccaggttcacaccattctcctgcctcagcctcctgagtagctgggactacaggtgcccgccaccacgcccggctaattttttttttgtatttttagtagagacggggtttcactgtgttagccaggatggtctcgatctcctgatctcgtgatccacccgcctcgccccccaaagtgctgggattacaggcgtgagccgccgcacctggcttacacacagacgttttattagttagtatacaggttgagctgcgtgggctccagtcccaaaataacagccgctcacaacacaagcacatttatctttcgtgaaaaggtctctgcatccctcagtggggaatttgtgccctaaaatgacagcagggctggctccctctgtcctgtctcccctgcccccaggatgctggcttggtgcaggtgctgtgggatgacttcctaccactggtacacatatcccagccagcaggagggatgagtggggccctccaggtgcccagaacaaactgtcactgtggaagaaggggcccactggcagccttggccatgagggtccagcaataggggactaaataaataatggtaccctgtgtagaaccacatgacgggatggccagccaattgacctgactcaggtgcaggctgtgtggtgacctggaaagacattcagttcctttcaaatgacaacagatgaatacaaacagtatacagtaggtgccccttatcctcaagaaggcgttccaagtctcccaggagatgcctaaaaccatggctagtacccactcctaaacttcatagcctatgcacaaaggtatttttcctttttcacaattttatgggtagattattattattttttgttagtttttatttcatagtcataaacttaactctgcaatccagctaggcatggaagggggcaaggaaaacatggaacccaaagggaaatgcagtgagagcacaaagattctaggatactgcgagcaaatggggtggagggtgttcttctgagctacaaaaggaatggtctggtggttaagataaaacacaagtcaaacttattagagttgtccacagtcagcagtggtgatcttcttcctgctcttgccattcttggacccatagcgcttcatggcctccacaatcttgatgccttctttcaccctgccagagaccacatgcttgccatccaaccactcggtcttggcagtgcagatgaaaatctgggaatcgtttgtgttgggtccagcatttgccatggacaagatgccaggacctgtatgcttcatggacaagatgccaggacctgtatgcttcagaatgaagttctcatcatcaaatttctccctgtagacagacttgccaccagtgccattatggcatgtaaagtcaccaccctgacacaaaagccctagaataattctgtgaaagcaggaacccttataaccaaatcctttctctccagtgctcagagcacgaaagttttctgtctttggaaacttgtctgcaaacagttcgaaggagacgtgccccaaggcctcgctgttgatggcgatgttgaagaacatggtggggttgaccatggctggtagtacagggctcctggtggcggtggcgtctgcaaagccttttttgttgtgtttttttaagagattgggtctcactctgtcatccaggctgaagtgcagtgatgcaatcatagctcactgcagccttgaacttccgggctcaagtgatcctcccgcctcagcctcctgagtagctaggagtacaggtgtatgccactatgccgggctagttttttttttttttttttttttttttttgtagaggcaggatcttgctatattacccagactgatctcgaactcctgggctcaagtgatcctcccaccttggcctcccaaagtggtgggattatagacatgagccactgcacctggccccaaggattccttcttacaaccacagtatgtgatcttcttttcttattgagaactttcaccttttcacttaagaaagcactttatggcttctctatggtgtatccaaattgccagtgccactcctcttgtgctttagggccatggaagtaaagtaagggtcacttgaccacaagcactgtgattccaagacagtgaatttgatcacagagatggctactaagtgacctgcaggcggggacgctggcaaagagaaaagtcgcatccagggcgggacagggtgggatggccccagatttcatcatgctacttggaagggcatgaaatttagaacttaggaattgtttctggaattttccattgaatatttttgaaccaacgttgaccaagggtaactgaaactgcagaaagcaaaatcacagataaggcggtgatgtggtttgggtgtgtccccatccaaatctcatattgaactgtagttcccataatccccatgtgttatgggagggacctggagggaagtaactgaatcatgggggcggttaccctcatgctgtactcatgacagggaatgagttctcatgaaatctgacgattttataaagggctttcacccccctcactctcattcttctctctcctgccaccctgtgaagaaggatgtgtttgcttccccttctgccatgagtgtaagtttcctaaggcttctccaactatgcagaactgtgagtcaattaaacctcttcctttaaaaattacccggtctaacgtacatccttatagcagcatgagaacggactaatacggggcggaggctaccatatttgcatttttgtaaatatttataaataggaaaatgtatatatgaatataccaaggcatggcgtttttgcttagtgattcattcgaatgttctacattaaaaatgtggtttcaggccaggcgcggtggctcacgcctgtaatctaagcactttgggaggtcgaggcgggaggatcacaaggtcaggagtttgagaccagcctgaccaacatggtgaaaccccattctactaaaaatacaaaaattagccatacgtggtggcacatgcctgtaatcccagctactcaggaggctgaggcaggagaattgcgtgaacccgggaggcggaggttgcagtgagccgagattgcgccactgcactccagcctgagcgacagagctagactctgtctcaacaaaaaaaaaaaaggtttcgcaaaaagaactttttaaaaacttcatttggaaaccaaaataagcactctgctttcactggttctttcttcagttttcttaaaatgttaataaatacccctaaagtagtgaagaacaactatccccctgccctcccaaaaaaagaaacactaaaggaaaaaactatgggaatttcttatgttaactgaatccccaaccttctctgggaaggtactatatgagctggaacactgagagaacacagctacggaaataaagaagtccctatttccccggggcactgtgagtttaagccaggaacagaagcgcactaaacaaaacagaaactgtaaaggtgacatccaaattcagtcctcgactccaaccaggttttctcctaaggctgggaaagcatgacaggccactaacttactcaaagcatccacaaagagc

SEQ ID NO: 1884201 - DNA, 4001 bp, Homo sapiens; identical to SEQ ID NO: 913993

SEQ ID NO: 1884202 - DNA, 4001 bp, Homo sapiens; identical to SEQ ID NO: 913997

SEQ ID NO: 1884203 - DNA, 4001 bp, Homo sapiens
gatcaaaactgcagtgagctatgatcacgccgctgcactccatcctgggcaacacagcaagactctgtctcaaaaagaaaaaaaaaagtccttatcatacctggtgtatatatgaaactttttctaaagccactaactactgattaaattaacaggacatatgagcttcctttcagtgcctaattgtcaatgagaaacccagatatggagcgtgaggaatctaccatcttctaggcacagtagctgttatccgtttgccatttcttctttgcactgtaacaggatccgctgaaaaacaattggagaaagagccagatggatggcagtctgaactagggaagcttctgttttgtagtttgcagaaagaatctgcatggggatcactgcttaagctttgcctctttgtttccagacacagacgcactttcctgcctaatttccatagcaaatacccaatgagcgcctactgtatgccaggttctgatgatgtcagagtgagccagcacttccgaggtactggccactctcaaacctcctggctaggatcttccaagagctacagcctctggcctgagggtcagtccaatgctgttagatattgacaaatgcggggctaattttaatggaatatagttttatccttaaaaggtgtgtgtgttttggctttatttgggttcatatagattaggggcatcatcataactcgcttcctagtgcagacctgagtgatttaatcaagtcttgaaacacttcggggcctcagtttttcatctgccttcccaacctctgaggttctttttagttgacatcctacattcccatgatcagaaggctgctaattcaacttttggcttttgttaaaccttttttttttttgaggcagagttttgctgtcacccagactgcagtgcagtggtgagatctcagctcactgcaacctcctcctcccaggttcaaacgattctcctgcctcagccttctgagtagctgggattactggcacgtgccacaacacccagctaatttttgtatttttaggagagacacgattttgccatgttggccaggctggtctcaaactcccagcctcaagcgatccacccgcctcagcctcccaaagtgctggcattacaggcatgagccaccgcacctggcctgttttgttttgttttaatcgtttttaatgtctctctcaaaacaagaaaagaaaaaaggacaaaaaattactattttacttctcagattaatctgatcttagtacactacagcaacaaaagtcttaatcaagtacgttttaattatttggtgtcatcattgcaaggaaaccattcagtaagaatattagtaaccagacatataattttctaacctgaatgagaaattagttacatggagtatagaaaaagaaaccaccccgtttatcctccctgtgaccatcattagtattacccgcaaggcataaaaagtcctaaaatgacacgcacggcggcaacattacctttgcagcttcaagcacagtaaagttgaaagcagtcccaccttggcaattgtgtataaaacgacaatgtgcagatacaggaaaagtcccaggtccgaagccacctaggaacgatgaccccaggacagaagtgtgcccaaacaaatgcctggggtaggtcattttaaaaggaacaatgtttacaagccctttctagcgtgaaaaacagagaaaagagacccagctctttccacccaatctgctggagcgccgtttcgttttcagttgggcgagagggagacatgtggcctctcgccccttttcctgactctgagaatgtggccggagccggggcgctcctgctccgcctcgccgccctcccggggctgtcctgggccctccggccgccgcctcccgctccagttcgcagctgggcgacaagtggctggtaaggaggccaggggcgggagcctgggcgcgggaccgggggcgcacggcgggggaccgagcgcgcgtccctggctagaggtgccgggtcccgggaggccgggctggcggggaggctggcgagcgccccctggcgggcaccgccttctaggcgcacccgcagtgcgccgggcccgccagccccgccagccccgccagccccgccagccccgccagtccccgcgcagtccccgcgcagtccccgcgcagtcccagcgccaccgggcagcagcggcgccgtgctcgctccaggtagggccccgcgccccgcgccgccgccgggagggagcgggctggaggggccgagacccgtggcgagaagggctacccgggcccctcggagagcctccgggaaggggtgagggctgccgggtgagcaggcggagtaggaaatggaaccaagcgggcgcaagagcgcaccgggaagaatttccccgctgggtttctgggacgcaggtcgcacgggatgcgggatgctggcgaccttagccgggtgggggccgccggcctgggggcgcttcctcctttcttctcccttttccttctcacctgaacgaaagggggcctgcggggagggaagaaggtggaaagtttttgtattcttggtaaaaaaaaaaaaaaaaaatgcgtgaggaaacatgttttctggagatggtatcctgtccacaggggagcataaccccttttctgggaatgtattggagcacggacgggggtgccattgctcaggcttctaaacaagccaagtttctggtcaagggcctgggggagggggaggcaggtctttgaaagataccaaaaaaaaaaaaaaaagaaaaatctgcgtgctcattcctgtagcctcaagtgaggttattccccagctttgagggccaggttaaccaagcaaagtttgtgcaataaagtatctttgtggtattggattttcgagagccaccgttatcaatgggagagtgactgttgaatgctacaggcgtgtgcactcccccgtgggcatgaagagaggtccacgggctggctggattgggagactccggtcatttctgcaaggagagcgccacaggactgccttgttccctgggctgtcctgcccctgtgcgggctggacgtggtgctataaaagatgattcaggagtggcacaggctgagggggactaggctggagaaggtggagggaagagggagcactccgtgccctcttcctgtccatgggaaatgaaccatctgtgcctggtgtccaagtccttgacgttccagttgccctttgagagcacacctcaagcctgctgaattcttttaagaaccacctacaagatctgagaagtccgcccatgctttctgtcaactccggcctctttgaccttttcttttgccaaagaaaattctaaaccactgggattcgtgaggctccgtgagagaggcaagaagcctggagggtccactccgttgctcttttcccttggtttgctccctagaagccatggtccccactgggcccttcttgcccgaggctgtgtgatagacaagccctattcctaaggtcctgggtcccccaccccaccccacaccccgaccttgtgaatcatcatcttcatattttccctaacttatctttggtaacccttgtaaaatggcaggcttactgcggatgcttaatctcttttaaaagtgctgtgtctagcgggaagaagagtgacatttactaatatggttgcaaattacttttgaagtttatgcacagctgtttaaaatccctctgagatcagtgccattgtttgatgcaggtgcttaccgcagaaggctcttgttagtcccttcctcctgctgattgaacatacatatatttaaagacgtggcgtagggagagcttctaaaacctgcaaagccaaagctgcacagctcctgcaagttagcgatccactctaagtttttcagttgttgtttctgtcttcttgcctctcatgaacttctgtttctgatttcaagagtaacctgctgggcaccatcagcctttgtttcagtgacctgcgattttctt

SEQ ID NO: 1884204 - DNA, 4001 bp, Homo sapiens
ggattttttttgtgaagccaagcttttaatgaaccaagttcattaaatgtattaatcatatactatctcttcagaaaaaaaggcaagagattggcctttagtgtggcacaaatatatttctagattcaaaatatttaaacaggttaataggactaaaaagaaacattttcaaccttctgattggcaggcggatttttctctacgtttcaaagtcattcaaacttaacacagcttgcagatttcctagtacactgaaggtgcttaacgcattgattcctgacaggataatttcctggacagatggaatttgggatgggaaggacactaatataactagggtaccattcaagaattgtttagatgatcttcttaatattacctttgaaactgaaggaactagaacacagaccatagtaaattgtgttttaattactccttctcccagtaaactttaggatttttttactttaagattgtcactggctttacttggtggtggccccagttctgactatagtaggtcagcatgtggagtcattatagacagcctaaatctatacagcttagaggaagacaaaataaatatatcttactcttttttaattcaatagtgattattcaatcatctctcccttttccaaactcacaaaacagttgcttattttctgacacttataatatcaacctgtttttaaaagaattatgtatgcttttatatttattgctataattttattgttactacatcttttattattactgtaattagaataaagagaactttattatttaaaatgagagctgtgtctcataaatatttgtattcactgtgcccctccccccaccacccatctcaccaaaaaatttaaaaaataaaaataaggtaacaacccagagggcagcccaatgccagggctctaggcttccaataagtttttgttgaattaaatagatcatttcccatttataagcatgacatcattcttatacaccagccttactttattatatccacacaccaatttcaatgacgtcaaattcactttctaattcactttcagctcttcttctcctcaaggttgtttcttttctccctagaaagggtattgcgtggtcccgtgcaaggtaagacttgggagcaaaccctgcattcggaagcgttgcgatgtgatatactaatgaggaagtcaggcgctaagccctaagggtttcttatttctccacattagcccaccactgagaagggagaaccggggaaaggcgactgacctggcacgttggaccctgtccgctttggtcccggccactttgatctcacgcgtctgcctaatcaagttcatctaccgccgcgattgccctgattcaaagaacaacattaaatggtttgattatcggatggtcatttccctcttccctccacccctgatctaatttctaaacgccagtctctcgcctccctctctaaacttcccatcaaaagagaattagctcttcttccttcttaccctcgtttgatgtgcaaatttccttctctttgcacatttttctcgcagtggcggggggaggtgggggaggagggcaactgaaggacctcaaagccggggatctaactcagatctgcaaactgcgactctaaagggttaatgagcaacttgcacccgccacctggccctctcagaggcgtcttgctagagccattgaattacagaccggtttgtatttaatactgaatatgacttgtgtgcacagtcagcgagtattggcataaaggagaggggcaaaaagtgcttttgcagagcctatcacccctcggctctgtaaagtatttcagatccggataattcaacccttactgccaggcaagggcacccaagttcccagagttcctgctgccgcctgcatttattaaagtcgtctgctataacgctcgctggtagccttcaccccgaaggtgagccgggccagccgagcgactaagcaagggaggggcggggtgaagagtgtcaaaggccccccttcatgtacacaaacacaccccctcccagcccctcccagcgctttgaaatcccatcccggctttgttgtctccctcccaaggggccggaatgctccgggcccgcggtataaaggcagccgcggtggcggtggcggcgcagagctctgtgctccctgcagtcaggactctgggaccgcagggggctcccggaccctgactctgcagccgaaccggcacggtttcgtggggacccaggcttgcaaagtgacggtcattttctctttctttctccctcttgagtccttctgagatgatggctctgggcgcagcgggagctacccgggtctttgtcgcgatggtagcggcggctctcggcggccaccctctgctgggagtgagcgccaccttgaactcggttctcaattccaacgctatcaagaacctgcccccaccgctgggcggcgctgcggggcacccaggctctgcagtcagcgccgcgccgggaatcctgtacccgggcgggaataagtaccagaccattgacaactaccaggtgagaggggtcgggcactcagaggatgctctgaccttgaaagggtcctatctggagacgagggagtagaacgtgctgaatgtgtgcggttcagggagcatttggtaaccctgcatttgggagcagtgggcagtaacaggttttggagaggtggacagataaggactgtgatcagcgcccgggtccaagagggcgggtacctggacgtctgggtgcctcaccctctccccgaacccttcccacagccgtacccgtgcgcagaggacgaggagtgcggcactgatgagtactgcgctagtcccacccgcggaggggacgcaggcgtgcaaatctgtctcgcctgcaggaagcgccgaaaacgctgcatgcgtcacgctatgtgctgccccgggaattactgcaaaaatggtgagtcctgaaagctccctttcacactaaaactgtccagcctttgagcgtctatgaattgggcgggggcggggggttggggggggtggggggagaaatctccgccctgagaacactgcggcgccacctgcaaatgggtgttcagcatgcaggattccgctgaagtatcttcattgcaagtgtttaatcgggaagaagagagaagttgggaggtctctgaggtccttatcttcctccgtgtccctcaatgattcaatacaacggttcacctcgtagtggactcttccataaaaatttgtctggggagaaccttgaggtcaattgagaagggggatgatgaggaggacgatgggatcatacagatatcaaagaaaccagctttggcgttcagctgtccttttcatttttcttattgtgattctcacagttttgccagactggcctcgccttctgatttttgctgaaactgttgtcagccagaggactgatttatctgcattggccatttttaagagagatcttggtaccctcacaacttgacttctccatccttccccctccctctaccctctgctgccttaatataagtactcctccccccaaccacagatccactaacttttaatttttcaaaaggtggatttagacagctaaagaggtctccagaaataagctaacagggcgacgaccctccttaggacccagcagtactccaggatgaactaagtaaatctctgtaatatagaaattacacagtaaagtaactggccggtgagattgcaatgttccaggcagctggaattgcatttgcttaacttagtctggtaggacccatatagcaccaggggcagagaagttatttttaagaacatttttaaagtgactgagtttctttttcttaccccaaaggtaatattaaaatgggcagaaatctcacttgcccctaccacagttggtgggaaagtattttaaatggctatactggggatattacctatgactgactgtatacagtatacacattggtgcttctgtccatctgga

SEQ ID NO: 1884205 - DNA, 4001 bp, Homo sapiens
agattcgagcacaagagttgtgcattttgttatttatttatttatttatttatttatttatttattttgagacagagtctcgctctgtcgcccaggctggagtgcagtggcgcgatctcggctcactgcaagctccgcctcctgggttcccgccattctcctgcctccgcctccccagtggctgggactacaggcaccagccaccaggcctggctaattttttgtatttttagtagagacggggtttcaccatgttagccaggatgattttgatctcctgacctcgtgatccacccgtcttggcctcccaaagtgctgggattacaggcgtgagccactgcacctggctgagttgtgcattttagctgctagcatcaagaacttccttttctgccgccctagcacagccaggtctaaactggagccaattttcttagctaagaagtgcacactggacctgagccagactagaccagagtgtcccctcagcctctcaggaatcttttttttttttttttaaaaaaaaaaaaaaaaaaaaaagacagtctcactctgtttcctaggctggagtgcagtgatgtgatctcagctcactgcaaccttcacctcccaggttcaagcaattctcctgactcaacctcctgagtagctgggattacaggcgcccatcaccacacctggctagcttttgtagttttagtagacaagggttttcatcatgttgcacaggctggtctggaactcctgacctcagatgattcgcccgcctcggcctcccaaactgctggaattacaggcctgagccgctgccgccccagcccagaatctactattccacactctcttgcctgttggctgggtccgtcccttctgctcagaaggatcaggcctcccagcctcctgctctgtcactggggagtcaagctcctgggcatccacctctacacagtgagcctcagtctggccagcaaagatgagacaggggggcaggaacaggcagtgggcccccaggagaaccaaggctctcttggccaaggtgaattttcaacctcatcaaccagtaccagcatcgcctacagatgtagaggtgagggcagcccgggctgcggacccagcctgagccaatgttgctggcagacaaaaggcaaaaatgccccatgcccaccagcagacccaatgcgggagtcccgagagactgggatatggtcctccagtagccaggctgcacgtgtcgctggcagtggcatccctggggctcctttcaacccagccggcttaaaggagctctagggcccacaggaggggccatctggcctgggcattcaggcagcttcagcaggcggcagggacgggaaactcagcccacgcgtctaacagctctgcaggctggaaggggccacggggcctggtgataacataaagcttcagtgtcggagttactagactgggtagcttgtggccggcgagttacctgatgcctacacgtcctggtttcccatctatgacacggagacggtcattcctgtgtggtggatggcaacacgtggcgcggagggagcccttgctatacccgccgctggcatagcgcgtctttgtgcctcagtttcgtcacgcagacaggcgagcagaccgtccacccggcacggcagacgaggagggcaccgggccccgcctgcctcctccttgtttctcctctgcagtcccaggtctcggcttagctgtctcctccgggaaggcccgtgctggcccgcctgctcccgggaggtcgcactggccttcggtgccgaggtgggtgcgccatcttctttgcgtgtcttgtcccttctgctgcgtcctggccgatgtcgtgacccgccgtgacgggcaggggaggcagagccgaaaggcccaagcagggtgccgcactccgtgctaacggtaaagtggagggccgggtaagcaggaggccaccagagcagctgccgcacgcggtgctgtcctgcatgcgactgaggcccaccggaagcagggagcacttcagcttaaggggagggaggaggcccgccggaagaagggggagggggcccaccggaagtggggggagcttgtcctccggaaagcgggggaggaggcccgctggaaatgggggaagcacgcgtgctggaaagagggggaggaggcctgccagaaataaggggagcatgcccaccggaacggaaggaggcggcccagcagaaatgggggagcacgcccactggaaaggagggaggaagcccagcagaaagcggggcgagggggggcatacccaccggaaagcggagcacgccagccagaagggggaggaggcccgccagagagccgagaggacgccgccaaaacagggcagtgtggaggagcacacccaccagaagtggagagcatgtccagaaagaaggagcacttcaggaagccacgggacttacaggggaagaagaattcacaaggataacacgacagtcaccctatatagcaatggtccagtcactggtcaccttccagaaacagggcccccatgaccagcgagaggcgggatgcccagcaaagccacaacgcgtctcgcccgctcattccccatcaccgctcagctcacgggccaggggacagttaggaactgtgggttctgaggtctcagagcaagagacaaccgcctaagagcaaatagaagtctcaggaaacagaagcagattctgtcaaaagtctgttgaagtgtctttgacaccaccagacattaaggacctttgtgtttttatttttatgtattttcttttcagatattattttaggttcaggggttaaatgtgtgggcttgttgcatgggaattaggtatacagataattttgtcacccaggtaagagcacagtacccgtagtttctctatcttctccctcctcccaccctccaccctcaagtaatcctcagggtctgttgttcccttctttgcatccatctgtactcatcatttagctaccacttgtaagtgagaacgtgcagtatttggtttttccttcctgtgttattcacttaggataatggcctccacctccatccacgttgttgcaaaagacaggatttcactctttttatggctgcatagtattccatggtgtatatgtactgtatgttctttatccaatccaccatccatgggcatttaagtggattccaagtccctgctattgtgaatggtgctacgattaaggcaagcgtgcatctgtctttttttttttttttgagacagtctcgctatgtcacccaggctggagtgcagtggcatgatctcggctcactgcaagctccacctcccgggttcacgccattctcctgcctcagcctcccaagtagccgggactacaggtgcccaccaccatgcccgactaatttttttgtatttctagtggagacggggtttcaccgtgttagccagggtggtctcgatctcctgacctcgtgatctgcctgcctcagcctcccaaagtgatgggattacaggcctgagccaccgcgcctggcttttttttttttttttttgggacggaatttcactcgttgcccaggctggagtgcaatggcgcaaccttggctcagtgtaacctccacttcccgggttgaagccattctcctgcctcaccctcccgagtagctgggactacatgtacccaccaccacgcccagctaattttctgtacttttagtagagatggggtttcaccatgttggccaggctggtctcaaactcccggcctcaggtgagccatccacctcggcctcccaaagtactgggattgcaggtgtgagccactgcccgcgtctgcatgtgtctttttggtagatggacttatattccgttgggtatatacccagtaatgggattgctgggtcaaatggtagctctgttttaaattatttgagaaatttctaatctgctttccatagcaaactgaacagtttgcattcccaccagcagtgtacacgtgtacccttt

SEQ ID NO: 1884206 - DNA, 4001 bp, Homo sapiens
gtggggcgtgagtgtgcctggatttggtgtccatggggtcctggaaccgactccctgagtacagcgaggccgtttgcagtagcaggtggtttcttttgtagtttccccattggtttcgccccacaccatctctctcatgccgcagctgctgctgatgatgactgatgacctgggtgggcgatgccaggccccctctcagctcaggccacttccttggagagactcctgtgctaagggcaccatttagcaaaagtccagattttgggatacggaaaatttgggggacgtgaattcactcaaataaatgttcaaagttggcctcagagccttgcgttcttgttttataaaagatgcaccttttgggggaaatactgcttaacaacatttaactggaaaggcactgaaacaaagttaagctttttttgcataataccttcacgtggatacggattttcatataattgtaattgttactcatacattctactaagtcttctgctatttttacttaacgacttaacatacttgttcattcagtcacgagtttggttgttccacagtttgctggggcctccctgggacctgagcacagtgctggggatgcaaaagtaggtggttcctgatgggatcgtgtccacgttggtggctctgcttgtaaggagtccacgttggtgggggaggccgactggtgaccggaacccacgctgtgacgccatcattggtgtgatgcaggtgaggacagggtctgtagatatgcgtggaggacggtggtcccagacctgggcaggtggaggtgcccctgaggcccccagtggacattgactgagtgtggcgagagctggccaggagagagtttgggaggtgtgggagagacaagagcaggaggggtggcaggggctaggatggaaaggggcttctgcagaaacgggggctggggcctgagccctggcaccgggagagatggagagagggcagtgccggctttggaagagaaacagccagagctgtgtagcctcggggtcctgcatggacacaccctcagcttcccccgtgaggcccacgaatcccagggggagtttgtgttatgccacggacctctcacaagtgggggctgaggcagaactgaggacatctgggttccatggtggatcagccaggattctggttgcaaattacagaaaacaacttaaacttatgcagggaagtgagcatgagggggggtcggcccagagcactctggccagaagccatctgggctctaaggctgggaggccccttgccagctcacgtgctgtggaatggcttccccgcctccggccctcggcaggtggaaggtgctgcctggcagcccctgcaaactgaaggggcccacgtccctcctggctctgcatcccattctcagggacacggctgtcatggggggaccagctggggcaggggaagagtatagggaacccagtagaagtggccgtggactctcttaggaacgataaccgggtcacctaccatagatgaagatgttgtcggcctgcgttcttctcgtgttggtctggggcgtgtggctgccgtgggctggcgttatccacagccccggtctggggcttgcagtggctgtgggctggcgtggtccacagccccgggcaccatggtccctggccctgaaatcgcatccagtgctgtgtcacctcgggccagctgtctcctgaggggaagggaacagggaacagccctccccgtgtggcctccccagcaccacccaccccgcaggacctccagtgttgactctgctggggtcttctctctcctggggggtccttgtcccaacgggaggactccatgggccgcaggaggtgtcaagctattttctctcctggaactgggttgctggcagctcccagatgcaggaggaaaggctcagaattgccttcctaataaggaattgttgatgtgaactttggacggcaaacactgcttacatttccttttccgttttgatgtgttaatggtgtgcggcaacgccgtgacgcacggggacgcaggtgacgggcacccccccacaaggggaccatgcacctgtttgataataaggcatgcttctcttactgcaaataaaaacttcaatggttttctgccagaaagaccctgtcttttatgtaggatacatagaggatcatttggcaagtgattggggattttgggttaaactaaaaataaattaatttcattttatagcactctgaacacatttgagttaattattcatcgagaatttgaatagcacacactgttctgacttccgacttcccccaatgaatggcatttgctgtaacgtgacaaaaccctgagtcttagaattattgggtaatgtgaaaaaaggaaaagttggttctctgttgttttgctttaaggaaattatattattttacagtcacttagttttctcctttccaataagaaaaattgctttcttactacctgaaaattcgtgaaggtcaaggggacacaccctgcagtgcattaaaagccaccatcaaatgtggacctggactcagtttccctctgttccctcccaccctcaaatgtggacgtggactcagtttccctgttctctcccaccatccaatgtggacgtggactcagtttccctctgttctctcccaccctcaaatgttgacgtggactcagttttcctctgttctcgcccaccatcaaatgtggacgtggactcagtttccctctgttctctcccaccgtcaaatgtggacgtggactcagtttccctctgttctcgcccaccgtccactgtggacgtggactaagtttcgctctgttctctcccaccgtccaatgtggacgtggactcagtttccctatgttctctcccaccatccaatgtggacgtggactcagtttccctctgttctcacccaccctcaaatgtggatgtgggctcagtttccctctgttgtctcccaccatcaaatgtggacgtggactcagtttgcctctgttctctcccaccatccaatgtggacgtggactcagtttccctctgttctctcccaccctcaaatgttgacgtggactcagttttcctctgttctcgcccaccgtcaaatgtggacgtggactcagtttccctctgttctctcccaccgtcaaatgtggacgtggactcagtttccctctgttctcgcccactgtccactgtggacgtggactcagtttcgctctgttctctcctaccgtccaatgtggacgtggactcagtttccctatgttctctcccaccatccaatgtggacgtggactcagtttccctctgttctcacccaccctcaaatgtggacgtggactcagtttccctctgttcttgcccaccctcaaatgtggacgtggactcagtttccctctgttctcgcccaccatccaatgtggatgtgggctcagtttccctctgttctctcccaccatcaaatgtggacgtggactcagtttgcctctgttctctcccactgtgaaatgtggacgtggactcagtttccttctggtctcgcccaccatccagtgtggacgtggactcagttttgctctgttctctcccaccatccaatgtggacgtggactcagttttgctctgttctctcccaccatccaatgtggatgtggactcagtttccctttgttctcgcccaccgtccaatgtggacttggactgtttccctctgttctcgcccactgtccaatgtggacgtggactcagtttccctctgttcttgcccactgtccaatgtggacgtggactcagtttccttctgttctcgcccaccgtccaatgtggacgtggactgtttccatctgttctcgcccaccgtccaatgtggacgtggactcagtttccctctgttctctcccaccgtcaaatgtggacgtggactcagtttccctctgttctctcccaccgtccaatgtggatgtggactcagtttccctctgttctc

SEQ ID NO: 1884207 - DNA, 4001 bp, Homo sapiens
ttgagctttgtgggtcaacttatatgtgaattttttcaaccaaactcagggagaaaatacagtgttcctgccatgtgaaacgtgtgtcggagggccgactctgtacacgcaggttcggcaggtccacttgtggggcgtgagtgtgcctggatttggtgtccatggggtcctggaaccgactccctgagtacagcgaggccgtttgcagtagcaggtggtttcttttgtagtttccccattggtttcgccccacaccatctctctcatgccgcagctgctgctgatgatgactgatgacctgggtgggcgatgccaggccccctctcagctcaggccacttccttggagagactcctgtgctaagggcaccatttagcaaaagtccagattttgggatacggaaaatttgggggacgtgaattcactcaaataaatgttcaaagttggcctcagagccttgcgttcttgttttataaaagatgcaccttttgggggaaatactgcttaacaacatttaactggaaaggcactgaaacaaagttaagctttttttgcataataccttcacgtggatacggattttcatataattgtaattgttactcatacattctactaagtcttctgctatttttacttaacgacttaacatacttgttcattcagtcacgagtttggttgttccacagtttgctggggcctccctgggacctgagcacagtgctggggatgcaaaagtaggtggttcctgatgggatcgtgtccacgttggtggctctgcttgtaaggagtccacgttggtgggggaggccgactggtgaccggaacccacgctgtgacgccatcattggtgtgatgcaggtgaggacagggtctgtagatatgcgtggaggacggtggtcccagacctgggcaggtggaggtgcccctgaggcccccagtggacattgactgagtgtggcgagagctggccaggagagagtttgggaggtgtgggagagacaagagcaggaggggtggcaggggctaggatggaaaggggcttctgcagaaacgggggctggggcctgagccctggcaccgggagagatggagagagggcagtgccggctttggaagagaaacagccagagctgtgtagcctcggggtcctgcatggacacaccctcagcttcccccgtgaggcccacgaatcccagggggagtttgtgttatgccacggacctctcacaagtgggggctgaggcagaactgaggacatctgggttccatggtggatcagccaggattctggttgcaaattacagaaaacaacttaaacttatgcagggaagtgagcatgagggggggtcggcccagagcactctggccagaagccatctgggctctaaggctgggaggccccttgccagctcacgtgctgtggaatggcttccccgcctccggccctcggcaggtggaaggtgctgcctggcagcccctgcaaactgaaggggcccacgtccctcctggctctgcatcccattctcagggacacggctgtcatggggggaccagctggggcaggggaagagtatagggaacccagtagaagtggccgtggactctcttaggaacgataaccgggtcacctaccatagatgaagatgttgtcggcctgcgttcttctcgtgttggtctggggcgtgtggctgccgtgggctggcgttatccacagccccggtctggggcttgcagtggctgtgggctggcgtggtccacagccccgggcaccatggtccctggccctgaaatcgcatccagtgctgtgtcacctcgggccagctgtctcctgaggggaagggaacagggaacagccctccccgtgtggcctccccagcaccacccaccccgcaggacctccagtgttgactctgctggggtcttctctctcctggggggtccttgtcccaacgggaggactccatgggccgcaggaggtgtcaagctattttctctcctggaactgggttgctggcagctcccagatgcaggaggaaaggctcagaattgccttcctaataaggaattgttgatgtgaactttggacggcaaacactgcttacatttccttttccgttttgatgtgttaatggtgtgcggcaacgccgtgacgcacggggacgcaggtgacgggcacccccccacaaggggaccatgcacctgtttgataataaggcatgcttctcttactgcaaataaaaacttcaatggttttctgccagaaagaccctgtcttttatgtaggatacatagaggatcatttggcaagtgattggggattttgggttaaactaaaaataaattaatttcattttatagcactctgaacacatttgagttaattattcatcgagaatttgaatagcacacactgttctgacttccgacttcccccaatgaatggcatttgctgtaacgtgacaaaaccctgagtcttagaattattgggtaatgtgaaaaaaggaaaagttggttctctgttgttttgctttaaggaaattatattattttacagtcacttagttttctcctttccaataagaaaaattgctttcttactacctgaaaattcgtgaaggtcaaggggacacaccctgcagtgcattaaaagccaccatcaaatgtggacctggactcagtttccctctgttccctcccaccctcaaatgtggacgtggactcagtttccctgttctctcccaccatccaatgtggacgtggactcagtttccctctgttctctcccaccctcaaatgttgacgtggactcagttttcctctgttctcgcccaccatcaaatgtggacgtggactcagtttccctctgttctctcccaccgtcaaatgtggacgtggactcagtttccctctgttctcgcccaccgtccactgtggacgtggactaagtttcgctctgttctctcccaccgtccaatgtggacgtggactcagtttccctatgttctctcccaccatccaatgtggacgtggactcagtttccctctgttctcacccaccctcaaatgtggatgtgggctcagtttccctctgttgtctcccaccatcaaatgtggacgtggactcagtttgcctctgttctctcccaccatccaatgtggacgtggactcagtttccctctgttctctcccaccctcaaatgttgacgtggactcagttttcctctgttctcgcccaccgtcaaatgtggacgtggactcagtttccctctgttctctcccaccgtcaaatgtggacgtggactcagtttccctctgttctcgcccactgtccactgtggacgtggactcagtttcgctctgttctctcctaccgtccaatgtggacgtggactcagtttccctatgttctctcccaccatccaatgtggacgtggactcagtttccctctgttctcacccaccctcaaatgtggacgtggactcagtttccctctgttcttgcccaccctcaaatgtggacgtggactcagtttccctctgttctcgcccaccatccaatgtggatgtgggctcagtttccctctgttctctcccaccatcaaatgtggacgtggactcagtttgcctctgttctctcccactgtgaaatgtggacgtggactcagtttccttctggtctcgcccaccatccagtgtggacgtggactcagttttgctctgttctctcccaccatccaatgtggacgtggactcagttttgctctgttctctcccaccatccaatgtggatgtggactcagtttccctttgttctcgcccaccgtccaatgtggacttggactgtttccctctgttctcgcccactgtccaatgtggacgtggactcagtttccctctgttcttgcccactgtccaatgtggacgtggactcagtttccttctgttctcgcccaccgtccaatgtggacgtggactgtttccatctgttctcgcccac

SEQ ID NO: 1884208 - DNA, 4001 bp, Homo sapiens
aaattagggggttgtgggtcagtaccgcagtgtcagagcttagagccttcccctctaacttgagagatgagccagaactaaggggaaagggcagcaagatataatgaccaaaaatacaggctccagaatggagacccagacccggctccaccacctgagctgcatgacttcgggcaagtatccatggagaggaacaaacgtagtaacatgtgggcacaggcagttagcacagggcatcccagcacaaggctgacgcacagtaaatggttgttgctattattatctttattgttgttaaggggctgtcctgctcagatcctgggctggagaagcacagccctggagggaacgggaaaagcagcccaagaaattccccttcccccaaccacgcgctctggcctgtttccacaggatgagcccacacatagcatatggggaaactgcgaccccaggataggggactcgccctctcagcactttccttccctaatagagaatacactatcatggctcccaacaccaagacaagctgaggcctccccctaaccctgacagccccaccaagccaaatgccagggtggtccaacgccctgcccacgtgcacactttgtcactggagagtgaacactcctctaaaaagcagtggttttagcttccaatccctgcatagcccaaactctgtgcgatgtgaaccagccacttcccctctgtgcagttggcctggggacatttgggggtcctggggtggtcagaagagagaataggctccaggagtggcatggggtcccctcttctccagagtggtctggaatatgggtccacgccagcacctccaactgtggggtacttccgtcagcctgtccgtgagtgggtgtgtccccagcatgtgcatgttgggctaagtgtgtggcgtgtgatgctgcctgcatgtgagctgggtgcagtggtgacgtaggcaccttccctgtgatgggacacagcctccccttcactcctcccaacaaaccacagtctctgactctctcactgcccacagccatgcccagccacaaggcaaaccaggcatcccaactgggcacacactgttcacaccctatctggggatgggtgtaccccacagcctccaacccccactccaccgcccccagcacaaccaaggcaaatcaacacatagaccttccagcacacacccagacgaaacccagcatggctcagacccttaaccctcactccgcaactctctggccagaaagcggaagtggccaccaagatccaacctgcaatccttgcctcccgccttctagttcatcccctgccctgtctcaggacccccttcggcccaccatcacacctcattcgagggccctgaaccccatcggtgggccgcaagtcatattcaatctagaaaagcctcttcggtttttgaggcccaccttggccccagggtctgtgccctccctgcccccccagcccgtgcccgcctctggctgcccatgacctctgtccctaccaggctccgccctcggttggcaccgccctcggtgcctcccacaagccgccccctcggtcgccccgcaacctggcgtgggccgcggccccaacgccctcaccgcctttttcttcttgcggctctgcaggcggctgaccaccaggtcggtgtagagcacgggcttgaggctgcgcgagcgctgcggccagccgtagcacagggtctccgcgccgcggtgggtgcgcccgtagcgcacggagcacagcgagcgcgagcgcagccgcccggcgctgctgtggatgctgttgacgccgatcatgctggcccggccggcgcgccgcggcccccggccatgcccccgtccgccctcggcccccgggccgcccggacggcccgcggaccgctcccccgacagccagcgcgagcggcgcggcccggcccgagccggcccggctctcacggacgcacggagtgcgcggcggcggcggcggcgctgtctgctctgcggcttggctagagcgggaggggggcgccgacgggaaagggagggcgagggctgggggcggggaccgcatgaaatggaggcgcccgatcgcgaagggggccctccccgcgcggccacggggaggagcctggggaggccagcgtgggtggcagctccagggaggctgagagcaccgctaggcctggggctgtgacgctgggcggacccggcagggtctggaactcccttctggctggtctgggttggggtggtgggaggggagaggtcggaccgcttccctgcagcccttttccactgagccaagaggggcctcgagggaggacggaggcagggaaggaacagccctggcctcatccagctcacccgcagataccccacccatatatagatctgaagtcacgtaacacacctcgattctgacatacaccccaacaaaccagacgcaccagttcacggtcaccccaactcgcagacactacccattcagatggacacttcaaaacttagaatctttagctcacaaagatacaccccctactcagaggcatatggcatacctcagacacggccaattcgaagatgtaaaccccaccacacataaacatccagcctacaccccaactcaaacacacactctgaatcgtaagccctaaagcacaaacacaccaagccatacaaacccttgattcacgacgcccgggcacacagatgcaactcaactcaagcaacaccccagctcaccatggacgttccctctcagatataccccaaactcagaagcccagcaccccaagctcacagaaacgccctaggacaatcctgtgctgttacatgtatgtagtggagcagagacacctttgtcctagcctgggggtttcttcaagtgagtccaggcctctctagataaactaccaccagatcagggagaggagtgaacccactggatgagccactcccttctcctaccggcaccagcccctacgtatctgagccctcggttgcgggccatggagctggcgcctgggaacgggacctgctcacagggagccagaaagcagtttctagctccagctttgcgctaactcgctgccagaccttggaaaagcttagtccctctcaggcccctctccctccgggttcctgcagcgcagcagcaccgggaaggtctttttggctgtccacgcggcgggggagcagtgtggagtgtacccccatccaatccctgtcccgtgcagggacccccgcaactcccgccttccaccccagcgcacactggaggaggggaactgaaggcaaacgcaggggccggggccgcctgctcgcgttttccagagccgggtcccctcccccgccgtgcgcagtcgcgaccgcacgcatgtgcgcatgttccgggagagcctgcgcgtggggcctggggagggggcggtccccaggctgagtcacgagagcccgggcttccgtggcaggagccgggggtcggcaagccccagccctgccctccctccgactctggactccgtcgccgactgggtcctccatccttcccctccagcgacttctaccctgccccgccccccaccttgagcagctccctagggaagtcgccgccatcattgaggccctccaggttcccgatgaagtccccgcaggtcatgcgcttcccgatgttctaaggaagggaacggaggcctgtgagtttggagggcccttggcctcccaggtcctgcatgtctggccaggggtttgttttccggctcctgcccgcccgcctccactcacatggccgtggagatccgtgttgagcagcatgagcgcacaggtcagcgtgtgggcgccgtctaggggagagctgactttcagccttggctgcctcccagggacccttcccacagccatcttccccaacctcccatttcatccccaccccctttggccggcaacttcctacctcctgaaccccgctagtaaaccctccccacaaagagctcctcttccagcagatccgtc

SEQ ID NO: 1884209 - DNA, 4001 bp, Homo sapiens; identical to SEQ ID NO: 914025

SEQ ID NO: 1884210 - DNA, 4001 bp, Homo sapiens
aacacagacaacgcctgcctcaccagattattacaagaatttaatgagatattgtggcacagtgcctagtatatcacagctgctccggaaatgcaagctcttttatttttcacctagtgcactttcacctgtaccaacttgttgtcaaatcaagacaaagtagagcagaggttaagttacttggataaaggaggagtggcggcagagggaaggttgtagaatactggaatggagcctatttagcaactgcgcatccaaattttagtgaaggaaatgaaaagaaaagtccactaaaatggacaagtgtcaaaaaaaagacatccccaacttcattaaggtcacagcttaacctgctagtggtaaatctagagttgtctacctaaaacaacaacaaaaaagatcccttgtatcagtatttatacttaaaagtagcgtataagaaacgggttttactctaggatgtcggtaaacagaagaacgacacactttgttattcaaaccatgctaagagaaaaatgttaatatgccactaaatcaactgggaacaaaccaattatctgcaggatattaaaatgatagctggtgttaaggatgcttcaaaaccaagcccatgatattggaggaatcaataattaatccaagtaggtatacagattttcttcattgtctgtgaacaaaaccacaggttgaattcaaccttaaaatgccaagaggcatatttcatggattagactggaaagctatgaggctattccacaaaaacctgcatgccctccctgttagggaatgtttatggttcagacacacatgaaccagggctgactatttcttagtttcagaagttcactgggtccctcttcacccaaccgtaaggtaaatgccatttcatatacagctttttgaaatgcagcttattttacgattctctgctgttgctttatgggagaaattttatttcaaagtttcataggatgtgaactgaactcgttattttgctccaaactcattgtttaattgacaggaaacatgcatctaaatcatcttacatgcatggcataagcagctacataaatttaacaatgggtggattattactatttagcatatttatagaattttagactcaggaagcattttacaaatcttttattagttaatccttacgcttccgagtgcatctgacaggtggtaaacaatgctttggggtttaaattgccaatacatgaaaactttaatggggaaaaagaaatctacagccttcctccttgctcccaaatgtgtctagggcacatttttgatacctacttcttctcaccagagactaaggctagcggcccaagaagcagagttgcacacactgaaacactagtaataaaaaatatatattttgggttttttcccagatctggtggccaacaccaggggagaccttctcaccaagagcaagatgatgcgacaggattctcagcacacacacctctcagtaatacagcgcataaaaaggcacataaagaagcagtcaatttctctaaaactatacggtaaacttagtttcgaattcaaattctaacaatgccacacctgctggactcattatttgagtgacatcaccagtgattacttctcttaaaatacatgcatgtgtattgaaaaataaaactcaatttaaactaagagaatgtatatcttcatttttttttaattcccaagtgttaaaaatcaagtgagtattcaagctcacttgaataccagttcaaactttgtatgagtgctccaaaataccccatctccagacaccacaaggtgtggcatagcagggcaaagcaagcctcaataaatcaaagtctagttcttgacccaaacctttttacagcccggggctttcacggctaacaaaccaagaaaaatcaatcccgcatcaccttagggccgggcatgaggagctgcagatgctgcgcctactttcagaagaccccagtgtggcacgtccagcccagattcttatcttttctgactgacagtgactttatctctctaatccctctggccacccccgcctccgccagtgtgtgtgtgtgtgtgagtgcgcgcgcgcgcacgcgtgtgtgtgtgtgtgtgtgctgggggacgcttaggtaggaggctgctcaagacacccaaagtattctggaagcaagcaccctctggggccctgtgctttgtcagagcagctgggctagctgtgaggaggtcagcgaaaggtaaccaggtcaccctcctttcaagggtgcaaagggatgctccaagctctcgcgtccccatgagcctgcggatgtggggactgcgggtgggcagagagaccccccataatcccgcccaccctggcgcggctcctcccgggcgcgctcccgccccgccacgccccgcgacgcccgcgctacctggggacgctggaagctcccgcggcggctctgggtcccgccgggcggccgaggctggcgcgggctttgtaaagccgccgggacagcgccgaccccgccccgccccgccgaccccgccctctcccacctcggccgcctcccccgcctgcatcccgggccacagtccccgttccgccacctcgctcccggcccggcagccgccgccctgcggggcggggaccacgggtccctccacatcctcgcggcctgccggacagtcctgcgggcggggccccaacgcctaggcggtcccgggagccctgggccgcctccccccgccccccagggctgtcacccgctggcgcgtggggctcctactgggaccccggtctttggacctggcccctgtggccccagtgcctgcggcctcgccattctccgctcagggcccgaggggccgcccttcctggaggcctccccaggacccacccacctctgggacttgcgggggcatctcctgcaaatggacgccaagtctggggaaagtttctggcgatgtcaagggtcagccttttcttatagggacgttctctagccaactgatggaaactcaaggattccatcagggggttctgctgacatcacaaatcacacatggcttagtcgtttactaatggtcctgtcgttacttagtcgttacacatggtcctgtcgtgtcgtttacatagagactctccatccttactgcaaccttctgcacgttcgcctttggaggccccaagctagtgacatgtcagcgacagggtgtaaggaacttaatttttaaataaacaattaatattagaaacccgcacatttatacgtttgctgtgcaccaagctctaagtgtggccacctttgaatagttcagaccttccagtggtcaagatgatctaggccaatcactatcctgcacttcctcatctacagaacttttggtctttttactcttctttttcattttccctttgatattaaggagaggtaaaaataagatgcaacaaaatcagtttgaagagcttttaacagctggtgtaaaactttatgggagaggcagtctgcaatcattggaaataagattagaaaattatctgtacacctaactgcagttttaccatttttttgcatgagcttgcgtaatgaagggctagagatagctattatttttagcagaaataatgcttttctaagaattaagtagattaaaagtatgatatagctgggatgtcagatcagggtaaaactctattgacagaagaacgaacgaaacgagctgatagtataggagatccaacaactctttgaagtagtaaaattggttttgtcttggagtttatgcaaatggttatgctagaaaacagaacctttatagtcctagttgccttttaatgaattctttccttttcaatatctctatttccttcaactgtttctctttctaataagatataatttaaagattgctcaaagctttggacatccattcattcttcatttcttttcttcttcttcttcttattattattataatactttaaattctagggtacatgtgcacaacct

SEQ ID NO: 1884211 - DNA, 4001 bp, Homo sapiens
tcggtaaacagaagaacgacacactttgttattcaaaccatgctaagagaaaaatgttaatatgccactaaatcaactgggaacaaaccaattatctgcaggatattaaaatgatagctggtgttaaggatgcttcaaaaccaagcccatgatattggaggaatcaataattaatccaagtaggtatacagattttcttcattgtctgtgaacaaaaccacaggttgaattcaaccttaaaatgccaagaggcatatttcatggattagactggaaagctatgaggctattccacaaaaacctgcatgccctccctgttagggaatgtttatggttcagacacacatgaaccagggctgactatttcttagtttcagaagttcactgggtccctcttcacccaaccgtaaggtaaatgccatttcatatacagctttttgaaatgcagcttattttacgattctctgctgttgctttatgggagaaattttatttcaaagtttcataggatgtgaactgaactcgttattttgctccaaactcattgtttaattgacaggaaacatgcatctaaatcatcttacatgcatggcataagcagctacataaatttaacaatgggtggattattactatttagcatatttatagaattttagactcaggaagcattttacaaatcttttattagttaatccttacgcttccgagtgcatctgacaggtggtaaacaatgctttggggtttaaattgccaatacatgaaaactttaatggggaaaaagaaatctacagccttcctccttgctcccaaatgtgtctagggcacatttttgatacctacttcttctcaccagagactaaggctagcggcccaagaagcagagttgcacacactgaaacactagtaataaaaaatatatattttgggttttttcccagatctggtggccaacaccaggggagaccttctcaccaagagcaagatgatgcgacaggattctcagcacacacacctctcagtaatacagcgcataaaaaggcacataaagaagcagtcaatttctctaaaactatacggtaaacttagtttcgaattcaaattctaacaatgccacacctgctggactcattatttgagtgacatcaccagtgattacttctcttaaaatacatgcatgtgtattgaaaaataaaactcaatttaaactaagagaatgtatatcttcatttttttttaattcccaagtgttaaaaatcaagtgagtattcaagctcacttgaataccagttcaaactttgtatgagtgctccaaaataccccatctccagacaccacaaggtgtggcatagcagggcaaagcaagcctcaataaatcaaagtctagttcttgacccaaacctttttacagcccggggctttcacggctaacaaaccaagaaaaatcaatcccgcatcaccttagggccgggcatgaggagctgcagatgctgcgcctactttcagaagaccccagtgtggcacgtccagcccagattcttatcttttctgactgacagtgactttatctctctaatccctctggccacccccgcctccgccagtgtgtgtgtgtgtgtgagtgcgcgcgcgcgcacgcgtgtgtgtgtgtgtgtgtgctgggggacgcttaggtaggaggctgctcaagacacccaaagtattctggaagcaagcaccctctggggccctgtgctttgtcagagcagctgggctagctgtgaggaggtcagcgaaaggtaaccaggtcaccctcctttcaagggtgcaaagggatgctccaagctctcgcgtccccatgagcctgcggatgtggggactgcgggtgggcagagagaccccccataatcccgcccaccctggcgcggctcctcccgggcgcgctcccgccccgccacgccccgcgacgcccgcgctacctggggacgctggaagctcccgcggcggctctgggtcccgccgggcggccgaggctggcgcgggctttgtaaagccgccgggacagcgccgaccccgccccgccccgccgaccccgccctctcccacctcggccgcctcccccgcctgcatcccgggccacagtccccgttccgccacctcgctcccggcccggcagccgccgccctgcggggcggggaccacgggtccctccacatcctcgcggcctgccggacagtcctgcgggcggggccccaacgcctaggcggtcccgggagccctgggccgcctccccccgccccccagggctgtcacccgctggcgcgtggggctcctactgggaccccggtctttggacctggcccctgtggccccagtgcctgcggcctcgccattctccgctcagggcccgaggggccgcccttcctggaggcctccccaggacccacccacctctgggacttgcgggggcatctcctgcaaatggacgccaagtctggggaaagtttctggcgatgtcaagggtcagccttttcttatagggacgttctctagccaactgatggaaactcaaggattccatcagggggttctgctgacatcacaaatcacacatggcttagtcgtttactaatggtcctgtcgttacttagtcgttacacatggtcctgtcgtgtcgtttacatagagactctccatccttactgcaaccttctgcacgttcgcctttggaggccccaagctagtgacatgtcagcgacagggtgtaaggaacttaatttttaaataaacaattaatattagaaacccgcacatttatacgtttgctgtgcaccaagctctaagtgtggccacctttgaatagttcagaccttccagtggtcaagatgatctaggccaatcactatcctgcacttcctcatctacagaacttttggtctttttactcttctttttcattttccctttgatattaaggagaggtaaaaataagatgcaacaaaatcagtttgaagagcttttaacagctggtgtaaaactttatgggagaggcagtctgcaatcattggaaataagattagaaaattatctgtacacctaactgcagttttaccatttttttgcatgagcttgcgtaatgaagggctagagatagctattatttttagcagaaataatgcttttctaagaattaagtagattaaaagtatgatatagctgggatgtcagatcagggtaaaactctattgacagaagaacgaacgaaacgagctgatagtataggagatccaacaactctttgaagtagtaaaattggttttgtcttggagtttatgcaaatggttatgctagaaaacagaacctttatagtcctagttgccttttaatgaattctttccttttcaatatctctatttccttcaactgtttctctttctaataagatataatttaaagattgctcaaagctttggacatccattcattcttcatttcttttcttcttcttcttcttattattattataatactttaaattctagggtacatgtgcacaacctgctggtttgttacataggtatacatgtgccatgttgggttgctgcacccatcaactcatcacttacattaggtatttctccaaaagctatccctcccgcagcccaccaccacccaacaggccttggtgtgtgatgttcccctccctgtgtccctgtgttctcattgttcaacttccacttatgagtgagaacatgcggtgtttggttctctgttcctgtgttagtttgctgagaatgatggtttccagcttcatccatgtccctgcaaaggacatgaactcatccttttttatggctgtatagtattccatggtgtatatgtgccacattttctttatccagtctattattgatggacatttgggttggttgctattgtgaatagtgccgcaataaacatacatgtgcatgtgtctttatagtagcatgatttataatcctttgggtatatacccagttatg

SEQ ID NO: 1884212 - DNA, 4001 bp, Homo sapiens
gccacacctgtaatcccagcactttcagaggccgaggtgggagcatcgcttgagcccaggagtttgagactgacctgggcaacatagtgagattccatctctacaaaaaaaattaaaaattagttgggcatggtgacacatgcctgtagttccagctactcgggagactgaggtgggaggattgcttgagcccaggaggttgagggtatagtgaactatgtgacaccactgcactccagactgggcaagagagtaagaccctgtctctaaaaaaaagttgtctctagccttgaagggatttctctgaaaacaaattggttaaatataaatgttctagtctacaattgagaactctgatatactctgtgatcttataatgtttaaaattataaatgtttaaaaatgttttattcactttccacattatcttggctttttaaaattaaaaatagtctaacaggtacacgagactccatctcaaaaaaaaaatagtctaacaggtaatacacacccatggtttaacatttttttttttttttttatcttttcttttttttttttttttctttttttattattattattatactttaagttttagggtacatgtgcacattgtgcaggttagttacatatgtatacatgtgccatgctggtgcgctgcacccactaatgtgtcatctagcattaggtatatctcccaatgctatccctcccccctcccccgaccccaccacagtccccagagtgtgatattccccttcctgtgtccatgtgatctcattgttcaattcccacctatgagtgagaatatgcggtgtttggttttttgttcttgcgatagtttactgagaatgatggtttccaatttcatccatgtccctacaaaggacatgaactcatcattttttatggctgcatagtattccatggtgtatatgtgccacattttcttaatccagtctatcattgttggacatttgggttggttccaagtctttgctattgtgaataatgccgcaataaacatacgtgtgcatgtgtctttatagcagcatgatttatagtcatttgggtatatacccagtaatgggatggctgggtcaaatggtatttctagttctagatccctgaggaatcgccacactgacttccacaatggttgaactagtttacagtcccaccaacagtgtaaaagtgttcctatttctccacatcctctccagcacctgttgtttcctgactttttaatgattgccattctaactggtgtgagatgatatctcatagtggttttgatttgcatttctctgatggccagtgatgatgagcattttttcatgtgttttttggctgcataaatgtcttcttttgagaagtgtctgttcatgtccttcgcccactttttgatggggttgtttgtttttttcttgtaaatttgtttgagttcattgtagattctggatattagccctttgtcagatgagtaggttgtgaaaattttctcccatgttgtaggttgcctgttcactctgatggtagtttcttttgctgtgcagaagctctttagtttaattagatcccatttgtcaattttggcttttgttgccattgcttttggtgttttggacatgaagtccttgcccacgcctatgtcctgaatggtaatgcctaggttttcttctagggtttttatggttttaggtctaacgtttaaatctttaatccatcttgaattgatttttgtataaggtgtaaggaagggatccagtttcagctttctacatatggctagccagttttcccagcaccatttattaaatagggaatcctttccccattgcttgtttttctcaggtttgtcaaagatcagatagttgtagatatgcggcataaaaatatggaacgcttcacgaatttgcgtgtcatccttgcgcaggggccatgctaatcttctctgtatcgttccaattttagtatatgtgctgccgaagcgagcaccccatggtttaacatttttaaagaacagaaaggaatacgcagaaaggtagtccctcctgggtctcctgaaagaaaccattatcaccattgtcttgagtttcctttgagtgatctgtatacatctaagtatataaacttttttctatttattatttatttatttttccgccaggaacactgtgctgaccatttttattttttttaaaaaactttagaatttatttttgaccagtgatatgtttttgggcaggagtgcaagctcagcctgctgctagctcagatcctgcgtcagccctgaaggctgttcagccagcgacaccaggaaggttgcgctgtattcacacaaaactgtcctcctggttggatgccatgctttgtttaataccagttggtttacctattaaaccaactttctaccacgaataaaaatctgtatagttaatttacagttaagcagtttttgtaaaactttccaaaaaaaaaaaaaaaacttcctacaggaatggcagtgtttgaagatgtgtttgaaaagaaccctgatttcacatgcaaacaaaggtgaacatttttctagataatgtctcattagtttagacactctaataatacttttgagtctcaaataacacactagtgagtctggatcatttagtgtgtaaacccccaagttaaagacttgcagaattaaaaatgatgatcccattcctccgaggcaccgaggtctggagtactaacttacgattttattaggtcatgttctaaattgtaatttttcatgcactcagtacggaacagaagggcactgaggggcaagatactctatatttatgttttgtgttatattcctctgtcctttaaacattttaaaccatgtgtattcaaactatttttaattacaaaagccacgataatatggaaagtgccaaaactttttaaaaagtgttagtataggccgggcgcggtggctcacgcctgtaatcccagcactttgggaggccgaggcgggtggatcatgaggtcaggagatcgagaccatcctggctaacaaggtgaaaccccgtctctactaaaaatacaaaaaactagccgggcacagtggcgggcgcctgtagtcccagctactcgggaggctgaggcaggagaatggcgtgaacccgggaagcggagcttgcagtgagccgagattgcgccactgcagtccgcagtccggcctgggcgacagagcgagactccgtctcaaaaaaaaaaaaagtgttagtacattgtaagatcacagagtatatcaaaaccatcagttgtagactagaatattcatatttaacaaatttgcttatggacaaatccctcaactgctagagacagaacttttaaactaaagtgatttacacaattagaatggtatcctgaaatcattactgaaaaaatagtgtagcatgtcctttagaaagtcactacagatgtggccggggtgtggtggctcacacctgtaatcccaacactctgggggccgaggcaggtggatcacctgaggtcgggagttccagaccagtctgactaacacggtgaaacacagtctctactaaaaacacaaaaattagctgggagtgtcagtgggtgtctgtaatcccagctactcgggaggctgaggtaagagaatcacttgaacctgggaggcagaggttgtagtgagctgaaatcgcgccactgcactccagcctgggtgacagagcaagactccatctaaaaataaaagaataaataaaaaaagtcataaaaataagacttgaaagtcgaaatgacttctcgatccatgggttgcagaatggaggttgtgttagcaggcatgaaaacattaatctctttgtacatctctgtcagagctcttggatgaccaggtgtattgtcaacaagcagtcatattttgaaaggaatctttttctgagcaagaggtctctacagtgggcttaatgtattccataaaccatgctgtagatagatgt

SEQ ID NO: 1884213 - DNA, 4001 bp, Homo sapiens
ccaagcgagtaattaagggtagttatgttcaatattaagcaactaaatctattttgtttttagcatttactgataatacaatttcagtattctaagatattggcagctatgctaggcttggttgttactgagcaattactgcctagactctcaaggaatccctacaggctggggaaaggaagcttgatatcacttgcctagatatggttgtgatttcaaatggctacttactcatgattttagagaataaattcctgttagtttgagtgacatttggtgatgatgatagtgtttatggaacttattttcataagtcatatttttggtctattattttctagtaactagtctttaatccactcatggacatgcaatagttcaaatgttgttattcatctctgtacctagtgctgaagctgatgattatataatcctcctaaacatttacttgtgcaggagaagatcattggtgatatgctaccaatgactttgtgttctttaaatacgttgtgttctttttttttttgactttataatggaattttatgaatttttcaaatattagataataccaatgctacatagactgctcttaaaaagagattgccaagctatggccagtgggacaaatatggcctgcctgttattatcttatcttattttatttttttaaatcaatgtatattttattttatttatttatttatttattttttattatactttaagttttagcgtacatgtgcacattgtgcaggttacttacatatgtatacatgtgccatgctggtgcgctgcacccactaactcgtcatctagcattaggtatatctcccaatgctatccctcccccctccccccaccccaccacagtccccagagtgtgatattccccttcctgtgtccatgtgatctcattgttcagttcccacctatgagtgagaatatgcagtgtttggttttttgttcttgcgatagtttactgagaatgatgatttccaatttcatccatgtccctacaaaggacatgaactcatcattttttatggctgcatagtattccatggtgtatatgtgccacattttcttaatccagtctatcattgttggacatttgggttggttccaagtctttgctattgtgaataatgccgcaataaacatacgtgtgcatgtgtctttatagcagcatgatttatagtcctttgggtatatacccagtagtgggatggctgggtcaaatggtatttctagttctagatccctgaggaatcgccacactgacttccacaatggttgaactagtttacagtcccaccaacagtgtaaaagtgttcctatttctccatatcctctccagcacctgttgtttcctgactttttaatgattgccattctaactggtgtgagatggtatctcattgtggttttgatttgcatttctctgatggccagtgatgatgagcattttttcatgtgttttttggctgcataaaggtcttcttttgagaagtgtctgttcatgtccttcgcccactttttgatggggttgtttgtttttttcttgtaaatttgttggagttcattgtagattctggatattagccctttgtcagatgagtaggttgcaaaaattttctcccattttgtaggtcgcctgttcactctgatggtagtttcttttgctgtgcagaagctcttcagtttacttagatcccatttatcaattttggcttttgttgccattgcttttggtgttttagacatgaagtccttgcccatgcctatgtcctgaatggtaatgcctagattttcttctagggtttttatggttttaggtctaacgtttaagtctttaatccatcttgaattgatttttgtataaggtgtaaaaaaaaatatggaatgcttcacgaatttgcgtgtcatccttgcgcaggggccatgctaatcttctctgtatcgttccaattttagtatatgtgctgccgaagtgagcactgttgtgttctttaaataacttgtaaagcactagcaagtcataaaatttctggattatgtttaaagtatatgtagcattgttttaggatgtaaaatcatgtgtgtgtcacatttcaattcttttttattttttttttgagacaaggtcttgctctgtcacccagactggagtgcagtggtgcgatcatagctcactgtagcctcaacctcccaggctcagcaatcccactccagcctcctgagtagctggtactataggcacacaccaccaaacctggctaattttgctttttatttattttttagacagagtctcgctctgctgcccaggctggagtgcaggggcacgatctcagctcactgcaacctccgccttccagttcaagcaattctcctgtctcagccttccgagtagctgggactataggtgcccaccaccacacctggctaatgtttgtatttttagtagagatggggtttcgccatgttggccaggctggtcttgaactcctggcctcaagtgatctgcctgcctcagcctcccaaagtactgggattacaggtgtgagccatcatgcccagcctgttttttattttttgtagagacatggtttcactatgctgcttaggctggtcttgaattcctggcctcaagcagttctcctgccttggcctcccaaagtgtttggtctctccagatttagaatgagtggggaagagtgggctttaagatcttttgccttgccagaaaaggacatggttaggagccactgctttaaattaagatttccaggaactgatttttttttttttttttttttttttttaggtggagtctcattctgtctcccaggctggagtgcaatggcatgatctcagctcactgcaacctccgccccctgggttgaagcaattctcctgcctcagcctcctaggtagctgggattacaggtgagtgccaccatgcccggctaattttgtatttttagtaaagatggggtttcaccatgttgaccagactggtctcaaactcctgacctcaggtgatcggccctcctcggcctcccagggtgctgggattacagaatttttgaacacacttttatcatgaaagattttttgataaatcggtgaatctcaggcctggctgcacattatcatctcttgggaagtatttttatttttattttttttgagatggagttttgctctttttgcccaggctggagaacaatggcgcaatcttggctcactgcaacctccgcctcccagttcaagcaattctcctgcctcagcctcccaagtagttgagattacaggtgtgtgccaccacgcctggctaattttgtatttttaatagagacagggtttcaccatgttgttcaggctggtcttgaactcctgacctcaagtgatccgcccgcctcagcctcccaaagtgctgggattacagggttgagccaccaagccctgtcagaagtatttttactttatttttatttttttgagacggagtctcgctctgtcacccaggctggagtgcagtggtgcaatcttggcttgttgcaacctctgcctcccaggttcaagcgattttcctgcctcagcctcccaagtagctgagtctacaggcgtgtgccaccatgcccagctaatttttgtatttttggtagagatgaggtttcaccatttgatcaggctggtctcaaactcctgacttcaggtgatccgcctacctcagcctcccaaagtgctgggattacaggcatgagccaccgtgcccagccagagtatttttaaaatatggatacagaacccgactttagaccaattgaactgaaatatctgaaggtggtgcccagaccatgtgttttttttttttttttttttttttttgagacggggtctcgctctgtcgcccagcctggagtgcacagtggcgcgatctcggctcactgcaagctccgcctcccaggttcacgccattctcctgcctcagc

SEQ ID NO: 1884214 - DNA, 4001 bp, Homo sapiens; identical to SEQ ID NO: 1884212

SEQ ID NO: 1884215 - DNA, 4001 bp, Homo sapiens; identical to SEQ ID NO: 1884212

SEQ ID NO: 1884216 - DNA, 4001 bp, Homo sapiens; identical to SEQ ID NO: 1884212

SEQ ID NO: 1884217 - DNA, 4001 bp, Homo sapiens; identical to SEQ ID NO: 1884212

SEQ ID NO: 1884218 - DNA, 4001 bp, Homo sapiens
ctttttgctatggaaagcaggggtaatatcagtaccccccttcctcggatcgacataacttgcagttagatgctcccagacaactcgattcagtgtctggtgtgcaggagtttcactcaaatgtgaggataacccaatccacctgcaggcgctgggaggctggggtgtagtgactgggagctaaccggattagacagccatcagtaatactgtaggaagggcatccttgtagggtggggccactacgaccagtacggctcacccaggtgtagacagacgctggtagctcctggccagctcaaggtgtttccttttgcctggtaaccaggaggagtggctgaggcagggcatggagcggagcaacgcagctacaaagtgcggagaggagccccgctctggatcccgccggctccccaaggctgaaggagacaagtgagtggggagtcactgggaagagcatcccggcggagggcttgaaaaggctccttattgtctgctgggagcctgaggctctgcccgaccttgggacaagaggctaggcggggagctgaatgttcgatttgggatgaattcccccaaagccatgaaccggcgtcccggggaaccggcccacagggacaggaggcggttaagtagaaagtctgtctacatatcccttcctccgccgcaggtctggatccgcaggagcccccagtaagaacagcagccgcctggggggccgaccatgtatgtgtacagctggccgccgcccaaacagggcgtctggccgccgccgccgcagctgctcacctgcacctacctggccgcccctctgctgctacccccagtccaggcccacagcttccgcagccggcccgggagcctgcatgcgggcgagtgggcggccccacgggaataccaccgcttctacggccccgccgcgccacccgaggccgcgccgccctggtgggcctgccctccggcctacgccacgaccctgcgccggccctgcgccgccgccggcatctcgggactgtcgctgcaggcgcccgcggcggtggccgagagctgggcgccgtggccggagggcgggagcctgcaaaccgagctgcgctggggccgcgtggagcgcgcgcggggcccccctctgcagctaccggacttcgtgcgccgggagctgcggcgcgcgtacggcacctacccccgcgccgacgtgcgcgtcacccagcgccgcggccagttcctgctgcaggcgacgccgcgcgtgctcgagcccgaccaccgcgtggagtggcgcgtgcggcgccggcccgacagcggcgacagcagcccagcccgggaagccgcggagcgcggccgccccaggaagagcaagggcctgagctgaagccgccgcaaggcctaggggcgggcccgcgtgcacgcgcttggctctttcctgtgtgtgccgccgccgacaggcagaagtgagccctcacctgtgcgcgggaggcggacgcgctgctcacctgtctttttggcttctcccatgactgccggccagtttcctgcacttgtttctctcgctttattgctggacggtgggagaagggcaagtgcaagacggaatcgagggcacctctgggtgttctgtacctcttttcttcttgcaccttgggaagtggaggacgtgggatggaagaagggcctggacctccctccttcctcctccccaccttctcctaaggagcttgccctgcagtaagccccaactttcccttcctcttttccctctatcagagtcgtcgcccacccccctttcccaccgctcccctacccccgccttcctgccaagccgagggcgacggtgatccccagcttagtaagaaaagtaaataggccgggcgcggtagctcacgcctggaatcccagcactgtgggaggccgaggcgggcggatcgcttgagcccaggagaccaggttggagaccagcctaggcaacatggcgaaaccctgtctctacaaaaaaaaaaaaaaaaaaaaatagccgggtgtgctgatacactactgtagtcccacctactcgggaggcggagatgggaggatcacctgagcccgagagggcggggctgcaaggagccgcgaacgcaccactgcactccagcctgggtgactgaaaccctgtctcaaaaacaaaaacaaacaaaaaaaaaaacaataaataaatgagcgaagtcaagtatacactgcgagatcattgttatgttttggggtggtgtttctccatctgtttatctgtttaatgggagtcttaccgcccaccctggggtacaggaaggtagggtggaggggcgtgaagttgaactggccctctggagaaagcatgtgtctgatcgctgggcccagctgccctcttcaccatctccctccaagtgtgcaggccagcaccttctaactctccttggtcctttggcccaccaccctccgagatgctgagggcataagctctatttttgaagtgtggaaggcttcactaggagagggatgtctgagacctgagtttagggctggctctgacattttctacctgtgtaacttaaggctttctgactctcagtttcttcatcagtaaaagaggcgtaaaagtaacccagcctaattggaagttaagatgaatgtctcggcccggcctaattggaagttaagatgaatgtctccgcccggcgcggtggctcatgcctgtaatcccagcactttgggaggccaaggtgggcggatcacgaggtcaggagatccagaccatcctggataacacggtgaaaccccgtctctactaaaaatacaaagaattagccgggcgaggtggtgggcgcctgtagtcccagctactcgggaggctgaggcaggagaatggcgtgaacccgggaggcggagtttgcagtgagccgagatggccccactgcactccagcctgggcgacagagcgagactccgtctcaaaaaaaaaaaaaaaaaaaaaagatgaatgtatcttcttgtctcccaattcttgctaataatcgttaattcttaataggctgaggtttgcaatattctaggagttttctggaatgttaggccacatagccaattttaactaggatctagccagatttgaggcccagctgtagaaatttcttttactgaacttccatttgtaactgaccaatagttacctgggtatacacaggtgagttattgaagctgtaggccagctgattgggcactgctgtatttgtgagcttcttggagaagttgtctcaaacctcagcccttggaaaaggtgtttctcctgatcagtggtttgcttttgtcttttaagcgctacgaatctcattactgatcatatttttcttttggtcctggtttccaaggagctcagagccaaatttgctttgtgtctttttttttttttttttttgaaacagagtctcactctgttgtccaggctgcagtgtagtggcatgatctcagctcactgcagctgcaacctccacctcctggttcaagcgcttctcctgcctcagccttccaagtagctgggattataggtgtgtgccactacgcccagctaatttttgtatttttagtagagatggggttttcccatgatggccaggctggtgtcaaactcctggcctcaagtgatctgcccgccttggcctcattaagtgctgggatcacaggcatggccaccgtgcccggcctgcttagtgtcttttatataaaacctgcatcctgaactctgttatccctagtttcaccttatttttcctttgtaaaaaattataaaacacaagaaggtgaggtggcatagtgtgatgggtctgctgtgtgaccttgggcaaattaatgtccatgaaacagtttccccatcccaaatggggatgatgatacaaaaacctatctcatgaggttattgagaagatgccatgacatctgtgtttctacagtgcacagaaagcatttaccacggtgcctggcatgtgttaagtgctaaaatg

SEQ ID NO: 1884219 - DNA, 4001 bp, Homo sapiens
tcacccaggctggagtgcagtggcacaatctcagctcactacaaccttctgttgcctgggttcaagcaattctcatgcctcagcctcccgagtagctgggactacaggcgtgcgccaccatgctcggctaatttttttgtatttttagtagagatagggttttgccacgttggccaagctggtcttgaactcctgacctcaggttatccacctacctcggcctcccaaagtgctgggattacaggcatgagccactgtgcctggccagaagctattattagtttctcttcattgtttttgtttctagaacatgagttttaacttttattaaacaccttattagcacctattgaggtgatcttagggtcatactcctttattaacagaatgatttatggccgggcgcggtggctcacgcctgtaatcccagcactttgggaggccgaggcgggcggatcacgaggtcaggagatcgagaccacggtgaaaccccgtctctactaaaaatacaaaaaattagccgggcgcagtggcgggcgcctgtagtcccagctactcgggaggctgaggcaggagaatggcgtgaacccagaaggcggagcttgcagtgagcggagatcgcgccacagcactcccgcctgggcgacagaacgagactccgtctcaaaaaaaaaaacaaaaaaaaacaaaaaacagaatgatttatattaatagtgtttctaatatttattgcaaagtttttttttgttatttgagatggagtctcgccctgttgctcaggctggagtgcagtggtaggatctcagctcactgcaaactccgcctcccaggttcacaccattctcctgcctcagcctcccgaataggtgggactacaggcgtccaccaccacgcctggctaattttttgtatttttagtagagacggggtttcaccatgttggccaggatggtctcgatctcctgaactcgtgatccgcctgcctcggactcccaaagtgctggggttactaggtgtgagccaccgcccctggcctattgcacagttttaatgtaaattatagcaaattaaaatagctagaaaatcaaaaccacctgattttgtttactttccacatttttcttaatattcttgcttatgtattctatttttaatcatttttgaggaatattttgcataaaatgcaattcattcacttaaagtatacactttgactaattgtcacaaatttgtattacatgtaataaccactatagccaagacatagaatgtttccattagtctctagttccctcgtgctcttttttttcctttttcttttttttttttttttttttttttttaggaattaacagtctttattgggctcagaccaggagtccgtgggtcttgaggacctctgtgtatttgtcaattttcttctccacgttcttctcggcctgtttccgtagcctcatgagctgtttcttcttccggtagtggatcttggctttctctttcctcttctcctccagggtggctgtcactgcctggtacttccagccaacctcgtgagccaggcgccccagataggcaaactttcttgtaggcttcagacgcacgaccttgagggcagcaggaaccaccatccgctttttcttgtcgtagggcggtgggatgccgtcaaacaccttgagacggtccagagcggcctggcctcgcttggtcttgtggggcagcatacctcgcacggtccgccagaagatgcggctgggggcccggaagtggtaggggactcgggaagggttggtgttcatccgcttgcggaggaaagccaggtacttcaacttgtttctgtagaaattgccagaaatgttgatgccttcacagcgtacaaccaccaccttccggcccagcagtacctgtttagccacgatggccgccaggcggcccaggagatggcctcgaccatcaagcaccaggacctgcacctccgccatcttcggcagccgcttgggaaagctctttttttttttttaatagagagagtgtttcaccatgttgcccaggctggtcttgaaccctgagctcaaacaatcctcccgcctcagcccctcaaagtgctgggattacaggtgtgagccaccgtgccaggtctacctcatactttttttttttttttgagatggagtgtcatcctgtcacccaggccgtagtgcaatggtgcaatcttggctcactgcaacctccgcctccctggttcaagagattctcctgcctcggcctcccaaatagctgggattataggtgcctgcaaccacgtccggctactttttgtatttttagtagagaccaggtccatgttggccaggcaggtctcgaactcctgacctcaagctattcgcccgcctcggcctcccaaagtgctgggattatagggatgagctgctgcacctggcctcatccatgttttgtgtacatcaatagtgcatcctttttattactgattagttagtattccattgtaagaatgtttttatttttaatttttattttatttatttatttattgagacagaggctcactctattacataggtggagtgcagtgacacaatcttggcttactgcagcttctgcctcccaggttcaagcaattctcatgcctcagcctcccgagtagctgggattacaggtgcacaccaccaagcctgctaattttcagtagagacggggttttgccatgttggccaggctggtcttgaactcctgatctcaagtgatccgcccgccttggcctcccaaagtgttgggattacaggcgtgagccactgcacccagcctgttgtaagaatatatcagttttttaatctgatgaacatttgggttgtttccagcctgagctattatgaataaggctgctgtgaacattcatgtataagtcattgtgtgaatacaggttttcatttatctaggagtggactggctggctcgtgtgttgtttatttaactttataagaaacttaccaaactaattttcaaaatggttgtaccattttgcatctctacctgtagtgtggattaaggcctaacttctgctttcacaaaggtcatcatccccagaatagagcccggtccacctctcccaatcttttctttctttgttttcttctctttgcctttctttttttctttcttttctttttttttttttttttctgagatagcatcttgctctgtcacccaggctgcagtgcagtggtatgatcagagttcactgcagcctgaacctcccaggtgcaagtcatcttcctgcctccacctctcaagtagctgggaccacaggtgaatgccaccatgcccagcttatatttatttatttatttgagacagagtctctctctgtcacctaggctggagtgcagtggtatgatctcagctcactgcaacctctgcctcccgggttcaagtgattgtcatgcctctgccttctaagtagctgagattacaagtgtgcgccaccacgcccagctaatttttgtatttttagtagagacgggttttcatcatattggtcagtctggtcttgaactcctgacctcaaatgatctgcccgcattggcctcccaaagtgcgggaattacaggtgggagccactgcgcctggctccagctaatttatttttattttctgtaaagacagagtcttgctatgttttccaggcgaatctttgcttttctatgaatgagtgggtgcctaagtttgagagaaggaagtgggggtgaggggtggggttgtccatagagtatgctgagttttacggcagccccgtctgtgggcatttcctgggcagggcagtggcatctgaccctttcagaccatggggcaacagctccaaattctcaccttggtggttgattcatcaagtactgaacaaaggaaaatactaaaagattattgaaaggggaagtggctagaatgggcccattgtcacgtgtgtgaatgactctttgtgcttgtct

SEQ ID NO: 1884220 - DNA, 4001 bp, Homo sapiens
aactgaggcacagaaactttaaatgacatgctagtaggttgtcagctggaaggtgaactccagcatccagcagtttggctacagagtcttttatattagcccatttgctatactaactcaattgttgcctcattctttttattaactacataatattcccttgaaaaaacttcagtttatctaactaggtcctagttggtggacatttaggtgtttccatatactgctgttatagatgatgctagtgtgaatatcctggtgcttataaatgcctgtgtcattttgaatatgtaaatctctttcattttcatccattcaaatttgggagttaggggagtcttgtgttcatatagttacattctattttgagatctaatatgagacttttttttcaatgaatgtatttagctaatttatatttattatatcattatggttatagcctcatcttttatagctaatggactaagagataagtcaaggtatgttaacaattgaaatatacttaaagatgtaaagcagtacagtataaagatattagcattcctcagtctatttactctctcacgttttgttggttatataaaaacattatcaggaattgtaacaattacattatattctatagccatagccatagttttagaccaatagttaagtggattcaaatgctcaaagtttgttattttcgatagttttttaaaaatcttttagatggctgaactttatcatcaagtattttcttaaagtttatgaaaactattccttagggttttgcatatttaatgatgttttatgctgggggtaaattcttgagtactctagatattgcttcactgattttttttttttttttttgagtcggagtttcgctattgtcgcccaggttggagtgcaatggcgcgatctcggctcactgcaacctccgcctcctgggttcaagtgattttccagcctcaacctcctgagtagctgggattacaggcgccctccaccctgcccggctaatttttgtattttttttttttagttgagacggggtttcaccatgtggccaggctggtctcaaactcctgaactcaggtgatccgcctgccttggcctcccaaagtgctggtattacaggcgtgagccaccgcacccagcctgcttcactgatgtttaaacattgattccctcctccttcacatgttaagatagtaatgttttttgcgtagattctcaaaggattctctttttaaatctttgagaaacagtaattttactattgcagtatttatcttgattagtctgcatcagcttttcttaggaaagggcatgtccttttcttttcctttttttttttttttaacagtctttattgggctcagaccaggagtccgtgggtcttgaggacctctgtgtatttgtcagttttcttctccatgttcctcttggcctgtttccgtaggcttatgagctctttcttcttccggtagtggattttggctttctctttcctcttctcctccagggtggctgtcactgcgtggtacttccagccaacctcgtgagccaggtgccccagataggcaaactttcttgtaggcttcagacgcacaaccttgagggcagcaggaaccaccatccgctttttcttgtcgtaaggcggtgggatgcagtcaaacaccttgaggcggtccagagcggcctggcctcgcttggtcttgtggggcagcatacttcgcacagtcagccagaagatggggctgggggcccggaagtggtaggggcgtcggaaagggttggtgttcatccgcttgcggaggaaagccaagtacttcaacttgtttctgtagaaattgccagaaatgttgatgcctttgcagcgtacgaccaccaccttccggcccagcagtacctgtttagccacgatggtcgccaggcggcccaggagatggcctcgaccatcaagcaccaggacctgcacctctgccatcttcggctgccccttgggaaagctgctttttttttttttggtccaatcctgactctgtgtttcagtgatgccaaatgaggtctgtgaaagcttcaaatgtttcaagcaagggactgttgggtttgcttttctgactgtcatgtaatttacagaactgaactaatagttttaagatttgaagatgcaagccatttccctggcttgagctcttctagcatccctctttgccttcactgtatttagtagaccctctcatatgttatggttagggatatgtcttagtttgttgaagaagtagtttgtgtttctgtttctcactctcctctcctagttgttttcagatatttttaagaggaaaagaggggaccataccatctttcaaattagaaatcctaagagctacaggtcagtccagttttgtcagaattaagataactttaagggataaagtatgggctgatgtagttttccgaaagccaaaaatagttcatttacagaggctcttttggataaatttgttttattaaacaaaatcacaatttaacatatgagtttgattatatcagtttgtagttatgaagtcttgtgcattaaaaaacattaagaatgaaactagtaagtctgcaattaagaattaagcatgagactagagactaatgcctaaagactaataactaaagttagggtttagttttagagtgctcatcagttcttcagttttccttagatggtgattcttctttcaactgaatctgaaaattaaactttcatgtacaaagttctgctactagaatatttttaagtcctttagcttaatgaatgttagttctggaataatctggtattctgaatggcatcttgtttttcaagggtagtgtccatttattttcctcacttaattggtcctatatgttaaaagaaatatgtttgaaaaattttgatagctagtgggcaagccttcttctgttctctgatttgaacatattcttatattcatttgcctgagtttcattttacctgtggcacctgagagaagctaagtattttttccaccccatttcttttatgtgactgactgtatatttcttagtctcaaatataaaaacacatctaacagcttcacagaaaattttaatgcttggtagattattggagctttcaatttttagcctttgttactctagttattgatcatttcagtatttttaaaatctcaattacatttttaataatttataataataaaatttgatcaatgttttaatttgataatagtgcctatgtttactactaaataagtgtactttgagcagttgaaacactgtgagatattgatagatatttcccaaaaagggttttgtgatccaaataaatttgggatatcttctatgtaatataataatgtactttgcgaagaacgtatagaacactaataatttctacttaaaggaagagtataattagattggaagcacttcttattccaaacctatttgatagtggaactaaatgttgtagaaatacattttgggaaatgctgagaatatattatagaatattttcagatcagtgtgttgttaacggtattccagtacatgtatttgcatgtcagttgctttttaatagggataaatgataattgctgtcccaggatgtaaatataatcagaacatttaactgtggtagtatgttttctataaatctgagagttttttgacatggaaattttgttaccattgattttccagactaaaagtaatttttgagtgcctcctatgtattaaacatcaaaaattgatcttctttggaactactttctgttaagtcttagcaggaggaattttggaaatcttgtagccctcccgacttatttttcagtaaaaactgaagcctagaaatgtagcttttgcctaggtcacattggaaccaaaccctataactccagatttttttgctattttttttactgccttaaaaattttattttatttatttatttttttgagactcggtttcactgtgt

SEQ ID NO: 1884221 - DNA, 4001 bp, Homo sapiens
cttttcagaaatttaaaggctaaaaagaggacctaaactttaaaacttctcttttagtctcccattaaactaattgtaagaaccaccaaaaaagggaaaagttctttggaaaaattatttggaaagcagtaaaatgatatggactgttaggatgtaaaacataggatataagtcattatatgttagtggtgctctgacatagggacctattactgagaatcaacttttgctcaattttcagagaaatggaatggttgcatcacttatctacgtaaacaattgaagaattgtctgaaagaaaatatggtatgtttaaactggaaaagtcctgtaatactttgttcatgagcatttacacagtggagttactgttaattttgggggtactgtggacaagcccagggctgccagtgaatcgagtcatccttacacgtctctctttgtaaggtgctttgcagtgtctgtctaagtactagaaacattctttgtttctagattactgcaaagctaaggaaaagctatatttccttaattatcagctagcatttcttttaaacttttagcatggatatttggggatttatttacatatttattgcaaagccctggattacagagatttaattgaagattttttaaactaatagtttctctgaatctgctttgttaaaatcagtattcaccaggatgcccctgttgtctctgtttttatcttaatgcatcactgagttgacgttaaatttcaaattcttctttgcccttaatactattctatcctgaagccacctttatatactgatgaaagaagtaagcaatctgttattatcatctgtttgtatatatcaaatgctcacctcacaatagcatcaaccagtgaaaaacttcacgttttactgtttttatttggataactatttactttgcaatcaactagcaaggtataaaattgtatgatatgcagaactttaactggattgctttaagtgaacatttaaatatgataagccatattaatgatatttaatacacttaaaatgaacatgttttattcatcatgagtaatacaacctaccactcaatgaaaatctaaagttagagtaaatttgctcatgaattcaataacttttccataatatttttagttatttggttaaggttctcttaatgtttctttcactttttaatagtttacgccttttttgcctgtgttttttattggtttgtttaaagcaaaatctcataccgtgtgctacctggaagcactgtaacctagtgacaagatcataggctctagggacacactgccgggccacgtctcttctcctgtctgaaacttggtcttttgtggtcatgagaactgaagatctatcctgaagattggataagatagtaaagtgcttcacattaattcctggcatataaatacataataaatgcttccactttatcttggctcactgcaacctccgcctcccgggttcaagcagttctcctgcctcagcctcctgagtagctgggattacaggcacttgccaccatgcctggctaatttttgtattttttaatagagatggagtttcaccatgttggtcaggctggtcttgaacaactgacctcaggtgatccacccacctcggcctcccaaagtgctgggattacaggcatgagccaccacgcctggcctatattcttaatttagtactattctgagtaaaaataattagctattagttttataaatttaccatgactattttataaacatcagtgctttccataaagtgaaacaggttatgttgtggtgcatttctttaccttgtgctggccaatccctcattatgctgttcccctgttgtaatacttacattaaatgttaccagtttgtatttaagtgatttatgtctcctgattggactctgacaaagagaaaaatgctaggaagagtaccaggagatagccccacaaagatgggatttgggcataggtttggttattcaagtagcagtgcttagcttcttgccaatgggaaatggaatgctggtaatttataggaagtgacctcacaatgacccaagctcctgtttgttgattgtgatgaaatgcatgctgaggcacatgccttgggagctaagtggcagctatacttcactactatggcagtaaagatgactataaagactggcgggggatggatcctttcaaatgtacctgagctgggatgcccagcttgtggaacgcacagcaggaggtgagcagtggccagtgagtgaagcttcatgtgtatttacagtccctccccatcgctggcattaccatctgagctcttcctcctgtcagatcagaggcaacattagattctcataagagtgtgaaccctattgtgaactgcccatgccaaggaagtaggttgtgttgcccttatgagaatctattgcctgatgatctgtcactgtctcccatcatcctcagttgagactgtatagtggcagaaaaacaatcttgggcttcccactgattctacattatggtaagttgtataattatttcattatgtattagaaagtaataataatagaaataaagtgcacaataaatgtaatgcacttgaatcatactgaatttatcctctccatccatggtctgtggaaaaattatcttccatgaattcatcctcttcctttttttgctgcccaggctgatctccaactcccagcctcgagcaatccacccttcaaagcctccccaaatgctgggattacaggcacaagccacaatactaggtcaaaaccacgtttcttaaacaaaataaaaacttggcgggaagattgcttgagctcagaaggttgaggctgcagtgagtacttatcacactactgcactccagcgtaggtgacagagaaagatgctatctcaaaaaataaaataaaataatcccactctgcccacatcttaaaaaaatatattgtccgtatcttcatgactctcattcctggcccttaaaattctcctcacactggacctttgtattcatccacttgtttgaccccttctgggacctgacctgtcccaggaagagtccccattttcctccaatgcacttgtctttgagtctacctggccagacacccaagagttaccttgaggtgttacttttctcccttcccacatccagcctagcaaggcttgctgattccgccctgaatacaaatcccagaccataccccatcttccttcactgccttccagcgctcagtcaaagccatgccacagagcagccaggttagtttcattggaagtaggaggtgaagcctgtcattctctggtctgccatctgtagtggcttcccactgtacctggaataacctcacagcccctgatcgggcctgtaggggcgcgggtgagctgtgccctgctgttcctctgtcatcccatcatcccctctgtggattgcttgctctgtgccagccaccatggtggtctgtgtacctttcttcctctcaagtcacagcctcctgcactgtcatgctgaggggtggtgtttgtggaatgctctttctttagggctttctgtgcctctcctttctatttgtgtcacagtttaaacatgaccatattggagaggtctcactgagcaccatcacacctcagccttgaggctcgctgaactcatcatccttttattttccacgaagcagtgctgactgacatttttcctcttactgtagcacagtaaaaaacatccaaggtgaaggattagagctttaaaaagtttggtagtgtccaggcacagtggctcactcctgtaatcctagcactttgggaggccaaggcagatggattgcttgagctcaggagtttgaggccagcctgactaatatggtgaaacctgtctctactaaatacgaaaagttagccaggcgatgtggcccgtacctgtaattccagctacttgggaggctgagataggagaattgcttgaattgcattaagctgagtttgca

SEQ ID NO: 1884222 - DNA, 4001 bp, Homo sapiens; identical to SEQ ID NO: 914050

SEQ ID NO: 1884223 - DNA, 4001 bp, Homo sapiens; identical to SEQ ID NO: 914049

SEQ ID NO: 1884224 - DNA, 4001 bp, Homo sapiens
tctgcctcccaagcatcattcccctacttccactggaggccctgtggtctccagcccaccactgtcacacctgccccacccacgtgactgtccacaccccttggagtgccccgctcacccttcggtcctgtcctctgcaaccctgagtatccaggaaaaccacccctgcctgccctcccactatgccaaacccagccccactaccccacccataccggcttccaggcaggatctcaccctccggtctctgagcatctcagctactccagcaccttctctcccacccgccacggaggcacccctaaccaccctctccaggcctctgcaaccccacatcaacacagccaccccgaggaaaatgaagcaaccagtaggaggaagtccatgtgggtggtgctgtgtggtcccagagcagcctccagggcccctggaggactctccacacccagaaaagagcctccccgatggcagtcaggagcagaggggggaccctgcctggtccaagatgaagacctttccctcccacctcctggggagccttgaatctcctctctctcagtcttcatccatccctccacaccccccagcctcctcatcaccctccccacctggttcttctcaggacatggatgcgtgctggtgtctgcaattttttcttttttagacaaaagtctcgctctgtcactcaggctggagtgcaatggcacgatctcagctcactgcaatgtccacctccagggttgaactgattctcgtgcctcagcctcccatgtagcgggaattataggcgcccactaccacgactggctaatttttgtatttttagtagagatggggtttcaccatgttggccaggctgatctcgaactcatgacctcaggtaaactgcctgcctcagcctcccaaagtgctgggattacagccataagccaccacgcccgctatgaatagcttttcattttatattttctaaagctatttcttgttgtaatagagaattccggcccttgtgcatgcgatcgttgacacaaaagcaaatcccttcaaccccaggcttccatccatctgtggccacattgctgcctttccttcaaatcctaacctcctctgcactttctgcagctgcccacagacttccaccccaccgctggggatgtggctccgtccagcaccaggtcaccgccctgctgggcacctggaccagccttgacagtgaagtgttcctcagcctcaagggcaccctcccctgcctcccgcccagccccacactcacatcatggctccatgcccacgtacgcaggtccccggggctccctctcacctccagcctctcctgctgttccttctagctagacccccctctctacacctccctgcccctgacccagcagcccttccacatggcttcacaccccagtgtctccacctgggtgcagcatctccatgggaccccatgctcaacctcactgccagatgcagccaaccctcccacctccttcccaggacctcagccctgctccagggcacgtggatggagcagcccccgcaggacccctcaggactctgttgatcagggtcattgggaccagacactgggccgtgtccctcattttgtccagggcctgacccagccctgaaccctgggttccaagcagtggggctagggtctgggggccctgaggtcacagggatccagccatgtggagtcacctccctcctgccccagcatgtcccacccactctgggctgagtgagacccaggcagacggcaggtcactgcagggaccctcatgccccggggcctgggcatcaacagagctgatgcctccagaaagttccatggatgaaggaagcagaaacttaccaatggggactgcccagagattcagaagaaggggcccgagtcccagggtccagagagctgccctcatggtcccacagccctctgggcttcagcaagctctcgctgcttagctggggcaatggcagaggtcacagcccagagtcacatatacagaagtgggagctgccaaggacctccagggtccaatggggacagccacagcctttccagagcgaatcagcagctctgcctctcagccgtgagcagagcagccaatgccttgctggcctgagcatcaccagacatggggagggtgcaggctgtgggtttcctcccacactgatcaagctgctgatgggactagacccaaccatcaggcagagatggtccaacctgcccacagcacagcatcagtgaagccctgcgtctctgccctccacccgggcccgtcggcttcagccatgccaccaccacagaaggcagtggccccagacagccaaggaggcgtcctctgtgccagcagatggcactagcagagttaggggtaggggtaggattagggtttgagtgggagtcccagcagcaccagaagaatgacacggaagagctttgcaagaactctgagaactgaactgtcgttggaatgaaaacccttgagagaagatacagttaagaatcactcatcatatgaagacccagggacacgaccatttcagtaagagacaaccaactaagggcggcaccaggaagagtcaggtgtcagaattatctgacaaggattttaaaacaggcatcataaaaatgtttccacaacaaattgcaaatgctcttgaaataagtggaaaaattgaaatctcagcaaagaaatagaagttataaaaatggaacaggctaggcgcagtggctcacgcctgtaatcctagcactttgggaggctgaggtgggcagatacctgaggtcaggagttcgagaccaccctggccaacatggtgaaaccctgtctctactaaaaatacaaaaattagccgggcagggtgacatgcacctgtagtcccagctactcgggaggctgaggcatgagaatggcgtgagcccaagaggcggaggttgcagtgagctgagattgcaccactgcactccagcctgggtgacagagcaagactttgtcttaaaaacaaaatgaaacagtggtaaggatgtagagaaatgggacctctcagattttgctggtagattcaaaaatggtgcaactgctttgagaaagtttggcagtttgtcaaaatgttaaacagagatactcctggaagataccacttgagcccagaaggggcaactccactcttgggtacatatctaagaggaatgtaaacttatgtccacacaaaaatctctacatgaatgtccatgcagcattattcataataaagatgaaaacagctcacgtgtgcatccactgataaatggagaaacaaaatgcggtatgtccacattatggaatgtcactcagccatagaaagggaacaaggcacccacacaggctggatgtgcgtcaaccttgaaaacatgctcagtgagagaagccagatgtaaaagaccacatactgggtacgattccattcatatgagatttccagaataggcaaatcaatagacaaggaaattagattcatggtttccaggggctagagaaggaggaaagagaaaatgactgaaaatagtatagtgtttttcttttttatttttatttatttatgtatttatatattcatttatttattgggagacagagtctcactttctcatccaggctggagtgcagtggcatgatcatagctcactgcagcctcaacttcctggcctcaagtgatcttcctaccttaacctcctgagtaactgggactataggtgcatgccaccatgtctggctaattttttaaatttttttgtagagatggaaagccttgccatgtacccaggctggtctcaaacgcctggcctcatcggaccctcccaccttggcctcccaaagtgctgagattacaggtgtgagccaccacagccagctacaggatttctttttcaggtgatgaaaatgttctgaaattagtggtgctggttgcataatcctgaatatactaaaatcctctgcaccacacac

SEQ ID NO: 1884225 - DNA, 4001 bp, Homo sapiens; identical to SEQ ID NO: 914054

SEQ ID NO: 1884226 - DNA, 4001 bp, Homo sapiens; identical to SEQ ID NO: 914057

SEQ ID NO: 1884227 - DNA, 4001 bp, Homo sapiens
gtgcagtggtacgatcatggctcactgcagccttgaactcctgggtgtggtggtgcacacctgttgtcccagcaactctggcaggctgaggcaggagaatcgcttgaactcaggaggtggaggttgcagtgagccgagattatgccactacactccagcctggagacaaagtaagactccatctcaggaaaaaaaaaatttaatttaaaaagttctagtatctaaaatgagcaaaatcgccaggcatggtgggtcacacttgtaatcccagcactttgggatgcagaagtgggtggaccatccgaagtcagaggttgagaccagcctgcagtgagccgagattgcaccactgcactccagcctgggagacagagtgagactccatttcaaaaaaattagccaagcgtggtagcatgcacctgtagtcctagctaccggggaggctgacagggaaggattccttgagcccgaaggtcaaggctgcagtgagccttgtttgcaccacctcactccaacctgggcaagaccccatctcaaaaaagaaaaaaaaaacacaaaaacaaaaaacaaaacagaacagaacagcatcacttccttatcattagtttgaaggaagtgaattgcctgtaaaattttccattttcaaaaaaagtattaaaatatagtgtaaagccagtcacgatggctgtaatctcagcactttgggaggctgaaatggattgcccctggaggtcaaggctgcagctgaccgatcctcctgcctaagcccggcaagtagcggagactacaagtgcgtgccaccatgcccagctaattttttgtatttttgtagagacagggttccaccatgttgcccaaactagtctggaattcctgagctcaagcgatccacctgcttccgccaccgcctctgcctcccaaaatgctgggattacgggcgtgagccaccgggcctggcacaattactttcttcagtctgagcatgagtgctggaagaaaagctctcacttatatataattttttagagacagagtctccctctgttacacgggctggagtgcaatggcgcaatctcagctcactgtaacctcaacctccagtgcttgatcgcttatataatctcagctcactgtaatctcaacctcctgggctcgatcgcatatatatacacacatatatttgtttgtttagacggagtcttggtctgttgcccaggctggagtgcagtggcgcgatctccgctcactgcaacctccgcatcccgggttcaaacaattctctgcctcagcctcccgagtagctgggattacaggcacctgccaccacgcccgactaatttttgtgtttttagtagagacggggtttcagtgaaaccatgctggccaggctggtcttgaactcctctcctcgcgatcccgcctcgacctcccaaagtgctgggattacaggcgtgggccacctcgcccagccgacagattatattttcaaaaagatgttttctttgtttcctagccccttctaccccgctacaaagtttcaaagacttaatgctattacaaagggccgtcagaggtcaagctcagggttgcagctccctcatgccgggcagcctcagaggggccgaccctacccaggatgagcagcgccagatagccggggacgctcccggggatccacgggccctggctgggggaggcgttgtggggcgcacgtacacaggctcaagtgaggcgagtgggcggccggggctgcagctggtgctggccattgaggagcttctgcgcgacagtgcgatcggttgcaccttctgcgacaggtgccggccggttggcgcgcagcgcctgctagcgcagagtctggcccttgctgcgcccggccccgaagaccgggaagtcgtaaagctcctcatcgcagcttatgtgtggcggcggccgggccgaagcctagcgacacagaactgccagctcagcagccggttacatctcgcccggcaacccataggcagcgtccgctcatgcgcgctcctggaagacccagcagccccgccatgagttccgattggctccgcgtgagtggcggtcccctgtgacgtcgcaagggcgcgccttccgcggcgccgcaagggcgcgccttccgcggcgccgcaagggcgcgccttccgcggcgccgcaagggcgcgccttccgcggcgccgcaagggcgcgccttccccggcgccgcaagggcgcgccttccccggcgccgcacgggcgcgccttccccggcgccgcacgggcgcgccttccccggcgccgcaagggcgcgccttcgccgacaccatagaggtgggcctttggcgagtcacaggcgcgggtgttcggctacgtcactggggcgctacggtgcctggagctgggcagtcttctcgtcagagtggggactggtaagagcgacctcaccgccaggtcctgtgtgttgccggctgaagaagggtagctgaaaaattcagacccagcacagtgtttatgttggtcaaaaatagaaaactatgtctgccgcggccgaggcaggaggacccttcaggccaagagcagcctagcaacatggcgcaaccccatctctgtagtcctacctcagccccccagctacttgaacccaaaggttcaaggctccagtgagctatgatcccaccacagcattccagcctgcgagattgaggtaaaccgtgtctaaaaaaattaaaaaaactatccaagtgtgcaacagggagggactgctaaataaaacatgaggctggctgggccctactgtaatcccagcactttgggaggccaaagcgggaggatggatggcttgggctcaggagttcgagaccagcctgggcaacatgacgaaaccccgtctctacaaaagatacaaaaattagccgggtgctgtgtgcacctggcctaatttttgtatttttttctagagatggggtgggcggggggtctcgctatgttgcccgggccagtttcgaactcctgagttgtagcgatcttctcagcttggccatcagagttgtcgggattacaggcgtgagggacagcgccccacctgggttaggctacttaataacataagaaagtgctccgccaggctcagtggctgacacttgtaatcccaacactttgggaggccaaggcaggtggatcacctgaggtcaggagttggagaccagcctggccatggtgaaacccagtctctacaaaaaatacaaaaattagccggccgtggtggcgcatgcctgtagtcccagctacttgggaggctgataaaggagaattacttgaacccgggaggcggaggttgcattgggctgagatcgcactactgcaccccagcctgggcaacacagcgagactccaaagtttgacaccagcctgggcaatgtagtgacaccctgtctctacaaaacaaacaaaaacccaggcataactgtgtccacctgtggccctagctagttaggaggctgaggcaggaggatcacttgagtccaggagctcaaggctgcagtgagctatgataatcccactgcttcccatcctgagcaatagaatgaaagcatgtctctagctagctagctagctagataattgatatgtagttttgtatcaaattttttccctagatttgagcatgtttttctaaagtagcattcaacacatcagcattttacagtgttattatttgttaatatgattatgtttttctgaaatacagtgtcctttacaaaagcagttttgtcgttcaaagcacatagataaggccctcaagtgaatttgtctgatgttggcgaccttggtaccattttgtccacttgattggaaaagccagtcaataatttcaggtcactgttggccttagaagaagagcccaaaggcaacaagcaaaggcgctggtgtccagtcaccttctagaagcattttcactttcccttaaggtttcccttgatgaacatagaagtactgtatgtagaatt

SEQ ID NO: 1884228 - DNA, 4001 bp, Homo sapiens
ggcagagatccaacattccccttcccctggctttaatccgttttaccctcctgttcagctgaccaagattccaaatgaaaaaagcattccttcccaattgttaggagagccttagaaccagcagaaaatgtcagacacatacgtggaccccaaataatgcactgggtcttttgcatatatgtagcaggttttgtagctgtctctttagaggcccttcagaattttttcttttttagcttatcaaatgtcccataatagcaattcctaagtcatcgatgaaggaccaaaacacatatctttgttcatagacttttcattgtaccaggttttgtgagcaaaacatgaaagcacttgaaatcccattaaagttacattcatttatctaaaaaagagaaagaaaaaagccatctttgaaagtttgtctctatagacatcattaaagtgaggatatgtacaaaacacattttatgtaactcaagattaatggctaactattcaggtgcagattttttacagtgggagctgatgcttgggaaaaacaaacaaacaaacaaaataagaaaacatagccgctacattaactgccaagtcactgtgcataaaataaatataatacagacatgcccccatgttttacaaaacatcagtttcaatgcttctcaacacatcaatattaccaacacttaaaaatgcgttcaactagccaatcttaggacgagaagaccgtatggaattccctaattttccatatttgaagaaataggcatattttgatcctatcactgctttgttcaaaaagcaacctccaaagggcctttttatgtttggcttttaacaactaaaacaatataaagcttgaagaacaaataaatttattttgatgcctagtcaataacgtcagaggtaccattaccaacctccataaataaaaaataatcaccacagtgatgctggtaatttttatttaaaagtccatttagcagagggttgccagatttagaaaataaaaacagaggaacccaaagttgaatttcagataaaaagacaatgttttcttttttttgttttttttggtataagtatatcccatgcaatggttagggccatacttatactaaaaaattatttgtcgtttctctgaaatctgatgcacacggggtgtgctgtattttatcttggaacccttgactatcattgttgccacgccgtggtttgctatgaaaagcatggaaagctgggtcctatttccagggtccagagcaagtgctggggttttttagctcgctccatctgccaaccttaaaattttggcacgttaacaagatcgggaaatcttctgcagcaggagaatgaatttccaattagtcatttcaccttcttaagaggagagagagagcttactcacctgagaagaaggcaagagccggcaaaaataagaagagaaaaaaaactaggataaccagaaagggaaagaatttaaaccaggaagtaacagaattaggaataaataagtttaaagcaagccgctccaaaacaataacaaaaacaaaaaatgtttaggataatcagatccttaggaagaaaactgcagtttataagaaatggagacacccaaagaaagacgaatgaaaaaatgacaaagaaaattttgtatttctttcgtaacaaaccagttttttttttaaagcccctatcaggaaattagacattttgtggggcagcaacttactaagacaccacacctgtctttccggagccttattaaatggttggctttacttacaattgatggtgaatgcctttcccttgtttggcttactcgtgccacaaggcccatcctactcttctgctgaaataagatgagcttccacggattttcacctttggtgctaatgatattatcctcaaccacatgaaagcccacctggaatgctgtataaccaggagagatgttctcctgaccttctatatccgcatttcccagggcgctctctgccaaggtctgaaagaaatgcagattccttgcctcctagtgttgcctcttgactgacactccacattttcccacacttccctcatgactctaaccccagtacttgcggaaaccacaggctcagagggttgggtttgcttggatggaggaggtacaaacagtgggctttatttttgtttggaattgggttgtggttttggcttctccaccgaagaaaccaaaggaagggggagggagatcacagaaatgttagctctatgaaaaggaaagtgacgagacttgttgctggtactatcaggacaatcacgaatgttgcattatatggattcaacttttttttttttttttttaacagggaactctcaggagaggtgactctttaagaatcattatgaatgccaaaaaaaattttttttttatgtaaaggggtaaatgtatcaaaattgtgaaaaagaagacaaagagaatgaactcttacaatttatagagtgacatgacggaaaactaatttggggctgaagtttattaaggctgaacctaactcatttttataaatagaaaatttactgttgcctttctgtgttacagataaatagttggcccagttttgaacaaggcaacatttctgtttgtttgtgtttaggaagcaccctcattgttgaagatgaattaattgtcttgatggcctatttcttagtaggaaacagatccattaggtgtgatccattgaaatcaggaatgaaatacttagggaaaaggaaaaagaaatttgcagtatgtgatagcatggaattaatttccagtatatgtaaacataaacacacacacacttggactttgaaattaagaaaaaggcaaaatattctgcccttcttggactcaatgcatcctttaaaagataatttctctccttcctctctaaatacttttgggaagtgggtttcaaacgttatcctcctaaactctagggtttctctatagggtcttaggagtgaatcggtgagactcagggattcctcttacccatccctatcctgatcctaaccccaaccccatccccaccccagtgtctgggcgtaacaataattgttatattttagttgttccccgcagttgccttctaccaaagaccactgaagctgattttccgtttatggaaatgactttaaaaatcccttttgaaaagcccccaagcagatggaagaagtgctgtgtggcggttactcgccaggtccacaggcatcgcttctaagttcagtgccctgagagctcagaccagttccttaatttctccacacccaaatgtcttcatttgcattaacaaatggggagtacaactcataacttacctcataaacaagttggttatgaggagtgaatgaatcaacacacctaatgaaattagaaccgttcctagtacctagtaatacacttcagctactactgtatctgtttctgtacttgggcttggtacaagattttatttgaaggaacattctactgactacctttaaaaagtttttgaaaagacagctgctttaaaatggtatttcataatttacaaaaatgggtttgtccttttgtcctttggccaaaagccaaatcccacccttttcctccattaaccctgaactctaagtgttaagaactcatttccctcccttccccagacctgaatctccctggtgccgtgggctaaggatgaggatgatgtcattatagttgcggacactatttcattataatcttttgctactctcttgctaactttctaaagggaaaaacatttcattaattatcaaagcacccggaaccctttggaggtacactccgtataaaagctattattatcacccacatttggtgaagtacttggagattaaaagtgttatgtaaatgtttgcacatgattacgctgtggtctgagattcacagtgggataacacagcccaggaagaagcttgaagtcccagaaaggcaatgatttttgtacgaggtatgaaattct

SEQ ID NO: 1884229 - DNA, 4001 bp, Homo sapiens; identical to SEQ ID NO: 914070

SEQ ID NO: 1884230 - DNA, 4001 bp, Homo sapiens
aatacactggtaagcaaggcacagtggctcatgcttgtaatctcagcactttgggaagcggaggcctgtggattacttgagctcaggggttcaaggccagtttgggcaacatgatgaaacagcctcggccaaaaataaaaaattacctgggcatggtggcttgcacctgtggtctcagatactcaggaggctgagggtggaggatcactggagccctgtaagtcaaggctgcagggagctgtgatggtgccactgcactccagcctgggtgacagagtgactctgaagaaaaagaaagggcactgataaaaattctttaggattggatggactaaagagggagaactatttttattcaatttttttttttggttacaaataatagtgacttaaggaccataactaaatataatttcaaggaggggcaactcttagtgtctcttataaccacttcacacagaatttacttttactgctatggtgatttctctttagatttctttctgtatttatttacgcttttattttttatgtatggtgtatatatctatgactttttctctctgattttatgaaactgaaattaaagtggaaatacttctatgccctgcttttttccatgtgctatatatatatcatcctaaaattacacatggaaaaaaatttaaaaggattttattatgaaacatttcaaacatatagaaaatttgaaaaaaaaaattatgccagtaccttagacacacgatttacattcaagaagtattaatattttgaaaaatttagttatctttcatgtgggggtggggtgcattttaaagtacatcaaagaccagatgcttacttggacctttgtttcaggaagtccagagcttacagcatattctggatagcactggagagaaaccaacacgggagagaaagcagccagcagttttctggcactcccttagtttgaaaaaatttacatcacaagaaagcaagccttcctttcaccttttaggtgcaaactgataaacataaccagtagggctactatacttcacagagccttgctcccagtagatactcaaaacatgcagttgaactgaatttcagttgttattttaaagccgtgcttgaaaagcgtatgtgacaaatgtactttcctaatcttcctgagaagagcagtactgtgtcttacgggcgaaaaaaccagaggagccaggagtggagggtgcaataaaacgcctgcattggggcagattgcctcattttgaatccctgactcctcactgtgctttggggaaaactatggaaattttcactgcctagcttattaaaatggactgcttagctgaaatatagaggcgtccatgacaactacccggagggctttgttaatcatattgcaggactccacccgcagtttctggttctgtaggtctaggtggggccgaaaacgtgcatttctaacaaattctagggtgatagtgacgcggcaggtcccgagacaacaggaaacccaagggactcgaggcaggcgctcaataaatattcactatgaacctcagcaccatcgaagcggcccaccagcaggggccgcggggtatgcgctgcagggaagagcacggcctctgtccaatgtccctgccggtacatcactcctctgcagggactaggttagaaccgggaggcagccagagcagcgctctcgctggataacggaagaggactccctcgccaacttccgcctctggggaaaagcggggaccctccgccacctgagttctgttgtctcgatttcgccgcagtttgcttctggcccgggcgagaacctgtcctctgggcaagccaggggtcggtacaggactcctataccccaaggcgaggcggaggcaggtgccgagcggtggccagagtccggcgcccaaagcccgatgggagggcgtggcgggggaggacggtcccgccagctcccaggtcggttccgagcgcccgcggcccgatggccgggcggaagatggctgcccggagcgccgcggacagtcacgtggtacgccgggcccgtagccgcgccccttcccccgctcgccaagtccccgaccccgcgggaggcacggcctcgggctgcctgtaggccaccgaggtgcggcgcgggccggccagggacggcgggcatcggggcgggaaggccagctctccccgctgtccatcctaacttgggcgctggggcttcgctcggggagcagaggaaaaccttccttcaggcgacttgcaccacgtggggctactgggcatgcgcgggctccgaccccggcctagccgctctccgggttttcgccgcagctcggaggggcggcggaaggtgggccccaggcggggcggggcggctctgacgcagtcggagttttcacctcgcgcggttagagctcttgcgcctccgtcgcgctcccaggcgtcgccagaggctttttttttctgttgtgggagaaagatgagagtctatggttagaggtttgaaaatgggccgaatagtcaggtcggccgtttcctaggaatgatccattgggcattaatcccaagtgtcgcagcccttgggcttggtgggaaaaagaatccagtagtagttcgcaaactcgtgcctggcttccagcaggctgagtttgcgttccctgctttgtgaccagctctagcggctcccgtctccggccctgccccaagggatttaccgtcccagattgtaaaatctggctcccgctaggccttacttagtgggcccctaaaaacgctggggaaagcgcccgcctcctcagtttcccattacttgaaagtaaaattcaaggggcccaaactgcgactgtcccttggttcggggtcccgctcggtcccgggaggagccccccgcggaccccgcccggccggcccgcccccccggccgcagtgaacacccggaggagcggagtcgcgtcgcgcgggaagccgggccggctcgggcagcggactgggcatgctcggcagcccgggaggctcgcggtggcaagtcgaaagcgttcgcaccagcggggcagcggctgcgggcggcaggcggcgggcaggtcgggagtgagaaggaccggcctgggctgactgctctcccctcgcgcctagggagccggtcggagagcgcgattggggtgcggagccccgacgctgccctgccccggatttcattccgcggcgggggctccgcgagcggaattccggcggctgccgtgactccagtgcaagtgagtcgtggggcagggacagacagccggcctcacggttgcgggggccgatcggacacctgtctcgcgggcccggccttatgccggggagcagcgggcgggctgctctggggcgagggggcgtgagcgcagcccgcgcggtgccgcgcgcgtacctggcgggcagtcctccagagctgctgctcccgtgggtggtcacagcggggaggtccggcggccgggatccgggctcggagggggcgggccgccggcggggctccccggctaagttggggcggggaggaaggaggaggcgtcagtgggcaccttttcagagctactgcgtgcgggctggaaggctgcctggtgtcggattggggcgatcgggaggcggggagcctttgggcagtagcccgcccggggtccggagacccccacccaggggccgactccaatcacggctccacccccacagcctaggtggcggtgtgacagttggtaccttcggtccagatcgcagccggccaggcgcccactatttcgggatccccccaccgtagcccctcgatgccccctgacgacaaaacaggtgggaccccccctccccgaggagcgctccccttctctccaggccgcgtaacagcccgccaggctcgcgggcggctctgagaccccgcagggctgcccccgcggggcggggacgtttaggggcaaggcctggaggggaatcggcgcagcccagaactggacagtctctccaggacgccgcttttccgt

SEQ ID NO: 1884231 - DNA, 4001 bp, Homo sapiens
accccagggacctcccagcatgcgtcctgatgcacgtacccactggactcccttcagcttctcagatgtgcctgtctcttcagtctctgggcctctgctcagactctccctctacctggaacactcttcccgcttccctttgcctgtctcactctctccacttcctcagccctgtctccctcctgcgtgtgcctatgacagccaacacatcacagcgcagtgcccatacacagtatcctttgcgagggcagggaccgtcaccatcacagcccagcccccagcacagtgccagcatttgggagggagtgaatgggtgttgcgtgttgccccttctttcagggatggggtagggttgagatgtaccccgtcaggaaagctggccacaggttgcacagcccggggctcagggaaaggaaggaagatagcagaatcattaggagcctaggcatgttcagtctgcccaaagaaagagactgtggcacacccaatcccagctccaccacttcctcgctttgcaaccctgggcggggcactcaacttttcttaccttcagtttactcatctgtaaagtgagaataacaacagcacccagtatgtagctcagaggttgttatgaggatcaactgtcataataaatataaagtacacggcacagggcttagcacataccaagtgctcaatgaatgttacgtcctcttaatgttactgtcaccatccttgcaggagatgggtggaaccacagaaaatgctggtgggaggttgatgaagagagttgactgtctgggctcagttttgccaacagaaccaaagctcaaggaaagcaggctttgggacaggcgcggtggttcaaacctgtaatctcagcactttgggaggctgaagtgggtggattgcttgagcccaggagttcaagaccaacctaggcaacacagtgagacctcatctctacaaaaataataaataaataaataaataaaatgaaagcaggctttggtggacagtgtccatcccaagagagccaggcaaactcccctgtggctggcctggccaggcctgtggttttgggccctttaccgacaggcctctgcttcctgcggcttttcctctgtctcagagcctcagaagtgagtgggtgtctttcagcatcatcactgcgacccaggacttccatctgcctgccccacagcctcctcatctggctgggccattctgcagtgtttctctgagctccagaggcctcgtgcccctcgccaagccccccacactgtggaccatgccacagggagaggctgccaggaagctctgcccagcgtcccaccgtctttcctgagggcagcctcccctggagggaggagccgaggctgcacaggctgaatggggccctttattcccggctcccacagggagggtacagagccactgcccaccacgcccaccacacccacgcccacatggagggggtacagcttggccctgatgccggcctctgagctaaccacactctggccccactgtgtctgcgtcctggagggtgaatccacccctctccccagctctggctgaagctgccgtccctaatgtgtggggtgagctgtatttgctagtctgccaggggtctgggggtgtgtaaatgagagacagcctagagcaagccagtgtgaacacacactcacactcactcacctttcagcaagtcgcggtcggggtccctgtgtgcccgtccttgtgctgggccctgaggatacgttcgtgggcttcactggctgcaagaagcttgcattctgtccttagggaacgctgtaaagaggcaggttcagaagatcattatcaatggtggcagattctgggagggaaacaacggaggccggagagagagggcacatggccaccaaaggcctcccaatgagggatgcaaggcaatggctgggcaaagggcagcaggaacagtgctccaggaacaggaacagggacagcgaacacacaggcctgaggtggggaagagcaggatgtgtctgtggcgtgggcagagtgacaggagatgggcgggcggagagagaggcaggagctgaatcctgcccggccacagaagggagtttggattttatcctcagtgccctgggcagtcactgaaagggttaagcaagggttatggtttgagaatattattctgaggccaggcgcagtggctcacgtctgtaatcccagtactctgggaggatcgcttgagcccaggagtttaaaaccagcctgggctacatggtgaaacccagtttctacaaaaaaatacaaaaaattagcctggtgtggtggcgcatgcctgtaatcccagctactccggaggctgaagtgggagaatcacttgaacccgggaggcagagattgcagtgagccgagatcactcccctgcactccaggctgggcaacagagcaagaccctgtctcaataaataaataaataaaaataaaaaagaaagaaatggttctggtcccactgctctagaatgctgctcaaaaagacttccattccatttggttcagcaaagatgtattagtccctccatgggcctgggactaggtgctttatcactagcagacacccataaaatcccagttgacccacctggggtgagggagagaaagatactgttcccttcagcctggctctgcttactgggtatgggaacctccgaaccagaatttgggagatcgttcttccctccaaggtgcgctgatgctttctgcaagcaagccgtggctgcaggagggtgaaggcttcactctgtcgtgaaccccagtgggcttttgcaagtgtgtttccctgggcgtgtgggagagggagtggggagtgctggagcgggcagacacacctgtgtgagtcaccctagaatgcccctagggggcgggtggaatgaacaattggcctccttgccattgtgtcacgtcctctgccctctgagttgggcctccgagaaacggaagccgtgtgggagacacagatgtgtttatgggttgggtgaatcaggaagggcagccgcaggctgaggggagctcgtgtttggccttggtgggaagccaggtggatggactgggtgcctgggaaatgcttctggtacttggattccacgtggccagcaaggagacaggcagggcccaccccaccccatcccacctccttgacctggaagtgtcaactcataagagatcccatttgttcaccatttgccatgggctgggctccatgctaaatgcttttacagactcattcactggctcctcgtaatagtcctttgcattagacattactgcctcccattttgtagtctgaggaaactagcattcgaataggttatgactcatcccctgtcacataacagtaactggcagagccagatgtaccagtcaggactctcctggtgacaagaaatagacccatctcaatctggcttaagaaaaaaggggaaacttattggttcacataactgaaaaccaagagtaatggtttcaggcatagctggatctaggggaccaaatctgtgtctcttaagccctcagctttgctgtcttttctgttgacttaattctctgataggcttcccccaggtggtaacagagatacataaagatgcttcctagcagcttggggcttggcatttatgagttagcagctgtagagagagaacacatctcttcctggtagttccagcagtagtcccaggctgattcccactggaccaatgtgggttgcatgcccatggctggactgtacttaatgatcagccccagagtttgggatgggatcaaccccactgaaatcccatggactgagaatgaaggagggattgtttcccaaaagaaaatcgggcactgtaataattaaaagctggcagacaaaacctaccaatgtctaccatgctagacttcaagccagaggcagcatcttggctctaaagagagattcatgggagccagaactcagggcatggtgtcagtatgcctcaggc

SEQ ID NO: 1884232 - DNA, 4001 bp, Homo sapiens
ctttcattattgatcctcagggacacaatggatgttctacagagttttccaggcccttctccatctttaggataactcagaacaccacaatcacaatcagacttggggtaaatatgtttatactgctgctctcagtttccactaaacaaattacaatagcattacagtctgaatatttttgaaaaagtcacagggggagagatctttgttccaaaaagaaatagtagctaaagcaggatggaataaagggtgcttagttcagaaaattctggctaattcagtgttctgtgtaaaattaagtacatgtgttctctgcctacaaaaaaaaatgtaactggttgtacataaaaatattcaataaagattataaaaaaaagaatcacacttcatggtatttctggttctaggtctttgaggaatcaccgcactgtcttctacaatggttgaactaatctatattcctgtgaatagtgtaaaagtgttgctatctctctgcagccctgctagcatctgttgtttcttgactttttaataatcaccattctgactggtgtgagattgtatctcattggggttttgatttgcatttttctaatgatcagtgatgttgagcttttttcatatgtttgttggttgcataaatgtcttcttttcagaagcatctgttcatgtcctttgcccactttttaatggggttgtttgttttttttcttgtaagtttgtttaagttccttgtagattctggatattagacctttgtcagatggataggttgcaaaaattttttcccattctgtaggttgtctgttcactctgatgatagtttcttttgctgtgcagaagctctttagtttaattagatcctatttgtcaatttttgcatagaaataccatttgacccagcaatcccattacggggtatatacccaaaggaatataaatcattctattataatataaagatatatgcacacgtatgttcagtgctgccctattcacaatagcaaagacatggaatcaacccaaatgcccatcagtgatagactggataaagaaaatgtggtacatatataccactatgtatatactatgcagccataaaaaggaataagatcatgtcctttgcagggacatgaatggagctggaagccattaacctcaggaagctaacacaggaacagaaaaccaaacactctgtgttctcaatcataagtggaagctgaacaatgagaacacatggacacagggaggggagcaacacacactggggcctgtcggggtgggggagtgggaagagggagagcatcaggaaaaatagctaatgcatgctgggcttaatacttaggtgatgggttgataggtgcagcaaaccaccatggcacacgtttatctatgtaacaaaccagcacatcctgcacaagtaacctagaacttaaagtaaaataaaataaaattttaaaaaatgaaaaaaaaagaatcatacttcatgtgtaattgcaggctattctgttcataaattggccacttgagttgggttgatacttaaaaagcaatgtttgatttaaatgtccaaaaccctgtccccctccaggtctgagacctatttttctctaagtctactgggtccaaattaacttaggtgcaatatatgtctagaatcctatgggattgtagagttcttttgaactctcttaacaatagttgaattcttataataattgctaactttaactgagcacttacattgtgcatgttggcattcttcaagcattttttatggattaaatcatttaatcctcataacacacagcagttgaagaacatgtccaaggtcccatggttagtaagtggcaggacttttagccactaggctgcagtgcccagtagatcaattctagtatgccagatgttggcagcactcactgtataggagacagagaaaaattttacagcagagtggcaagattgagacagcagtcatactggcctctgagagaaggtatttttgagaatgtcatttcgtcacagatgacacttggtgatactttgtttccacattcttatgaacagagcctatgaacactgaaagttgttaggagttgtttgctactgcagcataatccagcccattctgactgatgcagtcatgtttaccaaaatgctaattttagagataaagaaactgaggccctgagggattaagaagctttatcaaaaacctcagttacctagggtgagaaccagggatcaggaccctgcttcactgtaaaatattccaaagaacaaccaaaataataaaaataatttctggagtgagatgcacacatgctcccaataaaatttcatttatttaatatcatgcctgtgttcagaggcatacatcatgaaactactactcaaaaagttctgtggtgcttttcccctttgagaacagataagtgataaaatattcttcccatatttcatgaaagtcacaatcattcagaagcctgtatgtggttattagaaagtttgcctttgttaagcctgcttacatgtttagacaagaatttcaggtattaattttgatttctgtatatctaaagtttgattcatatgactgattaagtcatctaagaaaaccagcaagcagaaatcaaagtaacctttaaaaaaagtgacaagggacagacatggttacactactaagttccccaaaacaatttagtgaaaaaaagagattattatttataatttgaaaatatcatcatctgggggcccttttctcttagacatcatgtgatcctcttacatctccagcttctgcatctccctcttgtggatttgttttctcagcttgtaacactcattttcttcacatccctactttacctcacctaaccacatgttcctatatagctaccatccagtcttcctccttcttccctttctcattcatagttcttgaagttgctactcaatcattttcacttccttgtcttctagtcacttcctctaccaactttaatccttcctcctttccttccttcctggcttgcttcccttgaaaagtgttttatgaacaccaagtatatgacaggtactatactagatatttgggattcagtgtgagataagacagacatggtcttttctgtcacagggtaacagtctagtgaagaatataaacaaatgcaaaggaaattgccacacagtgtgataaatgtccagcatgtagttgaaacacgtaagagtggaatcaagagagacttgagtggtcagggaaaccttcctggaggaaggttatcttgagactaaagaatgtgggaggttgggagagcatgctagaaaagaaaaaaaaaagtgaaggctcaaagatattaaaaaaaaaatcatgggtgatgtgttaaaagaggcaagcagaagttcagtattgctgaagtgaagagcccaacagatgcgcagaaaggaggcacactaagaagggctagctcatgcagtctcctaagtcaggttaaaaagtatgaagcattaggatctgattggtgttctagaacattgggtgtagaatgtactgaaggtagcctggtgtgaattcaggaagattaggagggttttggctgcagtaccagagaaaggtgctggtgtgaatgatgaatggtaagggggttagagatattaatatgttgaggaatttgagggatatatatgagatagtgacttatgcctataatcccagcactttgggaggctgagacgagaggattacttgtgcccaggagttggagaccagcctgggtaacataggaagaccttgtctctagctggacatgatggtgcactcctgtggttccagctattggagaggctgaggtagggggtaggcgaatcgcttgagcccgggaggtcaaggctgcagtgatcacaccactgcacacacactgcactccagcctgggcaacagagctgagacaaatgaaggaagggagggagcgagggagggaggcaataaaagtaaaaag

SEQ ID NO: 1884233 - DNA, 4001 bp, Homo sapiens; identical to SEQ ID NO: 914087

SEQ ID NO: 1884234 - DNA, 4001 bp, Homo sapiens
tccacggaaaaattgtcttccatgaaaccagtccctggtgccaaaaaggttgtggaccactactttcttgtattccctggtgcattctccccaggaacagggatctgtggtctgacagtacctaagtttacaggaacagggagcataaatacaccaagtgaaaaaactagcaatacctatctatcaattgctttataatttggtactgtttctctcctaatcgccattatttccttccttcttactttgcatttaattttctctttactttcttgcagctgtgtaagagcatctcattttgtctgagagctgaatgttccgcctaagaaaattctcagaattggaaatctagaggatttcttaaatccagcttctctaaagtttataaaaattgctcaaatagaaaaaaaagccctcaaagtattgtctttttccagcgtttggataagagagactttatttttaactaatataatttgttatttaaagcataaattaattaattaaaaaaatgtaaatgggttatgccaagggagggtttattttggatctgaagcaatgtttcaaacctttaggcatttttcctagggtttttagatcctgccaaaatggtgtttccatagcaacaggactatagaaacctcaaggggctatcactgtagatgtaactagagatgtccctacaatggggggaactggacaactgcccaggaatttagtacattaatagaacccaagctgatggaggagctgtaacttagggagggagctaatggagaaggaagtacctgtccaattcatgccaaaacaaaataaaacatagcccaggtgccccctccaggtgtatccaaggcaaatgaattggaataggggaaatatccaatttcaaaccctcttcccccatcaacctccctcaccatatagggttctagatctcttcccccaccctcacgttttttggatgctctttaaaaacttcatttcctctccaagactatcccttatgtttcttcaaccttattttacttatctaataactttgcaggcaggggattggggggagcaggaacctcaagaataaaaagcagtcagagcaatttacttatcttccctcttgtgagaagtgtcgcccagaagtaatatcacagccagacctttgcctggaggactttcaatttccagataattttccttaagtgaaaggcaggataaaaggtattttgaatatgaatttaagatcttctacctttaaaacatatccaaaaatgcaaaaatcaaacctgagtattcaatctggtcaataaacaggattatcaatatagttcatcctctctacacttattgtaggtcagtaaatgtagcagcttcaagaacatgaattgggtaaaagcaaaaaaacattaattgagtgacaaacatccacctttctagccaggcttctcctctcttcttcatcatataactataaaattaaactaaactagaatcctagacttttagaatattgatcccattccctcctccccatttttctttctttttcttgtgatttactgagtttgaatgagtctttctttatcagagaaatctagactccgaggcaattcagtcaaagatctgcaatcaccaagtcaggtctggtaaatgaatcctttctccatccaaaagatgagtaagtcttcctttctttgaagtttggcaatacctaagtgtaatttctgttaaacatccacccacaggaagagattttgtttgaaaaagacatatgaagtaaccttgatatacgtatttgttttcaacaaatattgtagttaaaatcaatgagttccattggcatcattttaaatatcctttggctgagaaagaaatagcaagcattcaaaactcaattcaggcagcaaaattaatgtaatttaacattcacaattatttcttaacaaaagcaagaagggtgaatcattcttacccacaaatttgaaagacttctattctctttctgtaaaaatcagtcaaaccccacacttagaaattttctactgagaaaatgagtaattaagccaactttggtgaacgctgaattctctctataattaaaagaaactgaccatcagaaatgctggtatttttctactcctcgttcctcttttcttctaactaatttctcagatcatacacacacatacacacagatcttccaaagcagttattttaaaaatgcagttggccctagaacaacatgggtttgaactgcatgggttcacttatactcagattttcttccacctctgccacctctgagacagcaagaccaaccgttcctcctcctcctccgtcccttcaatgtgaagatgaggatgaagacctatatgattgtccacttctacttaactaatagtaaatgtatttctcctctttatgattttattttcttttcatttcgtttctcttttcttctttcttttctttcccaaaacaaaataatacaaagcccaggcgccccctccaggtatttcctcccttccttccttccttcctttctttttttgagacagagtctcactctgtcgctcaggctggagtgcagtggcgcgatctcaacttactgcagcctctgcctcccaggttcaagcaattatcctgcctcagcctctggagtagctgggattgcaaacatgtgcccccatgcccgcttatttttatgcttttagtagagatggggtttcgccatgttggccaggctggtctggaactcctggcctcaagtgatccacctgcctcagcttcccaaaatgctgggattacaggcatgagccactgcactcatcccccttatgactttcttaataacattttcttttctctagcttactttattgtaagaatactgtatataatacacagagcatataaaatatgtgttaattgtgttattggttaggcttctggccagcagtaggctataagtcgttaagttttgggagagtcaaaagttatacatgaattttcaactgtgcagggatcagcatcctaacccccacattgttcaactgaactaaagctggctgacatctgtctttgctgagctttacgactaagaatttgtctaactgaatcacttcccctaaggaaaaaaaggagaagagaattgttaaatacaagtttaaagcaggtaacatcttagtctctcctaattgcgtgtgacagtgatgtgctctttatcttataactcacagttttcaaaaaaatgtaatttatcttctgcaaactgcttcatgaattgccttgagaagatcccactgggaagtgatagacatataagattctgtatttgaattattcagcaaataaaatttttaaagctgaagattttaaaacaaccttgagaatagcctccgggttggctatcccatataagttgagagctgtggtctttgctttcttgaataacaaggaaggttaaaacagctatgttaagttgtttattgaacataaatactagttgaaaaagacctaaattcaaaacagtgggaacaaaccgcctgatttcaggagattcttgagtcaacagagtgttgaggattctactcttactaatcaaatatgattctaaaatagaacatattctaacatccctcttttgattgatgtcaaaaaggacaaccaaaaaaatgaattccatgaaaaaaaggaaaagcacaagatagccataaccaaacttttatctgaattaaaccctcagaagattgttaaaagcaagaattgatatatttgtaagcaaacattccagagaagatttttattctccagaatgttgtagaaagggaaatcctggagggcctttttaagactctgtggctgataaaagctcatctctgtgcatatgtaaccatctccaccaaggtccagtcagagggtcagcaaggttcattaaaagaaagacactccagacttccctccgtcttgtttacagcaaaccatcacaaagaaattagaagtagaaa

SEQ ID NO: 1884235 - DNA, 4001 bp, Homo sapiens
ggaggtgctgagaggaggaaggaacttgcacaggtgaaagcaaagacgagggaagatgtgtggattcagggagagggaggctgtagctgggcacgtgtggtggggtgggggctggaggtgtggattgggccttgttacaggggcttgcatccaagagtgaagggtctgggatgtgtcagtaggcagaggggtgttattgaagggttctgagtgggcacgtacatttgcttgtgtgtggagtgaccggatagaaactgaggtgtataacagttgctgatgttaattgaacacttactacatgcaaggcatgttcctactgccttacgtgcatcattttctaaatgtaggtcactcttctgtttggaaccctctgatggctactgcttcatcacagtgatatccaaagtccctacccttgactacttttcccctttctcactccagcgaccctggactccttgcttttccatgaacactaagcatattcctgcttctggaccttggcactgactgttctctgtgcctagaatactccttctcccagacacccatggggctcactcccttcttcctttaggtctttgatcaaaggccttccctgccacctagaaaaaggtaactcccactcggcacccccagtgcttttacccctcacctgcttgattcttctctgtagtactcacctccacccgctaccccacagaatatgagctccacggggcagggctgtgttccttgctgtatccccgccgcaggaacaaggccacctgatgcacaggggtgctcagcaggtagttactgcatgagtgactgttctgcagtctgcactcccgccgtgggagttgcctgtcatcatcctcatcttgcagacaaggaaaccaagttgaaggtcaagtaactggccaaggtcacctgctgggaatggctggagactgcctacctctgaccctaccgtgtaaccacatcgccttgtcatggttgtgactgggcaacaacactcacatctctgtcctaggggctgtgtgaggtttttttccagctttattttgaacaatgtttttgttagaaggtacttcattcccagagggttcattaattgagggcgttgcactttgaagaaatcgctgtctaacttgggtctggaaatcacactgtgcgcttttcagatgtgctaaaataaacgtttagagaagaaaaaaggagtctgattgttgtaaaaattaggcagtttggggagagagctggaagcttgttaaaatcctcaccaaggggccttggaagtcgttactaaggagaccaatggtgggttcctttctggttagccggtgggagggcctcaggaattgcttggaagctgctgctgggaaaaagagtgttgggggttttcagcagatgtgtggccccaactccagcatggctttgtcctgatctgtcctgctgcaaagagaggggaagcaagagaccctgtttggatcttggagaaggccagtggcgttaccttacagcagcagaaatgaggaagcacccgactccccatctcattgcccctcccaggcatgcagccagccctctcttggactccctgatgtactcgcacctatccctgctgaacgcttgctattggagagctgcccatacggtctcacctgcatgagtgaagctgctcatcagttcttccgtgcaccaagcccaacctgctgtcctgggacttgtaaaccctggtcacctggcctagatctgcctcccttagagtattcagagaagcagttagcttccccctgtgcccttgattttgatggtagctcagactctgagcacttgccagggacctggtgattgccagcttctcacatttaggatccatgcacatccttacatcacagtggagatatggaaacgagttccagaaaactgaccgcacttggtcctggagctgctaatgaagagtgggcatacagacccaggtttgtgggcccccaggccttgtgctccctggacactgtatataagcaggtctcccaacctggtggctgcactgtgacatcacacaacagtgcacattgagcttgctgtcatctacgactcagtaccctgagctgctgctgagccaggcctcccccatccaccccgtgacactattacagagtgatcatggcagcatgtcacacacacatcctgtgaaggacagtctgcgatggcctctgatggtgtccagagtgagctttggcagtctctaaggttgtcacctttgcgtgtccctgcagtgcctccccgcagtgcctcacagcttttttttttcttttttctttctttctttcttttttttttttttttgacggagtcttactcattctgttgcccagactggagtgtaatggtgcaatcttggctcattgcaacctccgcctcctggattcaagcgactctcctgcttcagcctcctaagtagctgggactacaggtgctcgccgccatgcttgggaatttttgtatttttagtagagacagggtttcaccacgttggccaggctggtcttgaactcctgacctcaggtgatctacctgcctcagcctcccaaagtgctgggattacaggcgtaagccaccgcgcccggccacctcacaggttttaacgtgcatctacatcaccctgggatcttgtgtcaatgcaggtcctgattcagtaggttcaggaggagcctgattctgctcgtccaagctgccaggtgaggctgaccctgccggtccacgaccaccctttgagaagtgacatttgatcccaggaaaatagggatcaccctgagggcaggatcccagctgggttaggagcaattagtattttccaagatccatgacactcctgaatttaatgatagtccaggccagtcccaacagtgatcagaccatgggagagatatttagttttactgactgtgactcaagaggcgttgtggctcaacacaccagacatgcaaactcatatccacccccagagcagggctggtgctgcctggtacaggggccatgctttggttgctcatagccagtccaggctgctgtctgaggccaggaggcatgtgcagcacatcctccctggcacagctatcagaggagggcaggccctaaacccataacctgctgactgcaatggctctgtgacacgacattgctcccagcagcaaggtgggcgggggcgatgggaagagcaccagctaacaagctgcgtgagtccagagaaggcacttgacctctctgggctttcttgtcatctgccagaagagagggttgaacatgttcatgtttaaattcccccagggtctgatttcctttgtgtgagcactccgccactaggggttctttggctggcaagagaaactagagaagttttgcttccaggaggggagaggtaagtacagccttctgctccccgagaggttgtcctgggcgtgagtgcagcagtgttctgggttgtctggggaggagcgctccatccaataggaagaggagccaggaagctggttctggtgactccctctctattctcctctgcagacactccatctgtgtccccaggggggcctatgactctcttccacctgtatctggtctccttgcgaggcttctgaatgtgcctttgggatttactctccctccctagtgctgggtggcctccacagtccccttggggacactggcaacgttaagggctcagtgccagcaggaaggggttcagcttcattgatgcacagagaggtccattcccttactgttttctgctcttgtaggtgggcagactatacccatggggcccaaaccggcctgcgtctgcaccgtccctagaaatacgcagcagcacttttcctcccctccctgagcaagccagggagccctgtggcttccagggcatttgcccttgtggtcacctaaggccgaggcagcggcgtaccaacgggtggcagtgggagcccctccttggtggggagcagtattgtatcactgac

SEQ ID NO: 1884236 - DNA, 4001 bp, Homo sapiens
acagagtatgtgctcaattaaagttccctagcacttctggctagaatgccctcacctcaatctttgccctctaaatatgcctctcaggttcaactttgccactttcatgaaggctttcaccaactagaaatgagctgtcccttttctgaatttctacagcacattgttctccaaaactctgtcatggtactcttcacattctacattacattactgtcatatatgtaaacatctgccctaagaccatgggtcctctggggcaaggactgtttacaatttagctttttatcaattgtcccatgtagcccaccactctgttcatagcaggtctagtgaaaatacattgaaaagaagaaaaacataccttccaaactgcaaaggaaaattctttttaattctgtggaaaagcttttctcctgtgtcaagttcaacataaaaatatgctgctcctggctgtgcaatctaaagtaaacagagttgtatgaggatgtccaataatgctttaaaaatctataatctgagttcatctctaggcaaataattcagtctaaatgcacaagaaaaaaagatatgtatgttgctatagatcccaagccacttagtggaactagggcttaaaaagtctaactggaagatactaacaatatcctcccagtggcgtctatccttctaagttcctaccttaggaaattctaatttcttgctcttcccaggaaagcactaaactttggagtaatgccctgttcatctccagtctagtcaatacccagtgctctagttccaaattgtccactgcctcttttttttttttttttttttagagacagggtcttgcgatgttgcccaggctgaagtacagtggtgcaatcatacctcactgcatcctcaaactcctaggcttaagtgatcctcctgactctcagcctcctgagtagctaagactacaggcacatgccaccatgccaagcttatttttttattttttgtagagacaaggtgtctcactttgttgcccaggctggtatcaaactcctggcttcaagtgctcctcccgcctcagcctcccaaagtgttggattacaggtgtgagctaccatgcccaacccattgcctatttaataacatttttggaatgccttgatagctcaacatgtcaaaaaccttaggctcaacatgtcaaaaaccagatcttgccaggcgtgggtggctcatgcctgtaataccttcgggaggccaaggcaggcagatcacaaggtcaggagttcgagaccagcctggccaatatggtgaaaccccgtctcgactaaaaatacaaaaagtagccaggtatggtggcgcatgcctgtagtcccagctactggggaggctgaggcaggagaatcacttgaacccggaaggcggaggttgcagtgagccaagatcatgccactgcactccaacctaggcaacagagcaagactctgtctcaaacaaacaaacaaacaacaaacaacaacaaaaaaaacagatatttactcttccctgaatatcaccatcccctgtttcacctgcttgatgtcagagtgctctgggatttccaacagctctatctgctgctcctgtgcctgggtaatgaaggcatctttaatgtcatcagtagtagagcagctgattgggacaggaatgacctgggggttggggagacaggagaaattccttgtgcaggtcccagagaagttgtgcctgcacagtctctgagaagtagcaaatccatcacaggggtggagaaacacccctcagcacagaatatcctcaggccagacaagcctgtgtcagcctgtctgtaaggacttaaacttatgagatagcctgacacatgtgggagccattctctgatgcaggaaaggcttaagagagatatctccgtcacaagcctttgccatctccgatattatatatgtggcagagttaggcccatttgaaaacttaacaaatgtgccaaaaagaaaaccaccacaactacaaatgatttacaatctgattttctgagctgctagccccatgcaggctttgagactatttcctaccactaagctttccctcatgctgggcctccacacaaaatactcactttcttccaaattcttatccagcaagccccacatcttccttggaacttcctcaactacccattccttttctaaacaaggaacttactatctatgctgtttacatgtactgaccacacacttccctgtgaagtctctggggttaccaccagatactctttaaaaactttttaaatgaatgttatttaaatattaatataaaaatattaaatattttacatattaaagctaaactttatataattttttttttaaagatggagtctcgctctgttgcccaggctggagtgcagtggcacaatctcggctcactgcaacctctgcctcccaggttcaagctattctcctgtctcagcctcccgagtagctgggattacaggcatgcaccaccacgcccagctaatttttttgtacttttagtagagacagggtttcaccgtgttgcccaggctggtcttgaactcctgagctcaggcaatccaaccgcttcggcctcccaaagtgctaggattacaggcgtgagccacctcgcccagcctatttaaatacttatttaccaatatcaaagtccccatagcgcccttccaagtttctatgaacagaccacctacctgtagctggaggtgatggctcttataatttctctcaaatacaacacaccatttccctcgactcttaaagaaccgtctcagagtggccttatacttctccacctcttctaccacctctgctgaaagctccaccactgactggtagtgtccaataggcaggatgaggacatggtcatcagataagcctcctttggccagggcaaggtagcactgaagaagcagcacacagaattgagacatcaatacagcatgtaggattctccagggagaaaaacctatacaaaaagtgagcctgagggtgtaggcgaaaagtacttgaggttattaataaaaattctttcttgaaaaaatctgattttagagattgtagcaacaatgttctcaggtatccgctgaagagtgagattcggcatgaaaatttctatgcaagtagcaaatgaactaggagcaaatgaattgggagaggcacacaagcaggcttttggcttcaaacacactgagctgagggagaccagaacaaatcgctgggttttccctcccatgctccaaacttgaaaacagtttttcagtttttatcaccctcaaccacaaaaagatacaacttctgatttcaaaatgaccactttcggctgggatagtggctcacgcttgtaatcccaaaactttgagaggccgaggcaggtggaccgcctgaggtcagaagttccagactaggctgaccaatatggtgaaacctcatttctactaaaaatacaaaaattagccaggcctgtgatggcatgtgcctgtagtcccagctactcgggaggctgagacaggagaattgcttgaacccgggaggcagaggttgcagtgagccgagatcgcgccactacactccagcctgggtgacagagcgagactccgtctccaaaaaaaaaaaaaaaaaaaaaatgacccctttctgcctccccagtaactttcattcccacccccacccccgaatatactccttgggctcacaaaaaaagctaagatggcatgattagcatctaatgttcctaagccttaagctgctgactaaattctacaaaacaaaagcaaacatacaacctaatggggtagaaggaaagtaaaacctcaaactcagatgcatccaaagaggcagaaaagaatgatttccaacaatggatgtcagcctttaatggcaactaaaaatatttctgtaaaaaccaaaacatgcaagaatggtctaccactcagatattctctgatgggaagatgccatgagtgagcacagaag

SEQ ID NO: 1884237 - DNA, 4001 bp, Homo sapiens
ttccctctgttccaattcttctttctcacgctgaatattcagactctcaaggcgctcttttctctcctcaattgtctggcggcgagccaggatccgctggtgctcttttcgtgaatttttaaggtatgcagtgacagccaactgatgctgttcttctttctcttgcttcaaaaacaaatgaatttttttacatgaccaaaattaacattctctggtattaggcatcaaagaaattacaaaataatcctgatgtactgcctttctatgtatctgcatttgataatggaagatgacactatccaagctgtttgttttcggtattaaatgctatggtgttgctcctattcagtcttttaatagcaatgacgcagctaaagaagctctcctagataagacaacttttctctgcaccaaacctaccttaggtgttcattaacagagctcacatacaagaaataacttgttacaggcagtggctcatgcgtgtaaccccatcacttttgggaggccaaggcgggtggatcacttgaggccaggactttgagaccagcatggccaacatggtgaaaccccatctctactaaaaatacaaaacattagctgtgcacgtggtacgtgcctgtagtcccagctacacaggaggctgaggcacaagaattgcttgaacccaggaggtagagattgcaatgagccgagatggcatcactgcactccagcctgggtgagagtgagactccatctcaaaaaagaaaaaaaagaaataacttaagcaggagggaaaaatccagtcactgtatttcactatttgaggaatcctatgtccactctgttgtttctgtaacataatccaccctattacattacctacacagagtagtattttgttcaatggaagaaagctcaatgatttgtgtatttgatcaaataacaaaactaccaagtacaattctataggaaacatatcataaatcccttctctcagatattgtctcaaacctttttgtaaaagacatggcatggcgttaagagtccctcaaaacttctgggatttatttccccgggaagatgcataccagtatatgagctggtttaatgacttcaagtgcttttgcaagtactgaggacatggctgtcagctggtttcttatctgctctgaaggcatgctttgcaaatgaggaccaatcggagcatcttctcgagtagcataattcaaatcagatccaaaactcagggtccgagaagtgtgatcaatacgaacctttgaaaattaaattatcaatggttaaatccacaagtaagcatgaagtcaaaaagtaacagaagaatgtcatatacaaaagctggaaaagttcactcagtaaactttaaaatggtatcactgtaccaaaagctgagaaacagaaggtatgtgtctttctagccctcaagggccttctcctgtctccttacagcacatacctacctgcaagtcgcaatgcctggctgcatctactatggcccgttccagttggaaagcatcaacaaaaggaaccaaagaagtcaaacgagaaaactcaatgctctgataaatctgtgacacctgcatagaaaacaaagggttaataacactagccactgtttattcagcactttttatgtgcaatctcatgacagtcatgggaagtagaaattatgccagagaatttatgttagcagtacattgttaaagccagaatgctaatcccagaccatcgactctaaactccatgctttgagaaccattatcatactattcctcaaacctataatcttttcaaatcctagttgttgtaaaacaaaaaagcctaaaaacctgctacttaccgaatatatttaaacacttcttatagaatttttgtctgaaggagactggcagcattactatttatagttatactgctaattagccttcaattatttgtatagcacataagaaataacactactcacataaaagaaagcaggtcaatgaaatgtgcacaaatactgagatgaaaatataataaaacgccctccttcccaaatgcaacaaatggaaaacaaaatgggagcacttactgacttaagcccctggactaaaatatatgaaaaggctgtctcattcactcatggtggggggtctattaatccaggcttctgaatagctattaaagctttaaatccataaaccctatgactaattccacttcttatgccacagaaagtaatagaagtatgcaaagatacatgtatgaaagatgctcaatgctacaagatttctaacagggaaaaaaaaaatctaggaatacaggttttcatcaagagagtctgaataaatacaccacagtaccttaaatggaataaggtagccctacattactaacaaggaaaaatgcccaaagacagtgttcagccaaaaaacaaaagcgtccgttacaaaatatgtaaatataataattctgattttcaaattaataaatagactaatttttgccaggggcagaacttggggaggttctcacttcctaggcagttctagatttttccagtttttagtttcatgatgagcacataacatcacaaaactttttttatttttttatttttacctgctgcagaaggcggaggatggtgttgttttgcagttgtggcacatactgctgcaattccggttccttttcaggttgttccctaacccaatttagaacctataaaatccattaaattgaaagagaatcacactttctacataagagatactaaaacatctaaaactcttttttttttaatatacaaaaacatcatccaatgcaaagaaatacaaaatgtatcatgaagctactgatacttgtttgaaggtgactggcagcaatggctaaattagtcatgctgctaattaacctccaaaggtttgctgagcacatcagatatatcttttctcttgaaataaagaaaaaagacaatgaaatgtgcactgaattccaacacataggacaaaacttctctcttaacaaatatgaatacaacccaaaactgcaagaaggccaactctgtggtaacaaccagaacttaaatacaaaggcttacctttgtgactcgctcacagagttttaatgggttaaattctacttcaagccaattgtaaaggtctttcacttctgggacaacatattgtagtacattaaatctgacctacagtaagcaaaacaaaagatgtaactgccaaaggaaattttccaactaaaattctgaacttagtataaatgatagcattggaaatctggaaaatgatttaaaaaatcatcaagcctcaacctcctctaaatttaccaaaaatgaatccaaagtacaactatgctgggtcttttgccccacactatgcacattaacctaccgtgaaaagccccacaagtatgtaaaaaggaaatgaaactctaaaaaacacaactacaaccaattaaatattcacaaagacaactactgtggccaatagaatattttattaccaataacaaggaaaataccagttttacttttatataaattatcacacaaaaattatcatggcagcactatttctaatagccccaaactggggagaattcacatatggtgtattcataaaataaacaaaaatgctcaaaaaagaacagctacatagaacacatgaataaatctcacaaacatagcggtgagaaaagaatttcacatattaccccatttatatggacttcaattttaccatggaatatgtcattttttttaggaactgttaacccaaggacaaaataactgctgggatagagcaaagcacagaagtgtgtacccatagagagtgggtgacaaaactgaggcaaatattggcagatcgcatccccaagcaaggagggcacccacacatgggagcactcaggtctaaggttaactctaatgtaaaatgggtacaaggctgaaatcctacaacattctaacacttcctccttataagcatccatatatcttt

SEQ ID NO: 1884238 - DNA, 4001 bp, Homo sapiens
aagttattatttaggcaagtccacgtacatacattctaccacttttaactgatcacaaagacactcatcagccaatcaaagccagatctgtgaaacacaaaagggtgataaattacaacacaaaggatatcagggatgcacaaacactgccggtctccacaaaccacacagtgtgtgatcttgcctcaattttcaagccacccaaagactgatttagtcagacctttgaaatgtaccaaagacgttgccacatagcctgaaatttcaaatctctcagacttgtggttgtccaatttcaaatatccatgactagaactgatgaccatgaaaaagaaaattttttaaattttagaaaatggcaaaatgtttaaaatggcttaatactgaatcttgttcaacaactggtcccagattccagcaactagacctatgataaaaacaaaattctgtgcaatttaagcacaacttattttcctttgaggtctcagcactcttaaagttaggataataagacagaaattttaagagaaaagaacatacaactatactgctgaaagctggattaccagtcgctgttaccagttatgttcctccatgtgtgtttattatgtagtgtgtggtgtgcatttgtgcctgtgttcctgtgcctgtgagaagcggaaatagaaaaagggattagcgttcagtgcctgttctccatcagcctccttgcgttcaccctgaagcttctcgaccagctgctgcttgtatcctcgggagagggtttcccactctgagcgggtgggaaggcaatgccaaacatccgggaaaaataaaaccactgtctccacatgagctggaactgtacgccccttgtgggtctcctcagggcgatggtagcgaatctctgcaaaacggtacctgttgcaagggaagaagcatgttggaaaaaaaattctaaaatacattttaaagaccctagttcacttgtagcacatcaagtaaagaaattttgctgcaagaacttgaggttggtctaaagaaaaaaaaattatagaagccatagttcctcttttggtacatttgtacaatatttaataagttaaaggaagaatatgttcccccaaggcattttcaagtttgattacagagctacccgcattttagagaatacctgaagaagctggatagctgttcagatttcatgtgctaaaaaagaatattctcaaattaagtcacaagagatacactaaaatacacaggacaaataagcctcaagagaaaatatggctgaacaaaaataatcgcaactacatcattttataacaaaagaattataatgaaatgaagttctctcttgacgatcttctccagctatgcatgaaatgaaaagtattttcaacatacatccaacttccaaagtacaacataacaaaacatttaaattttcagtttattttgattagttcttaatcccttttcccccaaaacattttggcaccaaataaactttagctacaaatggggattttcctttgagattacctgcattgaccagggttgctaaaataagccggggggaaaaggctgatcgataagaacaactacataaactatcagtaaaacacttctaatcaagaaatgaattagtacttaccattgtgtgcacacacttagatcaatgcctgtcagagccttacaacaacgaatagcagtcttaatcaacacagagggatctttttctgggtctggtccatccaacgaaggagaccagtggcctccaatggccatagcttcatccttgcctttcatgcccactaaaaactaattcaaaacaaagaatcatttacatatattacgcaccctgtcaaattaccaataagatacttgagaaggaaaggtacaaacctttccaatatcatttttactacctctggtatctgtcagtcaaggaagagttcagttcattgtgttccacactgcatttcagcaatggaataggatttacacacatcataactcatccttttaaaatatttcttcagatagagttcttttaaagaaacaagctataattcaaacttcaacaacatccaaagacactctgaatcctattaccactaatattctactatgttacaaatataaaacatcaaaatgactgttgaactagtagcgtacaaataagatatagttgtaatctgcaatgagaaaaacatctacatcattaaattctgggtgccttaatactaaaattactcattaatcaacaaatattaaaatgtagggctttagattttatgtgtacaaagttacagctaagcaaagtgaatacatctaaagttaaaacaaatgtgtccttttaccttaacaagtctagcaggatgttggaatccatctcgaagttcttgtgggtcctcagcaagagcacatgacttatgatataaatcttccatactagggctagccatcagcattacctattatagtcaaataattcaatcctgtcaaaagtctaaagtaatgtgaaaaaatgagaagcactactaattatctttaaatataagatgtctgaaatttaaataaaaataggaagtaatactatagcagaaacagtattagatacctcagcctcccaaagtgctgggattacaggcgtgagccaccacgccaggcctagataccttataattacttagttttaacttttgaagggatgctttttcagtcacacaatgctttaaacaaaactatagactatacacaatatactgaatgtttcccttaagattgacatttagtgcattcatctaacattaagttttatctgaggctaccagaagtcatacaacattccaaatatctcattaatatcaactttatcttcacatttttaataaggtttaaaatgttagaataactagttttacagctcaagagatgaggcaaagagagcttaaattaaattatgtaaccaaaataggatcaagcagttaagaagaaaacaggtattcgggtctacctaacaaacactttctgaaggataattctacatacccttttattatgaataactgctaagaaatttaagctgcatatcacagctgaatacaaacctttgcactgtataagtggtcagcatctggtggatcaagaatggccatatttttttctaaggactctacttctctgtgcattacataaaaattgcagtaatttcccagctgaaatggtcttgacaaagggaaagcatccacccatgtaaattgagcatcaaaaaagtcactaggtatatacaaattttgataacggcgccttagttccatcatgtcacaactgggactgaaaaacagacataagtagtgaataaatagccttaataaaaaaggttacacaaacatttaattctgtagcaaatataactggatatagtaaaaagtaagctgaaaaaagacaaagtcagttactaatgagctatagatttgcatagagacatatgaaaatattacgttcaaatttatatacgcaaagctttgaataaatagtattctcagtgttatccttattttgatactttttgttacagaagacgctttgaaataacttgaatctcagctccagaaaagatctgtacaaaagcaggttttcctcagttggaactgtggattacttgaaaattatggttcatgttgaatagatacaaaacagcaatgagagtattagtatttctgtacgcccctcaatcaggtttttgagtgtagaaaaattataacttttattttactatagtaagttcctagatcaagcatacttacattcaaaattaaatacaaaaatccacaaaaagcaaaattcatatgttccttggattatctgcacctccacaaccctttctctgtgaatgattaagatccatacctgattattatgtatagaggggataaatttcttgccttttaaatctcacactgattttttaaaggatcatttcctttttcctaagaagtagagcttttaaaaga

SEQ ID NO: 1884239 - DNA, 4001 bp, Homo sapiens
ccttcatgggggaattgtcagccatccccagtctggagtgcattgtgagcaataaacaggagcggggcttaaggtgaaaatgaaaggaaaaatatcaacccaggagggcagcaaaatgccttgaggaatcatccttgacgtgtaacacatttccgtttaaggatgtgaaaatgccacaggctgcttcactgagttagaatgttagagatggactttgagctcaaattgccaccattcttcgtttttacagatgagaaaatcgaagctcagggaggataaactgtttgctcagtgtctcacagccatgtcctgcttatgtcaccacattcctcctcttagatttcattaaggggcccttgtccataaaattagtcacttgagtcatcaaagcttacttttaaaattttgactttattttggagtagttgaagttggcagtgaagatttgcagcgctcaaggatcttggcatctatctccccattcaccttgacatgtgtgtattgcagatgctaggggcgtgtgcttgggctcagtattcaaatatgaatgaggaagggtcccttgtcttcaaagacctcccccaaacccctcatgtggtggaagagatggacagtaaaggaggaaggaactccttctcagagacattaaagaagcattcagagaagaggagctgggcaatttgctgggcccagatcttacagtgaagggggctatggggatgggatcggggtggaggacattcctggtcaaggagacagcatgggcccagtaaggaggcatgagagatggtgacatgtttgaggactggagagtggcctgggaatagagccttccagctgtctggcttttctctgatgcatggtggatggtttggtgctgcccacaccgacttctggaagacaccgcctcttgctctctggaataataagaaagcacagttatctctatgcatgtatcagtatgaaaaagcatatgccaggattcccggatggaaatgacttccctttgaagttagttcataaataatgatgaagaccataaaagtacacatgcactgcacacatttagctactgctgtggactgtgcttgctgggagcagaaccttcaggaaaaccagctgcccagagaaagaatgagggactatacattcgctaaagcacgggctcccagagcctcctgtaggaccaagggagaccttttatggaacagggtctattccacggcactcacaattgtagtaatcacttagtcactctgaaattccaagagatagtcagagaaaaaacatggcctgtgacaatgattgccctgaccaagcctttccaaggcagcagatgcttctttacttccaagcattgcccgtcatgatcaagttcttcctccagcagtgcagccacgtttccctggtggcagacattccttttccaaggttgggcttgcttttagagggcccagagatggcaaacagcattgtgtagtgctccttagtataaactctcctctgggattgttcttaacaaggtggtttgagtttctctaggaattaagctggggctggctattatttttctggtaagacttgttactctaaaatgcatatggggccaaaatcacaatagtcttgtctttggagcaatcagacgcacatggcaatctaaggctctggtaaggaagagtccgtgggttcttattcaataaatatttaatacattgggctttgatggatgtagacactgtctgcttgggttttcctacaccaaaaggtgaagtctctggtggtcactgcctcttgtttgttcctttgatttcctttgacgaaaaacaattcttgtcttggtgaggtctattaaatctgttcttttccaaaatggggctggtagtgcatgttggacagaactggaactttccctctggtcattccttgccatcccctgggtgattcggtttcccattttctgggatgtgctgatagggcttgtctcccgccccctcttatataaggaggcagggtgcatctagtgccagattttattcaaccctgtaacaatcccccctttatgacatcactgctcatcaccatggaaacatttcctccgagtcacagagactggattgtggcatcatagcatcaggcaggaggaggagaagaggaaaggggagaggattgaaactgcctggagggatgaaatgccaataaaataggacgcagtcacagaaataggatttttctgtccggatccttgaatggagaatctaaccatgagccacaggaataaaccttatctagcataaggaggaagagcttttgtggaatgtagacctgggaccttttgttcctgtgcagtatttcttcagggaaatggaataattttaatgagagctatgctgtattttgttttattttagagacagggtcttgctctgttgcccagactggagtgcagtgatgtgatcatagctcactgtaacctcaaactcctggggtcaagtgatcctcctgcctcagtttcccaagtagctgggactataggtgcatgcctccatacccaactatttttttttattttttatagagatggggtctcactgtgtttctcaggctggtctatcctgtattttatatgcatttcttatttcatcctcacaaagtctctttggactattggatcagagaggttaaataacctgcctaaggtaacacggctagaaaatggcagagctgaaaattattaggggcataagatgtaaactgtgttctcatgcagcttagtgttgggagagagagagagagaggagagagaagagagagaatatgttggagacaattatcaagttaataacatatacatagttaaaattgtggtaggtgtcatgaagagaacagacatgatgctttcagtgaggagatactggagtgtgcataggaactacttatgtttgtatgttattaaatttgggacaaggctctgaacctagttggtatggacttagacgtgcaaggcactgtgctcacatatgtactgactttcccgagctcacgtgctgggccccacaaccaatacccttctcctcagctgcttttctctgcctatgccccatctttttgcttctccatttgtcttctcccttctcctgagatcttcctgcctgccctcctctcttgatcctgtttcttcctactgatctctgatcttctctttctctagactataaactcctcaagagagagaaaactgttcccctgttttatatcttggtttacccaaggatcaggctctagcctgatctaggactgcttctatggtctgctacagaaataaatgagcaatgtccctttttaaagaaaaaaaatgactacatttttcacagttaaaaaatattgtctagtagacttttcttaacaaacgctggctgataaatgaatgaacaagtaacaagtgagcattaaaagggaacaaaaccccagagtaaatggccaatcctgtgttgttctacagcttgtttgtcgttgtttgcataggttcattatgattgtgatttcaagttgtattcatgtgatctggccaccttttctcttaatacaactggtccaagtctgtaggatggtgtcagcttagtgcttcacagggttctaagagctgggggtgctttgccatggacctcctctgggagctgctgtgctggtgccccatgtggcaatagatggatgtaaggaggcctcatactttccatttgtgtcaccttgctgagctttccttgattcatctgagtttcaggagtgtttgccacttgagttcaaggcgccttcgtggcactcctaggatttaaagtgggcaggttggtctcaatttggtctccagtgtctgggctgcccaactcagatgagcaccttgctggttggaggtctgcaattagactttattgcaacagctgtgtgtgtgtgtgtgcgcgcatgtgtgtgcacgcgcaatagtaaaccatattaagtgcctttactat

SEQ ID NO: 1884240 - DNA, 4001 bp, Homo sapiens
ggggcagccagcagctcctgcacccactggggctccaagactgtgggcaagggaggaagggggagcccaggccggaggatcctgggggacggtgcggcccgggggccagatgtggtcaccgagcccagccaggcctagggccgcagcagccccagggcactgagggcgccacccagcccgacacagaggcacaggccgcccgtgggtccagcgcccgaagtccacgtacagtagctgtagatgccgagccggtcctgttgcctccgggaacccagtcctcctcgtcctccaggccgcgttccccgggtcccgcggcccttctccagcctgagcccgccgccccggccgcagccacgcgcagggaggagcccggggcaccatagcacagcgccggcctcacacacaccctcgaggcccctctcgagcccccgcggagccctccgcggccgcacgcagaggaaggctgcctcctgtagcagagcccagccattcgcgggtgcccagttcatcttcatggggctaaacctgcgggaagagagggaaagggcccttagtttccatggagatcgggtgcccagaggcggagggctcaaggctggagagcagagggacccccatcttttgtgggatcagggtgcccccagcatcttggaggcccactgaggcctgggggggcgcggtttaacctctagcatcagggacttaggcctgggggaggcgctgggaagtggcaggtggggcaggaggggcaggagggttctgcacctgaaggttgtgcacctggattgggggtgtagaagcggggcaggagcgttcaggcctctgggggcgtccaggcccgggcgggggagcaagcctgggggagggagctctgcacgcgttgctgggatgtggggggcggggggaggcggcatggggggaggggcgttgtgtttggaggacgcggtagccgggaccaagagctggctcagatcagggtctggaacggggacgggccgtgcctgggcctggtccccacctttggggccaaagcctgggtgcgggccttgcggatgctgcggaggacaagcggctgctgacaccgtgcggactccgccccagcagacccgtgccccagggacagtccctcccgcgcgcgcccagcgctcaatgccgtccccggccgcctagttcagcagctggctgggggcgggacggggtcgagttgcggggccgcgtccagacacggctgtgcgggcgacagctgcatcccctccccgcgccgcccctcgctcccggccccgtacccgccccagcctcccggccttacccgccacgggcctcggttggaaccgcgcgctggagtatccgtccctgaggccgcggccgagcgggaaggagcgggcgggcggcggcgcggaccctcagccggagcgcggagccgcggcgcctgggttttgcgcgaggcctccgccctgggattggggcgggcagtcgcggaggcgcatccctggtgagccggtgggaggggaaaaggatgtcgcgtcccccatccttgcggcctcccgtcctccgtcaccagccccctccgtctcctgcatcacaaggccccgtccccgcggtcccccgcgacccccgcacccggctccgctccacccgccgtgcttcctgcccctccacaccctcgtccccacccgggcccatccccctgtgagccctggtgccctgggatgagggccgaggtcctgagcggagagggtgcttgtaccagccccatggtggctcgagcccaccccgcggcccctcccgtggcaggtgcggtttctccaccggttgtcagctgcggggccgggcggagacctcctcaacctccggccttgtttcagggaggatggggtcgacccttgcgatccccagaggccccccatggctccttctgggctggctgtcttcctcctgtgggttctgatgccacctgggccgacggcgtcttctcagcccagggcggccgcgcctccggtgagtttcagctgagggcgcgcggccagctccgagcctggctccgggtgcagcaccggcctgggacctctgctgtcccgtgtaggggtgccctgcaaatatgtgatgaataagtgaagaaatacgttttatcttctaacttgccggatgttagaaggaaaccaagcttatgcttctcatttatagctaccgttaaggattggacagaagcttagctttttgggtgagacggacaacagtgtttttagaacctttggcaaggaagagctggaaagaacatgtatttgaaagtgactgacaggtcttctggccctagggggccacctgagcaggtgcacccagcttccctccaagacagaaaataaattaacaaggagagcaggaagggccccggcagactccagacgggagggggtgctgcccatcaggcagaaggagcttggaagggaggggccgtggccatgggacgtggaggtgggagcgggggtcatcataggtctgcacactcgggttgagtcccccttccccatcacacacaggacagccagcagtgagctgcttaccccaaggagtcaagggggttcttgggcaacccctggtgctggagccggcagtggacagcaccgcagccagaccttgcttatttttggctcatgaggaacatctgtgaccgttccctcccctggccctgggaggggatgtgtgacctccactcaagacagccatgcggctcctccggctgcgggcggggagggcatgtttcccagcacaggcccaggactgccagctgagaggctgggaggggcccctcacccctagactttgcatgtgaagccaagcgtggagcctcacagggaatctgagatgggagccagtgagatgggggcaggacccagaggggagaagaggtcctggggatgctgtggatctggatccagcgtgcgggagctgaggttccggagtgaaacactgcctttcatggaagcacgtcttcctgtcacccatcggcttcattttaaaggatgaaaatgtatcagacattcaaggagagctgcatcacataaaagaaagaccaggcaaagaaacggaaaataaatggattgagaaatgtgaatgactccaatcattccaatcattggaatgaatggattggataaaactccaatccatagactcagattagggagatatatttatataataagaacaggaaactgtgaagatgaaataagacaaaaaagacacttttgagattaaaaaattactgcaaaaaaaaaaaaaaaaaacaacagaaggatggaattgtatatttaaggaaatgtttctggcaaaaaggcagcaaatatgaaagaaaaggggatagacccaggggatccattttgggctctaacatctaacagttgttccaaggccgagaacacagaatgggaaaaggaagggggaggcggtgctccagctgattttatgattccagaagccttctatcttaagatgtataggatgtatcttagggtgtataagagaagcgcaagagaaacatttaggctgttttatgtttgagtagagacatgaaagttttagataaagcagcagcacaatgagtccagcggcacatcagaaagcaaatcaccatgatcaggtcaggttcagggtggttttatgtcataacatatgtcagtgtgctttacctattagtggaccaaaggcaaaaaatacggttttctacagagaaagacaaagcatttgatttcaatcaacattcgtttgtggtgaaacatgttgagaaaactcatcatagaagtgaaatgttttctttgataaaggctaatctcagaagacatacgtagtggagagcttttaaatgtatttttaaaaatacgaaccaatgagaagattgcctactttcaccgcttctgtttaacacagcattggcagagctgccaccaagaagaacacagcacgttgaaggcacggtggctcctgaagctgcagccctgagacct

SEQ ID NO: 1884241 - DNA, 4001 bp, Homo sapiens; identical to SEQ ID NO: 914103

SEQ ID NO: 1884242 - DNA, 4001 bp, Homo sapiens
gttcagactcttggagccagagtctgcatgacccctaaactgtaatttctaatcttgtagctaatttgttagtcctgcaaaggcagactggtcccctggcagaagggggtcctttcaggaaagcgctattatcaattttgtttcagactcaaaccacgaactgaattccttctcaaagttagctcggcctacacccaggaataaacaaggacagcttaaagattagaagcaagatgtagtcagttaggtctgatttctttcatgtcataatttcctcagttataattttcaaagatggtttcagtaagaggtattgctgatttccacatgccaatcctatacaaggaagacccagtgagcggtcttcctgccttcatgtttttcactttctcttcctaataataattctctttctctctctctcacacacacactgcttcttttaatgttagaaatagtgtttatacagctgcctctaatccattccttcccttccctgggggtgttggagtttgatctggggataaagaaaccaaggtaggtaaaccggtttaactgtttctccactgagcctctgggtaaatagactaacgatatttgcttagaggaagagacacatccattgagtgtccctagcaggctgatctctggctgaggtcctgcttaaagttaatggaatccaggatccaggaggcaggactgcctggagaatggctcaaaggctgtggaactccctgggtctaaaagagaaaccgtttaacaatttaaagtttcctgctgtgtgaggaagcccactgacctcacctagaaacctcacctacgatcctgggccatgtgcagtgtgggaagacaggactggggtgtccacccttgatgtcccaagcctgtctctgctttgtctgagtctgttgacataaccagaaattatgttttaccagctatctgggcatgcctgagcccagtcaggtcgacacagaaaatgaaccattgaaagccttaaaccacacacagcacagctgtcctagacggccctccagatatacagtgggcatttcatgggcaagaaacaaacctttgttttgtaaagcaattgagagcttggcgttgttatcatatcatagtctattctatcctgacaagtaaaaggagttgcaatctctctcctagagttcagcagaaatctcttaactttttcacttcacctctagccccatttcccctcatttctctgcagatctttgaaattattaggaaagcttgatactggctaagatctctgatttgggttaatcgatgtgacagcagtccagtcctgtatgttagctccgtttctcacagaaggatagccctatgaaaatcctagttttctgggcccggcgcggtggctcacacctgtaatcctagcactttgggaggctgaggcgggcagatcacccgaggtggggagttcgagaccagccagaccaacatggagaacccccccccccccgccccaccgccccgactaaaaacacaaaatgagctgggtgtggtggcgcatgcctgtaatcccagctactcgggagactgaggctggagaatctcttgaacccgggaggcagaggttgtggtgagccaagatcacgccactgcactccagcccgggtgacgagagcgaaactccgtctcaaaaaaaaaaaaaaattattgttttcttttccttaaattccaactagcgggccttaagcttgcaaggggaatccacggtgctgtgcgtcttccactgggcccactcaatccactttcaccctcatagcttttcaccctccagtttcatctctgcctgacttttcccagggaggctgacgtacgtggaactcaccaataggttctgggctcttttgccatccggcttttctttggagcaaggaggagcatgaaaaagagatcagaaagagggaggtgaaagaccatccccagggcctagaagctggcggaggcctgaataactcctcccttctcaggcccagtcccaaggcgcaaggcggcttacgtcatcagcgtgcgtcagcaagatagcagaagcggggagagagctgttctgaagacccagagagaggcctaccgggtatcacgtagcagtagatacacagactgaaacacttcctgtttacgggagactgtaaaacccctgcccgtcctcatttggggctgatgccattttaggcctcggcctgaaatggcctgaaggtctgccttcaggcattcattaaaactgcctgttgctccacactgccttgtgttgtttgttggcgttctctcagggttcgaaccaatacaagagccttgcaggaggaaggagaagaaactctgtgtttgatgtcgttgcaggttaactacatgcttttctttcttttttcttggagacagtctcaccgtcacccaggctggagtgcagtggtgcgatgtcgactcactgcaacctccacctcccgggttcaagtgattctcctgcctcagtctccccagtagctgggactacaggcgcgtgccaccacgcccggctaatttttgtgttattagtagaggcagggtttcaccatattggccaggctcctgaccttgtgatcgagctcctgaccttgtgatcgagctcctgaccttgtgatcgaactcctgaccttgtgatctgcccgactcagcctcccaaagtgctgggattacaggtgcgagccaccgcgcccggcctgtgtgtatgtgtgtgtgtgtgtgtgtgtgtgtgacagtctcactccgtcgccgagactggagtgcagtggcacgaacacagctcactgcagccttgacctgctgtattcaagcgatcctcctgcctcagcttcctgaatagccaggaagacaggtgcgtgccaccatggctggctaatttctattttttgtagagatggggtctttctttgttgcccaggttggtctcaaaaccctgggtgcaagtgatcctcctgccttggcctcccaaagtgttgtgtttacaggcacttgaacccagaaaatctgagacaggtctcagttaatttagaaagtttattttgccaaggttgagaatgcgcccgtgacacagcctcaggaagtcctgacaacatttcccctaagtagctggggcacagcctggttttatacattttagggaggtatgagacctctgtcaggcttctgagcccaagcctgcacttatacatccagatggcctgaggcaactgaagaaccacaaaaagaagtgaaaatagccagttcctacctttactgatgacattaccttgtgacattccttctcctggacaatatgtctccagctctccccaccaagcaccttgtgacccctgcccccacctgcaagagaataaccccctttaactgtcattttccactacctacctaaatcctataaaactgcccccacccctatctccctttgctgactcctttttccgactcactccgcctgcacccaggcgattaaaaagctttattgctcacacaaagcctgtttggtggtctcttcacacagacaccgtgacaacatcaatcattatatgtaagaagtaattggtttagtctggaaagggggtgacaacttgaagcaaaggcaggaagactcgaagtgtggggggaacttccaggtcacaaataggtgagacacaaatggttgcattcttttgagtttctgatgagcttttcgaaggaaggccatcagatacgcatctatcttagtgaggggagggataacttggaatagaatgggaggcaggtttgccctgagcagtttccagctggagtttcccttagtgattttggaggcccaagatattttcctttcacatttcaccctttttcttttttaaaatcttttggagaaatgattttacaaaaaaacaaacaaacaaacaaaaaacaaaacagactctctggtttcagatttcatctgatctttcattgctaggatggtttactcctagatgggt

SEQ ID NO: 1884243 - DNA, 4001 bp, Homo sapiens; identical to SEQ ID NO: 914105

SEQ ID NO: 1884244 - DNA, 4001 bp, Homo sapiens
aattctgtcagcccagcaatcaaagcacatttttgagagggaatgttctgacttccgtatcagtcgtgatatttccgaataattctatacttgtcataatgaaacacaagcacgcttttggtattggcccttcaaaacattaagaaactggtggtaccaacataccatttttgacattgttgtattttaacattttttctgcttttgaaaggaatacacgctcatcattaaaatattttgaataataaaatgcacaaagaacaaaaacattgtctagaatcttgccactcagagacaatcatgtcataatattctcatgtatttcctttcagatttttaaaattgtgggcatttgtaattttataaggtttgtaacttccttctgaaaacttgtgtattcagatgtctatgtaaatatgaatctgtattatgcaccttaaatggctgtgtagttttcacatcttatgtactatgatttaactgaccagtgtaaattacagtgatcagttacacttatttagtgcttactctatgccaggcactgtaataagcgttttgcttgtactaattcatttgatcctcacaaccctattattcctgtttcttacacatgaggaaactgagacaccaagaggtgaagcaatttgtccaatcactcaatgtgggacatttaatggctggcaatgctttgatcctttagacaatgttgccatgtatacctttgttcatgttttaaaagaatgtctttaggattaatttgccgaaatggaattgctgggtcctaaggttttaaaaatttttttacatgcttccaaatatttcccttaggaagattatacagtatttacacttcatccaacagtatgtgagtgtctgactcctcacatccctgattctttgcaatttttttctttttttgagacggagtttcgctcccgggttcaaacgattcccagcctcagcctcccgaatagctgggattacaagcgcgcaccaccacgcccggctaattttttgtacttttagtagagacggggtttcaccatggccaggctggtcttgaactcctgacctcaggtgatctgccggcctcggcctcccagagtgctgggattacaggcgtgagccaccgcgcccggccgattctttgtaatttttacctaaatgacaaaacattatctaactgctactttaatttgcacatttcacttttagaggtgggacttcatttttaatgaatttttaagcactctttgattactatgtattaatcctgtgttgacatgtcaatattagtttccacgctacatttggagatgccgtaatttgcgggataatttccatttacgtacaagatgtgcttactaagtttgttccaagtgggacgcaacatctctagtagatgctccttaaaacttctccatcacacagagaataatttttattggttaactaaacttataagtaaaataaataaaccaacattttgggttgctaggaatcactcactgatcaacttttagctccagtttttttctgttttcttttttttgctcagtctagggaggctatcttgggctgtgaaagacatgtcaccaaccatcacagctgctgagtgattgcacggttagtcagtaggtgccaacgccctgctagaagagctgtctgcagattccaaagccgggcgttcagggactcccgggaaggagccagcgttacctcagcctctccgagggacacgcgcgccctgaacactcccctcttgggattcaggccaattcgttcagctcccatgacttcatccgagcaagtttgtcacctcacgcagctaattaaactgtttacctagaagatgatccaaaggaatttccatttccttccagagggaatacaaggttatgataaccgagagagcgagaggaaaaaaggcgcacagctcgacccgaactcaacctgctttctttctcctggctctcccagtcactcctggggttgttagtaggcttcagcacgcctgaaggaccccgtcctacggagactcctagccaagggaaaagcagaaaacacaagaactaattccactcttatgtgtgactaattaaaagaggagtcaggcagaggggactccctgttcagcctttaccgatggggcaggctcggggcagctttgagacaggcagcgccaaggtcgcccagattcccgacaagctccgcgcgggggcttcctcggctccttgctgttgccgccgccgcagctgctgccgcggttggtggggttgggtgagaggaggagctgtcgcggaccctgtagagtcggtctctgttgctctttttgcctgaggagtcttccatcctacgtcgagctctgactcccgtgctgtcgagagggagtccccggggacacctcggcacgcagcggagatgcctctttttgccaccaatcccttcgatcaggatgttggtaagtgtttttgcctctccctgcccattcctcaccggactgcacgctcactctgccagcccctgcctgcattcaggaccctcgggccagggccaaggaagagctcgctcttcccctttcctgaggctccctccttcagagctgggaggaggttgagggcttggcgcatcctctttgaaagaaatgggactcatcctgtgaaatgggccttgagctaggactgtaggttgccaaagaactgctgaatgggttggtgtaaagggcctgggaggagcagctggtgtagcatctggtgcagggactgtgcttctggaagaacagcgaagggcttaaggcgtatgttggctagattaggattgtaaaccctgtaccaaaagtgcttgcctagacaaataaatgttgagcgtctggaactggcagaatgttttaggtaaggttccttagaggattttaaaatcttttgtaacggtaactgaaggagggagctctggttaagggtagactctcaaacatgttaggagcgatgaagatgaaatacttggcaacgactgaaaccgaattgaggacctgagcctttgggatgtctctcttaggctaggtctctgcactttaaaaggtgtaaagaagtgtggaagaagttgttgaatctggaaagagtttgaaatgctacatttttgttgttttctgaatcactggtattaggtactgatgatgtcaattcaataggtttgcttttggtttttaattttattttattttatttttttctgacttgaagataataattatgggaatttgagtttccggggagagaattttggtttaatttgaacgcacgtaggaactaccttggcacacaagtgtggaatgaaagcaagccaaataccatttccaaatcccttatggcagaatgtaatcattactgtgaataaggacaaccttatgaatttacttgtctttgtgtattttaattatgaaaggtggatgttgaatttttctttttaaactcttccttagagcatgtcactgaaacttggaagtttatataagagtagaaaaaagttcactccttacctctgccacttctcagctcacggtgaaatcataggcaagttaaattctttgagttccagtgttcttgtctttaaagaggggaaaacacatcattccattctgcagttaaataatatgtctagagggcctgctacagtacctttatgtggttggcacttactagatgctaccttttttgttccaccttaaatgagtgtcctgaatcttagcagtggacagaaccttggagatcaccgattatacttaatgaattggaaaattgcatttaatttaataagcagttagcacacactacaggacacagcagctcagtgacataagagatacagtgatgagcaaggcctagttgctgttctcaagcagttttacatctcactacatgaatctctaggggaaatacttaaaacagcttcttaatacttgcttcttctgtttacagcacctttgtctagttttcttggtcctg

SEQ ID NO: 1884245 - DNA, 4001 bp, Homo sapiens; identical to SEQ ID NO: 914111

SEQ ID NO: 1884246 - DNA, 4001 bp, Homo sapiens
catatgcctgaacttacatgagaaccaacatgtcaaggaaaaaaaagagaaatgaaaaagaaagatcacaagattataaaattcctattaaggcaatttttattatattaactttttaaccctcaaatatgtacatgcaataacagatgatcaggtaaataattttattcatcccttttatacacacacacaaatcatactggtttgcttacccatagtgtttcattattctattccttggtatgtgcaaacccctctgactacagtagacatagagtacattaagtgaggaatactggaaaaatgtattgtcaaactttaaaaatacaaaaaaaattcagaatatattacatagtaagctttaaaatcctgaagtagctaaaaaagtaggactttgtaatcttatttatttatttattatactttaagttctgggatacatgtgcagaatgtgcaggtttgtaattttaaaagttacctgaggaaagctttcattctactttgtataaggatacttccatttataaaattttacatgaataacaagttatttgaaagatatgtatcagccaaccgcggtggctcacgcctgtaatcccagcactttgggaggccgaggcgggtggatcacttgaggtcaggagtttgagaccagcctggccaacatggtgaaaccccgtctctactaaagtacaaaaattagccgggtgtggtgacacacacctgaaatccctgctactcaggaggctgaggcaggagaatcgcttgaacccgggaggcggagattgcactgagctgagatctcgccactgcactccagcctcggcaacagagcgagactccgtcacaaaaaaaaaaaaaaaaaaaaaaaaaaaatatgtgtatcagaaggtatagctaaaatatgaaactgattacagcccctggagtgtaaatgtggtttaaggattaggacggccttgaacataacctactcataatcagatggcaagaatgacttcacctgaactctgttccaagacctcgatgaaatcacaaccctctagcaacatccacctagatccatgtcttaccttatactcaactccattgtcaatattattttccccaagaagaaaaataaaaaatgaaaagacacaacactaatcttttgtctccacaggatgtggcaaaatgagaaataacaattacacgttattttcaaaggtggtccgactgcttcagccgtggaccacttacactaaagagaaaatttccagcacttcacaagatccagctgttctttcacagacgactaataaaaaagtaaaagaagcgacattaagctgcgcccaaacaggccaggaatgggtcctaaggcatcacgaaacttcccgaggacattatgtatttagagaaggccccacagaaaccctcaagcgggaaagttacgtcttctgggtctcggggtggcaggcagcctgaaccccgaggggctcgaggcgaggcgcccccggccggattcgggcccaaaccagcccgccacgccctgagctccgcgcagcaaaccggccggccgagcggcggccctcggaatggtgttttctcggcgccacaggagggagagcgacccagagaacttgggcgtggcagaggccgggaacaggcaggcgcgggtggggagaggaaagcaaacgtcgcgggagagcgcggcccagaggccgaggagggcgcgggcggagccggcccgagcccggccgccatcgtggacacttgcagcggttgacagttcccaccgcggcccaagagacagcggctacggaggcagaaagagcccagccaccctcatcacagcccgcacgcccgcctcacctggacttgcccaccccactctcaccgatgatgaggctcttcagggtgcaacacgtcctcgtccatcctaaccccgctgcactccgagcccagctggccgcccgggtgcgcctctcagctattcagcagcgggagctgccgcgcatgtgcgcgctccaaggccgcgcactcccagaattcccccgcgtctttccggagggcgagttccttatgtgtctttgctgacacggtgggctctgaatccgccccgacctcaacccagctctctttctgtcttgtcagtgggagaggactgagtcaggagaatatcaagctgttttatttcagcaaatgctcataacagctgtattgctgtgcgaaaagcgctgtgctttaatcctgttaccttaaatttaggtcgaactctaccttgtcacactgctcagccttctgagcctttctccatctcagacagagacacgaaggcttcttagaacaactgcttcttattgttatgaaggttaaatgagttactttgggaaggcagattgttaaccacagtgctctataaaaggtgtgatcaggtattaacttgctggcttcccctctgttagagtggggagcaccctttacatgttaattcatcttgaaagggaggtgtagacttcaggtaggtcaggtgcatataaacttcttgtggtgcaacctcagaccaactcttcctcctcgtaagaactgctgcactccaactgcaggaggtgtatgtctacaccttgcctcttgcattaagttgtaaatattagtgaaggtaccaaacctcattcattaaacttagcacagtgcctggtacatggcaggcactcaatgaacacccgtaatcttgtcttatctccttatacctgcagttaatgtcatatacaatagatatttgattaaagaatacatacacataaagcttagctgggtgctgtggctcatgcctgtaatcccagcacttttggaggcctaagcaggtggattatttgagctcagaagttcgagaccagcctggctaacatgtgaaaccccgtctctattaaaaatacaaaaattagctgggtgtggtggcgcacacctgtaatcctagctactcaagaggtggaggcaggagaattgctggaatcttaagaggtggaagttgcagtgagcagagattgtaccactgcactccagcctgggcgacagagtgagagataccgtgtctcaaaaacaaaaaataaaacgtagaataagttaggaaattatttgttaaatatctggaaaagctcttttaccagatatccaaatggcttctttgcctacttcagatctttgctcaaatgttgccttcttaaggaggccttccctgcacatcctactgaaaatatgcagattcctccagcatctccgaggaatccaaaagcctggcatactggcaaaaggtaagaatttcttaccagacttctggcctctctctttctctgtgcaaattagttgaatgaatagtaaaaatcactgtttatctcctctgtaaagttttagttaatgagatgaaggattcgtgaggctaatcttaagctgtagagaatctagtgtgctttgtgtgtctttctgtgttctataatggataagggtaacttaggatagaacacaggcttaggatacctgtaagcctgctttttaagatggcccagcaagctggtcagttacaaactttgctgcaggtctctaaaaaaaaactggatgagttttccctcttgtcttgtatgtccttgggagcttgatcttgtaaccatgctgccatgctttttcttttcacaatgcagcccaggttcagggtacaattcctggcttggaaaatgagtccttttatcttctgtctgtctatgtatttaaatgtattatgtgagttatgtttacatatgaaagagctttaattagtcaatattttcacacatagaattatgttcacaaagttaatttttacaaaccttccataacttgtttaaacctttagctttattttatttaattttaaacaatcctttaaccctctaaactaggcaaaaatttacattcccatgccttcttataaactctttccaaaaacacatttccttctcctcacacaccttgcatgtaagcctattttt

SEQ ID NO: 1884247 - DNA, 4001 bp, Homo sapiens
atacatttgtttctggggagtgaagtagagagactgataaatcccacttaacagaccttattctaaaaagggactctcagctgggtgccatggctcatgcctgtaatcccagcaccctgagaggccaaggctggaggatggcgtgagcccatgagttccagactagcttgggcaacatagggaaatcccatctacaaaaaaaattttaaaagtagagcagggtatggtggcttatgcctatgataccagcattttgcgaagatccattgagggcaggaagatccactgagctcaagagttcaagaacagcctaggcaacacagcaacaccttgtctctataaaaaaccctagccaggcatggtgattcgtccctgtagtcccagctactcaggaggctgaggtgggaggatcgattgagccaggcaagtcaaggctgcagtgaaccgtgatcacaccactgcactccagcaggtgacagaacaagaccctgtctcaaaaaaaaaaaagcagtggtgcggggacgggggacggggaacgaatctcatttatatactccagttaacgttccagaaaattttaaccaccctaacttgtcacccatgcaataaatttacataaagtgctaaccaatttcaacccaatttcatgtattgggttgaactacaagaaatgacaaccaaccattcgtgacttcaaaaatgccaatttcatatgcctgaacttacatgagaaccaacatgtcaaggaaaaaaaagagaaatgaaaaagaaagatcacaagattataaaattcctattaaggcaatttttattatattaactttttaaccctcaaatatgtacatgcaataacagatgatcaggtaaataattttattcatcccttttatacacacacacaaatcatactggtttgcttacccatagtgtttcattattctattccttggtatgtgcaaacccctctgactacagtagacatagagtacattaagtgaggaatactggaaaaatgtattgtcaaactttaaaaatacaaaaaaaattcagaatatattacatagtaagctttaaaatcctgaagtagctaaaaaagtaggactttgtaatcttatttatttatttattatactttaagttctgggatacatgtgcagaatgtgcaggtttgtaattttaaaagttacctgaggaaagctttcattctactttgtataaggatacttccatttataaaattttacatgaataacaagttatttgaaagatatgtatcagccaaccgcggtggctcacgcctgtaatcccagcactttgggaggccgaggcgggtggatcacttgaggtcaggagtttgagaccagcctggccaacatggtgaaaccccgtctctactaaagtacaaaaattagccgggtgtggtgacacacacctgaaatccctgctactcaggaggctgaggcaggagaatcgcttgaacccgggaggcggagattgcactgagctgagatctcgccactgcactccagcctcggcaacagagcgagactccgtcacaaaaaaaaaaaaaaaaaaaaaaaaaaaatatgtgtatcagaaggtatagctaaaatatgaaactgattacagcccctggagtgtaaatgtggtttaaggattaggacggccttgaacataacctactcataatcagatggcaagaatgacttcacctgaactctgttccaagacctcgatgaaatcacaaccctctagcaacatccacctagatccatgtcttaccttatactcaactccattgtcaatattattttccccaagaagaaaaataaaaaatgaaaagacacaacactaatcttttgtctccacaggatgtggcaaaatgagaaataacaattacacgttattttcaaaggtggtccgactgcttcagccgtggaccacttacactaaagagaaaatttccagcacttcacaagatccagctgttctttcacagacgactaataaaaaagtaaaagaagcgacattaagctgcgcccaaacaggccaggaatgggtcctaaggcatcacgaaacttcccgaggacattatgtatttagagaaggccccacagaaaccctcaagcgggaaagttacgtcttctgggtctcggggtggcaggcagcctgaaccccgaggggctcgaggcgaggcgcccccggccggattcgggcccaaaccagcccgccacgccctgagctccgcgcagcaaaccggccggccgagcggcggccctcggaatggtgttttctcggcgccacaggagggagagcgacccagagaacttgggcgtggcagaggccgggaacaggcaggcgcgggtggggagaggaaagcaaacgtcgcgggagagcgcggcccagaggccgaggagggcgcgggcggagccggcccgagcccggccgccatcgtggacacttgcagcggttgacagttcccaccgcggcccaagagacagcggctacggaggcagaaagagcccagccaccctcatcacagcccgcacgcccgcctcacctggacttgcccaccccactctcaccgatgatgaggctcttcagggtgcaacacgtcctcgtccatcctaaccccgctgcactccgagcccagctggccgcccgggtgcgcctctcagctattcagcagcgggagctgccgcgcatgtgcgcgctccaaggccgcgcactcccagaattcccccgcgtctttccggagggcgagttccttatgtgtctttgctgacacggtgggctctgaatccgccccgacctcaacccagctctctttctgtcttgtcagtgggagaggactgagtcaggagaatatcaagctgttttatttcagcaaatgctcataacagctgtattgctgtgcgaaaagcgctgtgctttaatcctgttaccttaaatttaggtcgaactctaccttgtcacactgctcagccttctgagcctttctccatctcagacagagacacgaaggcttcttagaacaactgcttcttattgttatgaaggttaaatgagttactttgggaaggcagattgttaaccacagtgctctataaaaggtgtgatcaggtattaacttgctggcttcccctctgttagagtggggagcaccctttacatgttaattcatcttgaaagggaggtgtagacttcaggtaggtcaggtgcatataaacttcttgtggtgcaacctcagaccaactcttcctcctcgtaagaactgctgcactccaactgcaggaggtgtatgtctacaccttgcctcttgcattaagttgtaaatattagtgaaggtaccaaacctcattcattaaacttagcacagtgcctggtacatggcaggcactcaatgaacacccgtaatcttgtcttatctccttatacctgcagttaatgtcatatacaatagatatttgattaaagaatacatacacataaagcttagctgggtgctgtggctcatgcctgtaatcccagcacttttggaggcctaagcaggtggattatttgagctcagaagttcgagaccagcctggctaacatgtgaaaccccgtctctattaaaaatacaaaaattagctgggtgtggtggcgcacacctgtaatcctagctactcaagaggtggaggcaggagaattgctggaatcttaagaggtggaagttgcagtgagcagagattgtaccactgcactccagcctgggcgacagagtgagagataccgtgtctcaaaaacaaaaaataaaacgtagaataagttaggaaattatttgttaaatatctggaaaagctcttttaccagatatccaaatggcttctttgcctacttcagatctttgctcaaatgttgccttcttaaggaggccttccctgcacatcctactgaaaatatgcagattcctccagcatctccgaggaatccaaaagcctggcatactggcaaaaggt

SEQ ID NO: 1884248 - DNA, 4001 bp, Homo sapiens
aacaacaacaacaacaacaacaaaatctaggattagaaattccagtgatttgagctgttttactataagagatcaaatgacttgcttttgaataagattaaatgaagaatgattgtgtgttcaggatctacagatctgaaaatggccaaattaccatactcagaaatatccatctcttctaacttccagaaagaaaactcaacaaaacaggataattcgtaaccaggcacggtggctcgggcctgtaatcccagcacgtcgggagatcaaggtgggaggattgtttgaggccagagagtttgagatgagcctgggcaacatgatgagaccccagtctttaaaaaaaaaaataaaacaaaagccaaaccccaggacaatctgaattaaccagttgaacaggtgatacacactttgagaatttccatgaaaaatatttaaagtctaggtaagcgtgcacacgtatgtgcaaacttactcctttttacttcatgagggccttctgagcaccattattggccttcacaaggcagaaaaccaagcaatgagtaaagcatcggaagaagccattcccaaacacagaagcagggtgggggttcaaatactctctcttttctacttttatccgctttgactccatgaaggcaacgtttaatctctgctcagtgtattcctgaaggagatcttctcttgccgccagcattttcagggggtttttggaggcctgaacctggcgcttgggcctaactgcccacttgtgctcggccacggaagacgtcaatctgcggatggaagcagagccgcggtcccggtctgtgacaccaccacccctggatgacctgggggtcttggactccacaaagtatttcctgattttgttacaaatcttgcaactcctcctcccaccgccactcccctcacatggagtcatagattcttggagatggaagagggatgcaagcccactgagttcaaatctcagccacgcccagacgcccccactcactcctgccccttggtctcctcctgggagggtgtggagtacttccgggcagctcacggctctgctagacagctctagggtttagggagctcttccctctccttaccgcgcccatgcacacgtcctaattctcactttggaatcatacacccatgtctacttctctgtctctggcaagcccttcgggaatttgcagaccatggctccttgatgtaatccttttcacttagactaaactttctccctatgcaatagctttcggtccccttactgaccctccatgactagcttccactcaactcactgccccctctgaaaaataaccactttttggaagaatatattgaaataaaataggcccgcaatcatctgtgaccaccccacattctcacaactctttggggtggaaaatcagactagggtcggtgagcagaccgagcgaagcgatctcccaatagactcctgctgccactctccacctccagctgcacggccttctgttcccaaaaggcctctttacgtaccatggtgtcatatgtgtgtgtcaatatacatatatgtttaaatgatgatatacaactctttaaacagtgacattgggtgggcggaagattgcgaagtggttaaatagctatgtatgcaaatacccaaaatactattttgaggtggaaaatggcaaagggttcattttttaagataggaaatgaaaatatgcaaattgaaacaaattgaacaaactgaaacatgcaaaaaatatctcaagagcagtttacagaaaaacatatgataagggaagagactgtcactctgacaatttcgcagttaagaccagatggatgtggtggattgccgtggatggagcctgtctagcgtgtctccctctgcttctggtaatagcatctggattttccttcggggaaaccacctccctgcgtccccaccgtggctctagaggagacccagacacccgcctttacccagtcagcatcttctatcccattggccacagtgactggtttggggatggacacgggctcaatttgaagccaagaaaatcaaacctggaacttctgctgggactactgggaagagaagctacccgtgctgggctggccagggaggcagccttgtgactccagaggtggggtgtccatctgccgccaggccactgcctaacggagagtgaggccaaggaaaacagccaagacagactgtgttctgaggggcttttagaacccgaggccacttccgtacttttcagcgagtgagctagtaaaccccgcctcacttttcagcgaatgagccggaaacctgccccccagcactttccagcgaatgagcccggaaacctgcccccgcactgttcggcaagtgagccagtaaacccctctcatttttctttttggctgaagtcggtttgaactgggatggttttctggcacttgaaattgacgggatcctaataccattatcgcttttcctagttggtttagtcatgatcccgtgggaagagaaacccttagtcatcactgagaaaacccgcagatctattgattttgtaaatgattggaagctaagtaacatgccttactgattttctagtgagctgtactaatttgagcccatctcatccaaatattttgcaaagttatgagtaagaaatatgtcaaatgaaagacaggtgttgaactctctgctaagtgatataaacataaaaactgcaaaacggtattcaaattatgtgaaaaattcattgactctttatggcacaggacaagcatctgtggcccacgcggtctgcctgcatgcacatctggtctgccgtctgcatgttttatctgctgcgaggctccgtgcccctggctcctgcaacacggtgccctggctctagaatactaacgcggctgtgatggagttagaaagagaaggaggccacactgggggaagagcctcatggatgtgccctctgcaggcgaaggaagcccttctcagtggaggaaagacggagacccaaataactcacttgggtgcataaggatcgaaaatgacatcgaagtcctcgtccagctccacaggacttctcagcatattacaatccacgttgcggtaaaattgggcaaaggtttcgtcatcatccggcttcatcagctccttcacagatttgccggtgacagtgagcaccgtttcgtgcatcccgccaactatcaacaaacaagcaaatgacgtaagagttttataaaaacaaggactccaattatgcttcaccaatagtttaaaaattctatttcctcctaagttccaggagtggaagaaatacggttgtgatatacaaggtcctgcggttgcttcccacctgaacaaatctgcagtaaaacgggagagagggaggctgaccttactgcacacaggagcccactgaacgcttctgaacctgcacttgcttctgttgagggtagatgaaccagcctcagcctcattctacatgaagggctggcaaacttcttcggaaaagggccagccagtaaacattttaggctttgcatggggaggggtgacatggggcccgtgttacaacaactccgttctgctgttgtaatgcaaaagctattgacaatagttcacaaataggcatggatgtgtttcagtaaaactttatttacaaaaacagagctgggcatggtggctcacgcttataatctcaccactttgggaggctgaggctggaggatcgcttgagcccaggaattcaagaccagcctaagcaacatagtgggaccccatctctccaaaaacagaaaaagaaaaaaaattagccaggcttaggggtgaacacccatagttggagctactcaggaggctgaggtgggaggattgcttgagcccaggagttcaaggctgcagtgagctatgatggcaccactgcagtctagcctgggtgacagagcaagacactgtctctaaaaaacaaacaacaacaaaaaaccaaagcaggtgggcagct

SEQ ID NO: 1884249 - DNA, 4001 bp, Homo sapiens
ttttttttttttttttttgagacagaccctcgctgtgtcacccaggctgtggtgcaatggcacgatcttggttcactgtaacctttgcctccggggttcaagcaattctccctgcttcaacctctcaagtagctgggataacaggcacccactaccatgcacagctaatttttgtatttttagtagagatggggtttcaccatgttgaccgggctggtcttgaactcctgacctcaggtgatccacccacctcgacctcccaaagtacttggattacaggcgtgagacaccatgcccagccagaatcagttttttctttctttttttttttttttgagatggagtcgctctgttgcccaggctggagtgcaatgatgcaatctcggctcactgcaagctccgcctcctgggtacatgccaagtagctgggactacaggtgcccaccaccacacccggctaatttttgtatttttagtagagaagtagagacggggtttcaccatgttagccaggatggtctggatctcctgatcttgtgatccacccgccttggcctcccaaagtgctgggattacaggcatgagccaccgcgcctggcctgcatcggtttttaaatggacattaattgatgctttctatgaaggcataggccccctttgtttgacctgtgatttggttgatcaagaattaggtgacctaagttagtgctagttacacaatcctcataaaacttctctagctattctaaggacaggtactttctgaatagggaaaaaatagcatgaattatcttcatcacaagtgctaatgtagacaaggaaatgtgtgtcctgttgcctgcaacttgtgattttccattgttaaagcagtcatgagaatgctgggttctagccatggcttagctgtgtccacccaccaggtggccttgggacagaggcggaggaggcaagggctctggaaaggtgctggagccccttctctgccttggttcacagcctggccctggcccatcttctcctggccatggggtaagtattggaccttcctgtgctcccgagccctcctccaaatgggaggatgaccacacacacctcagaaagtgacgaggaggatggcgtgaggagttgcagggagggaccccgacggtgcctggcaggcaggaggagctccgaaagtggtagctgtcattactgctattgagaccatcattactgttaaagacatctggccagcattctctattgataaactagcagcaataagccacatactccccttcccatgaatacatcatgaagacaacggaaaaaatattcggaatgcattgagccatttaaaaaagatgacatacacacatacacgcacacagaaggaaaacgagtggtagaaattagaagggagttaaacggactctttttaaaatgagagttaattgcctgctattttttaaaataaattttattgtatatatttaaactatacaacataatgttatagggcacatagagataagatgcttactataatgtagcaaattattttaaaatttacactgggatatattgctttgataattataaagctatttttttcattttaaaagtagctaagttttcaacatttcaaaaactttttccagatcttctgtatacttttctgtaggcatcctagtgaaacatgtacaattcaaatgaccacatgctggagagccaggcgcgtccccatgcaggcgacgtgggcctcttagaagcagcctcctgaggctgtgtagcctcctgcagccatacagtcccgtcctggtcgcccgtctcagcctcggtcctgagcagcctgtgggaatggtggcgacgggacagtccagaacactcctggacagcccctagccccagccctgcccgcctctcgggagagcagctaccggggactgggtcctagccaggtggggttggccgcccggtggggttgacgcccggtggggttggccgtccggtggggttggccgcccggtggggttgacacccggtggggttggccgcccggtggggttagccgcccagtgttccttcctgagagctgcagcagccgcctccttcatggcaggctggcccgagtcccacttagcagagggagagcagagatccagggcctgtgaatcagctgaccttcgtgagttcacaccacagctcatcagcatcagcagaaagccggttgctgccccttggcatggctaaggggccacggaagcgggaggctccctttcttttcagggactcttcttttcagagaggcccagaatagggcctgtctagcagctgcccctgtccagcccctaactgagaatgtgtagatgcctgtctagccaggggagcgtggaacaagcccaggcaagtctgaccgtttgactcatcccccgcaggtcggggtggagtgtggcttagccaaggtacaccaaggtggttacatcagtaaaggaaggaagggggaaggagggagagaaggaagaaaggaaccgggagaaaaggagggagggagagaaggaaggaggaagggaaggcaggggagagggcaggaaggagggagggaggaagagggaagccagagagaagcgcttttcttgcgagagatgtgtaaacaagcacccccacagacggagagcaggaaaacggcagcgccttggggaaggaatgagacgaattgttcaatgacagaaatgagcatgagtctgctaattatttgtcttgtcttctaacagccatgtcggcataatcttgttgtttgtatatttcagaagctattaagttataataatttaacacaataattccgtgtctgcaaggaagtgtaaaattctctgtaaggagaagtgggagggaataagaagaatcccccggacaaagaatgtccacattttccgtgcaccccagagcacactgcccaggccaggccctgcccgactgtcgctggacaagcgagtgcatctgcataggccagcggctccaggccttggtccctctacctctgtccctgtccctggcttcaagttcaaggctaagagaacaggaagttgcggggcccggtgcctgcgaaggtcagttggtcacagcagaggcgcatcctgttttgccctctaagctgccgtagccttgagaacagccttgctgctctaggctgggtcgctcgcattttcttacggggcaccacctggcctggcagctctgattcgctccatcagtgtttggggctcactacttgccaggcactgggctggacattcagggcatttattggagaacgaagcagataatgtctccctcattcgaatgtgggagtccagttccgcaagtgaggtttaacaagatcaccactgtgaagagggctgtgatggagtcacagttctctgagcctctagatagggcgagtttcccaaagaagaccccctggcctggtttctcatgacgagcagctctaactgggggaagaaacaagggaagggtgtaccaggcagagggaacagtgtaagaaagaccgtggcaggcagagcctggtggcagcaagggaggggcggaggagacctggccagcaaagctgtgatcggggcggctgggggagtgacagctgcatgagacggctgaggaggctggtgggggccgctcatttccggagaccactcagaggagagacaagggggtcctgcaagtgagggtgggtcagggccctgcaggacccgggtgaggagcaggcacggctggtcagagccgctcacccaccgggtgccctgccacccacggccaggcctggtggaagggctggatgcttgctcaggcggtgccgctgcaggatctctggggaggccagagttgctctctggaaggtgtctcaggaaactctttctttttcaggaccacgtttaaggagtttgcagagaaatacggccgggatcagaggttccgacttgttcaaaaaagaaaggaccaggagcattttttcaaccaattcatac

SEQ ID NO: 1884250 - DNA, 4001 bp, Homo sapiens
agcatctcaaaaggagtaccttcatcagtaatcccaaagggtaacttccccgatggatgtgaagtttactcaacgtcgtgcaaacagaaactgtccggtgtagacactgtgagtcctctacagaaaaacacacagctttttacacatgcagggcccatcccatgcagcaagagcacgtctgaactgtgcattgtcctgactgtccttcaggcagagccatccaggagttaggggagcaggaaggacccagagggactcaagaactgggaacactggtgtggctggcccagggaggaggtgggcaggccccggctccatgaaagatgggtgtgccatggctccttcacagttaccacgtggaggtactcacgtgttcatccaagactcagggactgtctcagcattatggctctgaaagataggtccaggctggggctggagctacagagagcaggagttgctcatgttgaaggctgtgctgcagggctggctctgatgtagcagtggattaacaggttaaggcaggaaaattgaggcaccagtcagtccattcattcacccatccatttatccatctagccacccacaaaaatattctgagcatcataagccaggcaccatgtcaggcactggcggtacaacaccagattagacgggtagcccctgacctcaaggaacttgcatctggtcacgaacaaagatgaggaagtggcaagtgtgcaataggaaaatggagtctctagtgggctgccgcccattgaaggagttaggtgggaatggctctgagccaagtcctgttggggagtaggaggtaggggaggagatggcaaaggcagtgagaggtgggggaagcaggaaaggcaggcttggttgaggaaacagcatgttcaaaggcctagaggcaagacgtggaagaaaggggtttcaggctgtctggggcatagattgtgggcggaggagtcttgaaagatgagggaatgggttggggaggtggggaggccccatgtttaaagatttataagctaggtttaagaggattttgttttgttttgtttttgtttttttacacaagatctcactcagttgcccaggctggagtgcggtggtgccatcagagcttactgcagcctcaaacttctgagctcaaccaatcctcccacatagttaggactacaagcatgcaccaccttgcctggctaatttttttaaaaagttttgagatgagatctcactgtgttgcccagggtggtcttgaacttctgagctcaagcaatcctcttgcctccacctcccaaagcgctgggatttcaggcgggaaccacagtgcttggcctgagtgtggtctttctggtgagagcagtggagtgacatgaaaggtttttcagcagagaattgtcaggtctgggtttaagaacaaccctggctgctacatacaaaacgaaatggaggaggggagactgcagggtgggagaagcttgcctgtccccgctccttcctttcagcccaccatcaccttcgcccctatccaattctagagccgagttctccgtgtgggagaagtcctccctacagagaagcagaggtcataacggtgctgttccctgttctgtgtccccagctgggcactacgcctggcactaggaggtgggcaataaacatccgttccccgatgaacggccacccgaatcaatctgtaggaatccatgttctgccttaaatctcagcattgtccatttctagctatggggccttggtctcgctaccaagtccttccatgtctccgtttcctcacctgtacaatggtgggaattattttacttacctcatacttttgttgggaggattgaattacataaaacacatgaggcccatgcccggcacctgataaatgttaatattcttgggctgtggaggttcccttgccaggtgacggaagtggaaaccccctcctctcagtcagggccagcacagccagggttgggaaggtgtgggaggtggaataatggccccttgaagatgtcacaacctagtccctagagcctgtgaatatgctatgacacaggacaatgaaggttgcagttggaattacggttgccaaccattccctcagatggggagagtttcctggatcatccaggtgctcccaaagtcatcacaggggtccccgtgagtagaagacggaagcaggaaagagtcaccatcaggtgacatgggaatgactcaacctgccattgctggttttgaagatccagggaggggccactgccaaggaatgaagcagtttctagaagcctgaaaagccaagagcacagattcaccctcgaggccccagaaggaagcagtcctgccaacaccttgaccctcgctcagggagacccggtttggacttccaccctctggaactgtgagatgatacatttgtgttgttttaagccactaagtctgtgggaatctgttattgcagtgacaggaaatcaataagaagagaaggccccaaatccgtagatgtggggagccagggcaacacgccaaggctgaacgggggctgcagggcccaccttggggaaacttgggggagctactcctccctcacggcagccatggcattagggggagctgtcagtcactgggcttggagaacacagctgcacttctggaggtacgcatggggtccctgggtttactgaaccgaggttggggagagagggaggccctcttgggtggcacaagtggtccacatgggaggtaggtggtggtggtggccatactcccaacaacatcctgctacaacagggcatctggcaggagccatcagcagccaggagggcagcagaggggtcgggacaggtgctgagcagcccctcagcagccccagcccctgggggtctgcagggaagtacaatgctcggtgcccccctaacccccacttcctcccagctgctgagttaaaaaacaaagggtgaagagaaatgaaagtgttgctaaagttccaggagcgacagtggatgagcctggggtgaaatgtctgtctctgggtacaagaaggtcaactcctgacattggtggggcccagcacatgagtgcatgctaaaaacaaatgtgttaaatatggtaaaaatatgtttgtagtttgtacatgacagaaagttggcaaaatttcaaagaaaactaaatttaattattattgtgtatgtttaagcattttactgatggctcggtgatggattggtaataaaattgggatgcataactcataaattatatacttattccataaaatttatatttctcatttttatttcagtaaaatcactaattatcttgttataataaagatttccatataatttacatgtcacatggaataatgccaaattagacaacatttcttgagttatcatagttcttagttttttattaacttcaaattgaagcagtagctgctgaagtcatcaataaacttcttccagtaatacttagatgccaaaatagaccatgaattttacatatcatgtatgtaatatgataaattattgcagaaaatgttataaattattataattttgtcatatatacaataaccatgtatttagcaattttagccatctcttaaagcagtgtctagattgatttaatatttctcaatttcttctttcaaatttttcaatgctgggatattatgaagaaagctgaaaatgtcagtaaattgctcaattttttcatatccctactcaactaagactcttctctgatccacagtacccccaaaatattatctaaggaaaattcatttgggaattatttttatgtagctcttcttcccagtgacacaattatttttgtttccttgttctaatttctttacattttattggaatgtcacacattttacgtgtattttcttttgatttagaaaactcttcctttaagatttcaaaaaattcgttttaatatttaaaagatgaggtagccacacttaaattattttttcttttgaaagc

SEQ ID NO: 1884251 - DNA, 4001 bp, Homo sapiens; identical to SEQ ID NO: 914137

SEQ ID NO: 1884252 - DNA, 4001 bp, Homo sapiens; identical to SEQ ID NO: 914140

SEQ ID NO: 1884253 - DNA, 4001 bp, Homo sapiens; identical to SEQ ID NO: 914141

SEQ ID NO: 1884254 - DNA, 4001 bp, Homo sapiens; identical to SEQ ID NO: 914150

SEQ ID NO: 1884255 - DNA, 4001 bp, Homo sapiens
gtatagtaactttttttttttttttttgacggagtctcactctatagcccaagctgaagtgcagtgattggatctcggctcactgcaacctccgcctccggtgctcaagcaattctcgtgcctcagcctcccaagtagttgggactatagacacgcgccaccacccccagctaattttttgtattttagtagagacagggtttcaccatgttctccagggtggtctcgaactcctgagcgatccacccacctcggcctccaaaagtgccaggattataggcttgagccactgcgcttggccagtaacccatttttaaggcccaggtgaaatagtttttctatttctatgattttctatttctatgattaaatagtgtttaatcagacacttcagctgcatatacctcccacagctcattgatgatacaacagttcgcacagggcctggcacacatgctaaaggctcagcagtattgataatcacccacacttacaaagcactatgggccagacactgctgtgctttctttacagatatcaactcatttaacccaccctaaaaaccctgaggttcccaaaactggcatatcctcatgttacagatacagaaactaagacacagccgggctaagtaattaatctaagcttacacaaatagccgagacagagccaggacttaaatccaggcagcctgtttcacagtccctgctcataaccatggtgctgtatagttccaaacatcttaactaatgaggacagcattatttctcaaggtgcacagcacagagaacttcaaaaattagactcttagtaaaacaccatcttttttttttttttttgagacagggtcttgctgtgttgcccaggctggagtgcagtggcgtgatctgggcccactgcaacctgcacctctcaggttcaagagagtcttgtctcagcctctggagttgctgggactacaggcaggcaccaccgcgcccagcaaattttttgtatttttagtacagacggggtttcaccatgttgaccacgctggtctcaaactcctgacctcaagtgatctgcccgactcggcctcccaaattgctggaatttattccaacacctcattcattcattcattcattcgagacagagtctagctatgttacccgggctggtctcaaactcctgggctcaagggatctttctacctcagcctcccaacgtgctgagattacagggacacgccaccgcgccagcccgaacatctttatcttaaacccagaaaagtgacaggagtgtctcccctacaagatgatgaccagccctccagacctgagcccaggtgtgattccaaggcccctgtactggggccagacagggagactcgctctcagggacttcccaaccagcaccatcttctccctgcggggatggcgagggagcgcgggccggccccggccctgcctccgcgctcgcgctcgacggtgtcctgaagcgcgctcccggggaggtgttgcagccatggctacggcagccggcgcgacctactttcagcgaggcagtctgttctggttcacagtcatcaccctcagctttggctactacacagtaaggacagccgctggagcgctacggtctgacgaacgagcgagcgctcggttcaccccaggacctgggctcacaggccgcgggccgggggaagtcgtgcaagcacaatcccgactcccgcgcgctaggagcggaggggaggggaccagactccgcaatgagagcaagcatactggtccgccagggtcttgggcgggcgcccagggccctgagaaaccggctagccaggcttttcttatatgggggcggggacggctggggagctcccagccaactctgtgtctgggtttttcaagaggatggtgaagtcggaggccagcaatgcggctaccgcctatttccgtccagcaagacccttgccctctctggtcacagtcctggggctgggctacttcgcggtgaggcgtggggtggggcggggcgggcctctgttttggcccgccgggccctcgtagggcgaggggagctctgggaacggggcctgtgcgcacgcgcatctgacggttgtctcggttactcatgtaagcggaaattcggtgggctcttaggatagtttctgctttctagtgttcctgtctttgggtcctcacctctgcatggttactaacgggttatccgagcctaagcctctcacgaagcggaaagtcaagttaacagactgccataggcctgccaagtcagaatagggcttccgaagcagaatgtttgagccaataggaattgtttggaaaacggggataaatctaaaggatgggtaggatttaagtggtaagggaggataaagaggctataactgttctgacataggtgtggaagcaagaagaaagctgtacctagaaaaagagcgacgtttgtttggctgagaaataatctgtttaaaggataacgagaaagatgcgtggaaaagtaggttgggggctaaggtggtagttttgtgtttttttgagacggagtctcgctctgtcacccaggctggagtgcagtggggcgatctcggctcactgcaacctctgcttcccaggttcaagcgattctcatgtctttacctgtagctgggattacactatgcccagctatttttttgtgtttttagtagacatgggtattggtgaggctggcctcgaactcctaacgtcaagtgataaggtggtaaaattttgaaggaaggcgaagctatttgggtataccaatagatcctggagattggagatttgtcttgtccacagtgttgtttgttggtgtcaaatctgacaacctatgtcctgatttccccatatgtacaatggaggtgttgaactgaaaattttcaaaggtgcatttctgttctacgatttagtgtctgtgactagttagaatatagttggaggaaagctttggggacttcaaattgggatcttgtggagctggcagatgctcccctttccctttggtttgggaggatgcagtgatatttgtgcattatttaactttcagatgtgaaacaacatcgtgagagaggtagtactgctcttgacaaagatttgaatgggacaatacattttgaaactgttgagttattctcagaaaagtcttagctgacagaagttacaatacagaggctgaaagttaagattacgaaaaatttatgtgattaagcagttgctattaaaatgtcacaaccttatctcacttattttccatctctatgcagtggatcattctcagttttagccgtacaaaaagggaaagccgagaaaggaattctaaattaaacagaggtttggctggagccagtttctgcagtaaagaaactagccaaagcacataaactcaaaatttgctaatatcttttataaaataatggttttggtggaatgtattaataggagtcagccaggcatggtggttcacccctgtaatcccagcactttgggaggccgaggcgggcaaatcgcttgagcccaggagttcgagaccatcctgggcaacatggcaaaacctcatctctacacacacacacacacacaaaattagccatgggcagtggctcacacctgtaatcccagcactttgagaagccgagaagggcggatcacctgatgtcaggagttggagatcagcctggccaacatggtgaaactctgtctgtattaaaaatacaaaaattagctgggcgtggtggcatgcacctgtagtcccagctactctggaggctgagacaggagagtcgtttgaatccgcgaggcggaggttacagagagccgagatcgtgccactgcactccagcctaagcgacagagtgaaactccatctaaaataaataaataaataaataaattagtcagtcgtggtagccatgcctgtattccagctacttggggaagctgagttgggaggatcgcttgagcccgggaagtcaagggtgcagt

SEQ ID NO: 1884256 - DNA, 4001 bp, Homo sapiens
gtgggagaatgctgacccacaggagaaaacaaaaattctctcagctctcagtattggaaataacttctaagcttcttgtgagcagttagatatttctcaactaatggagacattaatcacataatttgcaatttttcaacttgattttaagaaaagtatgacatgattttaacttgactaaacctaaccaggaaagatattccctttgtacttttctttcaatgttactaatgtggtcaagggagcattcctgcttggtattatagtaatatgactaattaattctatatctccctttataacaaagaaagagggagtttgaggcagagagctttggaaggcactaattaatatctagagagatttcaataacatagttcatcatattttagctatttttgtaattactttccaactatagccaattatacaggctttccatttacaaatgatacaaagtttctttttaaaataaatttatttgagtaaaaatttgaggacatttaaagaaaaatattaagtcaatagtagtacaggtggtaggacaccaaacaagcaaacaaaaatcatgaaggtgttttgggaaaccccgacttcatttcttgtgttggacgctggaaagaggagagtttaattcatggtcattgatctcaagagcacaggtccttgaatttgagagtgcatgcattttaccttctaatggcattcctggttttatcattcctctcctcctccactttcccttcttccgtcttatcttgctacccctatatttttttcaagaaaaaaaaataaccaacaggggtggggtgcggtgggggatggcacaataaggaatcttcgagtagtaaaagtgagcagggctacccactggcccagggaggtgcgctaaactcgcagaaagcccagagggtctgactgcctctgatcctaggaagttttaattcaagctgggcagtaacggggtttctaaaattgcttggattctttggccctcctgcgtcccggcttcgggtcagcatgacagcgtgaaacgtgttagtgaattaaagtacttcggtggaaaagtaaggcggagctgccagagatgctctcctcctccgcctttctggctgtgctgcaccttgaccttcagtcctcctccctcctctttccgccccctcgtgatggggaagttcttgggaacctcacagaggcccgggggcggggataccggacagggatggagactggccccgagattgggagggggatgggcagcgctggagaataacgccctggagacagggcagcgcagccccagactccctggaaaacccagcagtctggaaaagctgggtttggactcacccctctttgaagagttctcaggaagtttgggggaggggcgagccgcgcaccagttctaccggcatcgggcgctgagggtgagaagggaccacaagcagcagcaggtctcagtgcttgtcatattcctgctcaccggtgggctccgggcacgcccggcagggtcctgggggcgcaggcaaggggacgtaggcagagtgctccggccagcatggagggactggtcttccttaacgccctggccactcggttgctgttcctgctgcactcgctggtcggggtctggcgagtgaccgaggtgaagaaggagccgcggtactggctgcttgcgctgctcaacctcttgctcttcctggagactgcgctcaccctcaagttcaagcgcggcagaggctacaaatggtgagagtgccccgggaaagcgagggcgcacggggccctagggtattgtcccccaccgcactcgcaggccatcttcccgcaacccgcagattctactcgaatttggaccccgtttttcctcgctgatcgcttggaaggcgcgagatgcttgcgcatctcttgggcaccccagggccaccctagggtcccagtgcaacactgggaaggctcgatctgtgagcctaggcaagagtcacccagtctcaggtttggaaacttggaagatgagtaaagagaggaagcgctggtctattttgctgaatgtgcccgcaaataggggagtcttgggacaaggaggttgccatgtagtgtgccttctgaaactggggtgtgtgagtgtgcgcgggttactctgcgtgcgtgcacatgtgggaatgtccttcgctgggcatcagcgaccttcgcaagagctgagcacactggccaccctcctaagacgagaagaccctcgctgcacgtctgtggtttcatccgcttcccttccctccagccgcgcgcgtcgcgcgttctctagcacagcgccagcttcaggtgtctgggtttgctggctttggggcttggctaacggcctgcctatcttgcaaggaacgggttgtaacgctggtgaagggaccagcaggtagtggttcagtcttaacgtctgtgtgcaataactacacgccacgtgtggtgcttatttcctccccgaaaggcttgaatggcaatcaaataattgagaaaaagattctcttgccattgacgaagagcctcccccaacccccagaggaatccatctggaagttcatccagaacttctccaagttaggcctctttctcttttaattctttaaataggatgtgttttcatatatatatatatatatatcaatacattaaaaatatctcatgctatgagaaaggagaaaatggtattaggcaatttacaattacatacacaatggcattatagtcattgtgttcaaaaaaaatgaaacaacccctctacagttttacatactaaactacaaaaggctttgtatttcctgacagttcacggaagaaaacatgttgcctctgaagatgatgtgaatcttacttacattttctactgttgaaaaatttctagaattatcaatgctgaaattattcaagaacaatcctaatttaatacgaccaggatgggaatgtgactacccctggctccacctccccacccccatgaagaatttattaagcgtgagacatttgaggtactttccagtgtgccttttggaaatctcaaagaaaaatggtgttagtttcccaagtaagcctcagggataaagaaacaaagggggagaaaagtgtttgttcactcagcaggtcatataacattgatttaactttgactgagtaggtttaataagccagagtggaaatatctttggtcacagaaagatgaagtctgaggctgaaaactgttcattggaaaatagtcctgccaccaaccgccagagtttctaggagaccttcagcctcagaagaggggctgctctccccctccaagagtagaccagaggccttaactcgcattaagtcaaacattcctgttgtgtgtaaatactatagccaatggaactttaccttcacgtctacatctttgtttactgctgattggtactgacatgtgacttacaaccgagagaggaaaaatggttgggataaaaatgagtgatggtcaataagtcaagttatacagggaactggggatatactagtgtttagagtacgcacctcaaaatcagacagataatggggtaaaatctgggttttcctacttgctgtcagaccttgagcaggctacttaatgtctcagcctcaatttcttacctgtgaatacttacctcataggtgattagagaattatataaaataatatatgttgactggtgatgaataagaaagcaatgatcttttctaaatccaaagatttttctttattttcttcttattaaaaatattattgtatcaactaggcacactttatgtccgcacaagtcagacaaatttacttgagtgactagccaataaaccattggttccaggcaaaaacgtcaaaaaaaaaattctcacctttattttggaagaacagacccattatatatattgtgcattataacatgaattcaaggaaaatcttgctggcatagtatctacactcatatttgaaaataagcaaagaaaaaagttgattg

SEQ ID NO: 1884257 - DNA, 4001 bp, Homo sapiens
atcctcattaatcttctttttcaaatgtaaaaagaatcctgatgctttaaattatgtctaaaatggttttgttaagttaaaaagtacccactgagattttaatttgcaattcattttaggttggttcctcctcagggaaacagatgctgagatggagatttgcatgcaggaagtttatttgggaatctcatgggaataacacctgtaagagaagagagaatgcaaagggagaagttaaactgtgatggagttgcaacagagggttgcgactgattccatagggagctctgaggctagaattgttcttctgaattgactggaattaaacaaaagagctacagcaaccagttaatggacaagctaccgccaagaaaaaggtgtagtgggcaaggccaagggcagtttctggagaaagactcagttacgagctgtcagtaaccaatgctctcagtctctgggaatgaatgccttgatcttgaataggaatatgggcagtgcaccacagcatccatgtcacaatttttacagtcttgcttacttttccaggaaaatgattagctttcccttttattcagtattttatattttaaataacttccttagactaaaaatacaaaagaaaaccatcagaaaaattcagtaacttttctgtgcaatgagtaatagataaacagaagctcagtagatgggaatcatgcattcaaatcaacaagacactgtagcagaaacaaataacaatcttttgctcaatattagtggaaagtataatgtggttcttagaaagatacataatctattcctttgtttccctttggtttttccaaaccttttcatcctccttgagctatgagtaaactttaagagcttcctctcattcttcttcctccttaaactctgcatcttttgacaaagctgaccatcaaacccaacatttgtatgtccagatgtctcctgagcatctctttcatcttgatagactcattattttcccccctcaaacctgtttctcccatatgttctcttcagggccatctccagctctttctcatagtctacttttagtttatggtcaggacctgccacgcctacctatgagatgggtttgaaactccttctcattttattcttgatgctataagcaaaaataacatcgatattatttctcatatggggtaatgctgtaaactcctaactgatttccatgtctctaattgtttccatctgtaaccaattatgtcattgacaataccatcatcaacaccaaagttcaaatattttgatgactactgctcacagaaaaaaaaatctaagtgtgctcacatggaattcaaagctctgcatattctggacctcacctagcatcttggtctgtagcccagatttaccatactgcttgccctctcatgcctcttgtttatattgcttccatgtgtctcttttctttgttataaatgtaattttcccttggtccctccccaaagacattctattcattttcacgatgaagctcaaatgctacctcagtgaagagttcttagattcccatagtagaaatcaattgtgcatcctcttatttccaaatgtgctttgtttccacatcctcttatttccaaatgccactcttgcaacatgtatcccgtgtatgaatatacttgcatgtatgcctccctgaatacacttgagttttggaaggcaggagctgtttattttattcatctttgtattcttcacagagtctggcctagcctaattctttattgtgcaaactatatggttgtggaatataattctgatgtctaaggcaagggtgtaattgtttcattcattctatactcactgaaatgcatctagagctgtgctgtccaatatggtagccactagccacatgtggccatttaaatttaaattaattaaaatgaaaggaaagattcagttcctcaatcatactagccacatttcatgtgttctagcagccacaaggggctcatggctaccttccatgatgaccactgcagatatggaacatttccattgtcacagaaagttctactgaacagtgctgctctatcggatttgcattagaatgctttcagctgcaagtaatagaattctcaactcatattgagttgggctcctcaaaagcagaccctgagacaaggttttgggcttatgtaatttatttaggaggtgaccccaaggtcaagtagagcacgtttttaggaaaaataaaagtaaaaaaaggaagctaaaagagccagtaaatggcatattaatatgaagtttctactgtaggcaactgggactcctttggaatcctctgagaaaactcacttcagaaatgagtgagtttctgaactcactcccaggtgtgggaaggctgaaccctccaactccaccaaatctccttctttattgattggggataagggggaagtggcttaaacttctcctccacttcggcattgcaacttcaggaagagaagaagaggtgcaggtgcttgaggtggaaaactgtcagagtgctagaaactattgcagcagcagatcatttcaggatggcaaagaagatgtgttggtgcatcagcagactcttctacacatctaaatagggataaaacaataactaaaatctattgtctcacataaaaatgtctggaaaaaggaaaagttaatattttgttaattcagaggcttaatgatgaaggggctctggattggtagttctgcattaatcttatttcctcctaacatcatttcaggttgtctgcagcccttccaaacattacaagtaagtattccagtggcaggaatgagtgaatccaggtttggggtcttataaagagtaagaacatttctacaaaccctgccagaagacttccttttgtatctcagaggtcaagactccatcttgtggccatggcagtggcagagtaatagacttgttgtgattgctttcaactaatcaacgttcacctcttgggtccagggacagggctgcctttcttaaacataatactccccagtatctgaaaacaataggcttctgttggcaaagagaagagataaatagggtggtgatgcatatgtcctgggtaagcaagagtatgtcacaggtgcaggcagcagcttttaagaaaaatattaacaaactcaagagaatctagagaaaaaatgacgaggatttccaagacctagcaactgcactgtattttgagtaaataaaggaactaggtacaatcagagctctgatgtcattacaccagtaaattaatcaacctttgaacttctctaatatacagaggtaaaaagggtattacggtggctatcattaaatattttaaaaatagcattggttggcagataaatttaattctatgatgtaccggaggctatagctgggaccagtgtgagagttagattttttttcgtatattgaacagtgatttatccttaacaattagaggtgttcataaataatatgataaaatagtaacattttcaccattggaaatttaagaagagctgaattccattaacggtttacattccagttagtgtttcatgtttcaaagtatcatttaattgaactattattaaacccttataagatatactatgtaaatactattgtctctattttccttatggaaagaatgagttcagcaagtttaatgatttcttaagatcatggagctagtaaatggcaaagatgtgacatacactcaaattttctcaccctcaaatactggtattcctaagtcattataactatctgggtattttaaatgttttaggtaattgaaaatagctttgtaatagacctgaatttggctatgcttctattgctttatatcttattacaagcaatctgttcccaggaatgcccgtcattagccacttcagcctgcctctccctgcctccctccctccctccctccctccctccctcccttccttccttccttcctcccttccttccttccttccttgtttcttgagac

SEQ ID NO: 1884258 - DNA, 4001 bp, Homo sapiens
aagtgagctggagaccacacccagttctactgaaccctgaaagaaaaggtgacccctccttctgaggggtctgacaatggaccctccccttctgaggggaggacgctgacaatggacacctgtgtctgatgtaaaatgcaagcactcacagccataaaagagaataaaatcgtgtcctttgcagcaggatggatgtggctggatgccattatcctaagcgaactaatgcagaaatagaaaagcaaacaccacatgttctcgcttacaagcaaaagagctaaatatcgggttcacctagacataaagataaaaacaatagacactggggacttcaaaagtgggagggagacagcggggcgaggggtgaaaaacttcctattgggtactatgctcaccatctgggtgacaggatcaatcccaaacctcagtaccacacaatgtacaattgtaacaaacccgcacgtgtatcccctaaatttaaaataaaaatggaaattttaaaaaatgcaagcagtaacaccaactgcccaggagtgctgggggaattgcatgggatccccaatgtaaagcactagcatagtgtctgagcccacaatgggtgcacaggacacatggggttgctgtcccaaacccagtcctcactcagagccagtcatggccctgtgaacagcattaattaggtcagagagaatgattcacactcgagttctggagagcccagggaaactgttatgtcaccctggtgctatgtttacttctcctatcaggagtgattaaattcttaggatctcatgctcagaggttgacagttatattgaattttacccacttttaaaaaacctttggaagcacccgattatttgtctcagctttgatgagggctgtggaagagcaaatgtgtcatgacaagtcaccaaccacagggagcctcagagctgtcaaaggatgggccattctccaaaaattcaagcaaacgcagaaacgggagggcccctggactgggtatcttcagtcctgtcactttttgcaggtgggggttccaacataagtcatacagcagccatacaagcattagcacagcccctctaagtcgaagttcagggacccatgagactcaaatcccaggctgattttggtgcatatggccacctgcactttctagaagatccatatcagattctaaaatggccatgagaccctaaaaatattaggaaacgcacactgaatgaaactaaaatgatttatgttaggggtgggagagaacaggtccagaggtcagagctgggaatcgtgaggtaaagcagaaattgcaaatgttttccatcaaccccatcccccaccttgacacccccacaccccagaaacactgaactgttcccagttccccaaatggcttgtggttttctgtcctctctgcctccgtgctggcaaatattcgtccaggaggcagtgactgggagagaaagactaacttcttattcaccagatcggatttcttaaacaataaggagttctaagaggccatgccaagcaaacggccagactgtacaaaggtgccccttgagcaataaatagcaaatgctctgggctttactgataagcctccccagactccaagccccaccaggcatgcagacaagtgcctgcagtgattgcagcgcctgcgcagcggcccttgttggaagtccaggagtccgcgctaccccgcaaagtccctggccgctgcccgcacaccgaacctctcggggctgagtcgggctgctttctcctcgcgtcccggggcgccctcgggaactcgggagcgcgcggcgagctgaacaatggcctggggacacctggcaggtcgcaggccccaaatcttccccgccgcccctaggccaccgccctgcacccggaacctaccggcgttcccagagcggggcggacggggcggtgccattggccggtgcggagtgaggggcgtgctcggggcgggacggagagaccggggcggcacctttggccgtgccgggcgagaggcggggagcggggcggggcgaggggcgaggggcggggcgaggggcgggcctggccccgagcagctgaagcctggggtcagcaggcgctgcgggcgcagctccggtgcaagcgaggacacgacacatgcagtggcttctggactgcgcgatgactggacggtgagtgatgaacgagcaggagagtgcttgggcgtccatggagcatcccctccgacccaggactgccaccaggcagggacgctgaagcctgggcacttgtgcccttcggccgcagcgcgcagggtccctcccccgccagcctggcgcattgcgggcctcgggctcattgctgagagggggcactgcgcctggcacctctgttaagcaatttaggggctacaacctgagcaagacagatgagcccggccactggctacaccttttttgttcaccttgtccttaaccagtttcctagaagcactgatcctagagttggggagagagcctagaggcctctggcacaactctgatttcactgatggaaatcgaacgccaagataatagcagcagggggggtctgtctcacaatcgctgtctgtagagggctcgccttgctctgggccaagtgctttaacacgatatgcctcttactcctcacagcaagtgagagtcctactttcgttatccccttttcagatgtgaaaactgaggcttaaagagttataaaattgtccacctttaccggatgagttggtgatggagccaggatttgaacccagggcttgttgtgcccctgagtctcttgctcttcacccttagtctccgaaggtcagcctgcctgctgccctgctcttctgggctcctgactccggtcccatcctgcacttcccacttccaaaacatgcctcagtgttttcattaacctggcacggcggagggagggaggcctcctctcacaccagaatcagtgcccaggccagggccagcactttcttaaaacacagtaaggacagcttcaggagccccatttcacataggaattaaataaggtcgcacagcaaataagggctgggcttctggaatttgaacccaagcaggttagactccaaagctatgctttgcactcacagaggagcccctcgctggctttgctgtagtttaactgcccacagtactaaggtgtcaatcaggatttgttgccagaaaccatttttttttaagttagaagtgaattggtgaagtaacaggtaaatgtagaccatcctgccttctgttcctctgtgtggttccttagctacttctgccaggacagcaggttaggggagaagacaggaagggagagggtcagaggagaaagaggaagggagggaagaggagagatgaaactcattaaacttaggttaaaaaaatgctggccggaaattgtcatgggctgtttcagcactttgtcagtgtatgtgaaggctgttgtcattagttctagccataattctctcagtgtgtagtgctggtgatttgacaacaaaaaggttgatgctacagattaaagtgtctgtctgaaactcaggagattgggttgtatttccaccatgaagctccagtgggtagcctggaggtcgagaacagaatcaaggtccagggtcgccctgggtcaggaccaagtggaccatgacagataacaaagaacatgaacgaaacttgggtgtgtgtcagagttcagattctggacgtgcaaagcctcaaaggggagacctaactaggggatctgccagaaagccctctgccctgggcccctggggtctggggcctggtttcaggtgtcagctcagactctctcctcattcatggccactcctgcaggcaggcctcacattcccatctctggggctccacagtctctccagagcccccaactcccagtgtcaataagaatagtaatgggagcctcttttcattatgggtgagcccaacacaaggcccatcttacaggtctcctcattcgtc

SEQ ID NO: 1884259 - DNA, 4001 bp, Homo sapiens
aaaaatttttttttgctccataagaagtaactcctcatccattcaagctggtttttctgtttgttttcagagacagggtctctgtcacccaagctgtagaggagtgcagtgacatgatcacagctcaccatagcctcaaattcctagatccctcacatgtgcagttcacaatagggtttgcgctcctgtgaaaatctaatgctgctgctgatctgacaggaggtggagctcaggcggtaatgctcactccccgcccatccccaccctgcctccatcccccgccctgcaccttctctgctcacctcacgctgtgcgtccttgttccttacaggctagggaccagtaccggtccaagggccgggggttggggacccctgttctagttaacttgctgcagctcctacatcagtatttgctgcttcaccttacacttctatattatgaagacagcttctttccttaaacttcatgaaccaacctctgctagcttttaacttgtcttctgcaacttcctcaggtctctcagccttcacaaaattgaaggcagttagggctttgctctggattcagctttggcttaaggaaatcttgtggctggtttgaccttctatccagaccactcaaacgttcttcgtatcagcagtaagtctgtttcactttcttatcattcatgtgttcactggagtagcacttttaatttccttcaaaaacttctcatttgcattcacaacttggctgtttggtgcaagggggcctatctcagctttcaacatgccttctgcactaagatgaatcatttctagcttttgatttaaagtgagagatacgcaacttttcctttcacttgaacacctagaaaaccattgcagagttcttaattggcctaatttcaatattattgtgtttaagggaacagataggccccaggagagggagagagatggcagagtagcctgtcagtggggcagtcagaacatacacatttattgattgattgctgtcttctatgggtgtggtttgtggtgcctcaaaacaattacaacagtgatttcaacttatcactgatcatagatcaccatagcagatttatgggaagaaaaatgataaacgcaatcatattggtagtgttctagtcctaggttcgttcatgcatgttcatgttattgataagcaccataacttcaatttcatatgtataaaaatgctcaaaaaagtgtacatcctcttttagcactgtagtgagtcaacattccccaacaaaaactggatttcctgaaaaacaggttaaggtaggaggttgggggggggatgcttttcagaatggcaaaggtcaacatgtatcatcttctgtaagtaaaatgtatgtataggcatacctttctttcagtttaagacaagggggtgtagtggggaattatcgtgtaaaactacaccagtatcttaagcatgaaaatcaattatatgcttttcttttgtttgttggtcaaagaaaaagattataactcagaaaactttcttggagatgcgtatgctcagtgtatccaaactttaggcatgtcaggtacaatattgatttacaaaaagttcctctaatcaatcctgagctaataacttactgtggaaagagtaattgatcagagccatccctccaattggagtcaacttccatgactgttcggatttcctttattttgggggcagttcatccaaacttctattaaacggcaactagttcacttttgagaagtggtttacaagaaacaacaacaacaacaacaaagcagttgcggaggaaagaaaagagacaaagtaaaaaaaacggaaaagaaatctcccaggagaaagggatgtggaagctgaaaacacggacaatttccacagtaagacttccaaaagaatgtgcaagatccgagcaaaactttcaagggctctttttcagtgtaatggtagtgagaaagttcagcctggaaagcccagggcttaaaacaacaacaacaaaaaacacaatatgcaggatcgttcggcttcagcagaacccaccgcaaagatggcggtgggacgaagccccttctcccgccgccgaagcctctcgcctcacatttcccacaaacccttcgcgccgcctcgctagccgaaacctgcccagccggtgcccggccactgcgcacgcgcgggacgacgtcacgtgcgctcccggggctggacggagctggcaggaggggccttgccagcttccgccgccgcgtcgtttcaggacccggacggcggattcgcgctgcctccgccgccgcggggcagccggggggcagggagcccagcgaggggcgcgcgtgggcgcggccatgggactgcgccggatccggtgacagcagggagccaagcggcccgggccctgagcgcgtcttctccggggggcctcgccctcctgctcgcggggccggggctcctgctccggttgctggcgctgttgctggctgtggcggcggccaggatcatgtcgggtcgccgctgcgccggcgggggagcggcctgcgcgagcgccgcggccgaggccgtggagccggccgcccgagagctgttcgaggcgtgccgcaacggggacgtggaacgagtcaagaggctggtgacgcctgagaaggtgaacagccgcgacacggcgggcaggaaatccaccccgctgcacttcgccgcaggtaaccggggccagcgtcccctcgcctcgctccagaccccacctgcgcagccggggcccacaggtctgaaaccagtgctcctccgcctcccgacctttctccaggactctggtcctggtgatctcgctctcttccagtggggactaaggagattaggggtagggtgagcgtgccacactcgctggaagttttttgttttgtcttggtttggtttttttgccaggtgttgggggtggtttggggttttggctttgttttgttttacagtatcaacaatacctgtaccaacttccggtcttgttaccctagaaggcctctacacacaagaaagagtaggggacgtagttgatagaccttatgatttaaaaggtcagttacctccaaaatttttcgttcttgcaagttccatttgggttaaggtcttgaaggactttgtaaaatacaaggatgtaatttaggaggagtagcttaataggacgttgacacattagcgttaattggtttatcagaatagccaatcattaccaagtttctggagtgactagaacgggaaataggcaagtttgggagaactgaaacctgacttaggctgggtgcgggaagccttagacacacacacatacaagttgggcggaaagtggtagtataagagaaaagatagtgcaagtactttagcttgaatctagaatttaagttgggactaaccttgcttcattctgaaatttagatcgtttgaattacattattttaatatttattaggttcactttatgatttaagcatattaaatttagtcgaaaaatttaaaagagccatagatgggatattcagcttattcccataaagcatgcatgctgttcacttgtaggaaagatgatgactgtttctaacttcaggtgagtcatgcgtgattgaaaatgggagtacctcctcttacctctgacaatcctggttttttgttttgtgtatttcatgattgtttaaaacaattttttgaaaaatcggggaataccttttaaagtactcctgttcttttggggctagattgatgaagagaaaaggagcagtgagaaatatttcctctttcacagatattacttttacactttctaccaattggagatttgttcgctttaacctgttccagattttaaatgtaaatactaccaggaggtatgcttttttgatcaattgcacctttgttggatttccattggggagtcttttaaaaagaagaaagtttagggaacctaggtgggagaactagaaacggtttgtgggcaatggaaagagaaggaagaatactta

SEQ ID NO: 1884260 - DNA, 4001 bp, Homo sapiens
gtagaggagtgcagtgacatgatcacagctcaccatagcctcaaattcctagatccctcacatgtgcagttcacaatagggtttgcgctcctgtgaaaatctaatgctgctgctgatctgacaggaggtggagctcaggcggtaatgctcactccccgcccatccccaccctgcctccatcccccgccctgcaccttctctgctcacctcacgctgtgcgtccttgttccttacaggctagggaccagtaccggtccaagggccgggggttggggacccctgttctagttaacttgctgcagctcctacatcagtatttgctgcttcaccttacacttctatattatgaagacagcttctttccttaaacttcatgaaccaacctctgctagcttttaacttgtcttctgcaacttcctcaggtctctcagccttcacaaaattgaaggcagttagggctttgctctggattcagctttggcttaaggaaatcttgtggctggtttgaccttctatccagaccactcaaacgttcttcgtatcagcagtaagtctgtttcactttcttatcattcatgtgttcactggagtagcacttttaatttccttcaaaaacttctcatttgcattcacaacttggctgtttggtgcaagggggcctatctcagctttcaacatgccttctgcactaagatgaatcatttctagcttttgatttaaagtgagagatacgcaacttttcctttcacttgaacacctagaaaaccattgcagagttcttaattggcctaatttcaatattattgtgtttaagggaacagataggccccaggagagggagagagatggcagagtagcctgtcagtggggcagtcagaacatacacatttattgattgattgctgtcttctatgggtgtggtttgtggtgcctcaaaacaattacaacagtgatttcaacttatcactgatcatagatcaccatagcagatttatgggaagaaaaatgataaacgcaatcatattggtagtgttctagtcctaggttcgttcatgcatgttcatgttattgataagcaccataacttcaatttcatatgtataaaaatgctcaaaaaagtgtacatcctcttttagcactgtagtgagtcaacattccccaacaaaaactggatttcctgaaaaacaggttaaggtaggaggttgggggggggatgcttttcagaatggcaaaggtcaacatgtatcatcttctgtaagtaaaatgtatgtataggcatacctttctttcagtttaagacaagggggtgtagtggggaattatcgtgtaaaactacaccagtatcttaagcatgaaaatcaattatatgcttttcttttgtttgttggtcaaagaaaaagattataactcagaaaactttcttggagatgcgtatgctcagtgtatccaaactttaggcatgtcaggtacaatattgatttacaaaaagttcctctaatcaatcctgagctaataacttactgtggaaagagtaattgatcagagccatccctccaattggagtcaacttccatgactgttcggatttcctttattttgggggcagttcatccaaacttctattaaacggcaactagttcacttttgagaagtggtttacaagaaacaacaacaacaacaacaaagcagttgcggaggaaagaaaagagacaaagtaaaaaaaacggaaaagaaatctcccaggagaaagggatgtggaagctgaaaacacggacaatttccacagtaagacttccaaaagaatgtgcaagatccgagcaaaactttcaagggctctttttcagtgtaatggtagtgagaaagttcagcctggaaagcccagggcttaaaacaacaacaacaaaaaacacaatatgcaggatcgttcggcttcagcagaacccaccgcaaagatggcggtgggacgaagccccttctcccgccgccgaagcctctcgcctcacatttcccacaaacccttcgcgccgcctcgctagccgaaacctgcccagccggtgcccggccactgcgcacgcgcgggacgacgtcacgtgcgctcccggggctggacggagctggcaggaggggccttgccagcttccgccgccgcgtcgtttcaggacccggacggcggattcgcgctgcctccgccgccgcggggcagccggggggcagggagcccagcgaggggcgcgcgtgggcgcggccatgggactgcgccggatccggtgacagcagggagccaagcggcccgggccctgagcgcgtcttctccggggggcctcgccctcctgctcgcggggccggggctcctgctccggttgctggcgctgttgctggctgtggcggcggccaggatcatgtcgggtcgccgctgcgccggcgggggagcggcctgcgcgagcgccgcggccgaggccgtggagccggccgcccgagagctgttcgaggcgtgccgcaacggggacgtggaacgagtcaagaggctggtgacgcctgagaaggtgaacagccgcgacacggcgggcaggaaatccaccccgctgcacttcgccgcaggtaaccggggccagcgtcccctcgcctcgctccagaccccacctgcgcagccggggcccacaggtctgaaaccagtgctcctccgcctcccgacctttctccaggactctggtcctggtgatctcgctctcttccagtggggactaaggagattaggggtagggtgagcgtgccacactcgctggaagttttttgttttgtcttggtttggtttttttgccaggtgttgggggtggtttggggttttggctttgttttgttttacagtatcaacaatacctgtaccaacttccggtcttgttaccctagaaggcctctacacacaagaaagagtaggggacgtagttgatagaccttatgatttaaaaggtcagttacctccaaaatttttcgttcttgcaagttccatttgggttaaggtcttgaaggactttgtaaaatacaaggatgtaatttaggaggagtagcttaataggacgttgacacattagcgttaattggtttatcagaatagccaatcattaccaagtttctggagtgactagaacgggaaataggcaagtttgggagaactgaaacctgacttaggctgggtgcgggaagccttagacacacacacatacaagttgggcggaaagtggtagtataagagaaaagatagtgcaagtactttagcttgaatctagaatttaagttgggactaaccttgcttcattctgaaatttagatcgtttgaattacattattttaatatttattaggttcactttatgatttaagcatattaaatttagtcgaaaaatttaaaagagccatagatgggatattcagcttattcccataaagcatgcatgctgttcacttgtaggaaagatgatgactgtttctaacttcaggtgagtcatgcgtgattgaaaatgggagtacctcctcttacctctgacaatcctggttttttgttttgtgtatttcatgattgtttaaaacaattttttgaaaaatcggggaataccttttaaagtactcctgttcttttggggctagattgatgaagagaaaaggagcagtgagaaatatttcctctttcacagatattacttttacactttctaccaattggagatttgttcgctttaacctgttccagattttaaatgtaaatactaccaggaggtatgcttttttgatcaattgcacctttgttggatttccattggggagtcttttaaaaagaagaaagtttagggaacctaggtgggagaactagaaacggtttgtgggcaatggaaagagaaggaagaatacttaagtcaaacacacctagttagcctttttgcccgaaatttcggtggtaagtgctgccgttcttcagctaatttaggttgtcctgtttgaccatgtag

SEQ ID NO: 1884261 - DNA, 4001 bp, Homo sapiens
ggtttccaactagccggaatgcatagacggtcagacttattaagcacttgtgtgtcacctaatggggtgttcacctgcaggtacctgaagccctggcaacacagctacaggtggttgtgccagcggccaccctgccgaagggaggctggaggggagcccctggctgcccagctctgtgccggtggaggcagcagagggggtgtgggaatgagcgggcgcagcgcctccgcactcacacccctctgggccatgcctgtacctcctgcagcagtcggccgtggtcatccgcactcacacccctcggggccgtgtctgtacctcctgcagccgtcggccgtgctcacacatcatgcagccctggctttccttttgtcctggttggttgtgcgcatatgaacttgatgacaaagctgttgattaacatgttcctgcctagagtgcactctgggaaatacttccaggaacaatctttttttttttttgagacagggtcttgctctgacacccaggctggagtgtagtggtgtgatgtaggttcactgcaacctccacttctcaggctcaagcgattctcccacttcagcctcctaaagtgctaggactaccaacacgcatcgccgcactcggcaaaattttctattttttgtagagacagggtcttgctatgttgcccagtctggtcgtgaactcctgggctcaagccgtccatctgcctcagcctcccaaagtgctgagattgtaggtatgagctaccatgtccagccggaacaatttttaaattgtgttatatttcttctttttttaactgatgaggtgaactttcataatcatctacaattttattgatcagagtttttcagactctacattttctcaagtagtaatttgctctttaaaataaaagaactgggagaacccactgcaatgtgggaggctttacaaagacttacgtgtaaagtaattgtctcctttccgagggatcattttaaggagaaaaaccgtgcaatgctggattaagacattcgtattatggaagagactagtttatagtctctggttaactttagcaaatttctcacactcataaaaagacccgtggcaccgttggcaccataaaaatactattttcaaaaaaaagtatgattgttacagttaagtttataagatgcagactctattatataaacaatggccttgctgtaatcattctccttttcccagtatcttaaaccacactataaaatcagactatgccaaaatagtaagaaaatatgctacttacagggaaatccagtttctttcttgcatgttcatttctggggaacacaggggctgtgggagccgtgcagggcagttactcactgctctctccccgcagcccagcctcagcagaagccccaggggacagtggagagcggtcagaaggggaggccatggaaatctgctctgagcctgtggcagcctcccctgcaccggcaggtgagaggcggatctacagacataggtcagtgtctgagctctttctgaaacccgttctcaacatgtgttcggtgctgaggattctgggctgcacctgggccgcagctcttctcatactgaattcagaaaggtaacgctgggtaagaaaatcggcttccgccagagaagaaagtccagatatctcaggtcctgtgaataacttagtttctctcgcatactctgtttttgagccattgaagcgcaggaatgccaagcaccactcacttttcctcattgtctgagtgggatggaaagagtctcacttgcagttgcttcagtcacaacccaggcgtctgccttaatagcatcacctgtgccgtctgcgtttctagcgtcacctgtgccgtctgcgtttctagcgtcacctgtgccgtctgccttcctagcatgacctgtgccgtctgcctttctagcatgacctgtactgtctgcctttctagcgtcacctgtgccgtctgcctttctagttaaagttgattttaaattaatttgggaaaaacggtgaacaagtggggaaaaacatcaccaaagactccaaacaggtggaacgatgaacttaatgttccctgcaccctccttacagatgcctggactttggcctgtgaatgagccccggggggctgggacagtaggggttttcatggaatggacatggggtagcaggaagtctcagccccagagggcttggcaggagccgccctctctgcggagttcttcccagcgggtgtgcgttggtggctggcggggaccccccacaggaactaggtctcaggctgtggaaagggagctgccccagggcccaggagggccggctctgcattccgcatgttcccagagtgaaagagaatgagaaggagacacacaagtgctgttatgacctgggttgttggttggcaaatacagcatctaatagaaactttcttccatcccagaataccctctaccatctgctttggtcagggtgccgctcgaggatttaaaagcaacaagaagaaaaccaaacaatgctgatagactcagaaaaggagtggggggcagtcaccactgctgggcgtggcatccgccttgggcctttctccgaccttctggtgtggccgccctgggggccaggccctcgccatcctccccatccttgttcctcagcaaatggcattagcagctgtcatcagaagctgtgagggacccacagattttggaaacgacctggacacactattgggaaggagatgtggacggcctgtctcctcctgcagggcccaccctaagaatgtatttttaaacacatgaaataagtatttttcactgatggtcttgagtcttcatttctgtgttgagtcaggtgcggagtggttattgttacccatgggtattctgttttccaccctcagttttcaggaagatttataaagtcctggcacccctcagaggtgggtgatggggtaggatacagcactccacctcgtcccggacctcctggctttgggagccacacccagttgtccttgccacaccacttagggagtagacctggtgggggtaggatctgatgcccacagggaggggcactggctctgggggcatggggtgcttgggggtgtgtgggatgctgggggagtggggggtgctgccccagagggtgcaggatccatcactagtgccagcggggaccacagagcctgcatcaggaaatgcaggccaggagattggggctggcattggattgcagagatacactgggggcagtgtgtcctggagaaatcactctgttttgataaaattagggcgctcagagactcccgaccacgtcttcctccagcggccctgttcccacagcatgtgatataggcggcaagccacccaggtgccaaggcaagagaacgagggcacgagctgttccagtataacaaatatataaaataacaggagttatactagatatatgtcatagatatgattatatatgtatcactaatcattagtttgtagtaattattctttattccaatattataataatcctcactctacaatcataacctaggaaaaaccaggccatacggaaataggagctgaggggacatagtgagaagtgaccagaagacaagagtgtgagccttctgtcatgcccggacagggccaccagagggctccttggtctagcggtgacgccagcgtctgggaagatgcccgtcgccaagcggaccgtagtctagtggtaacgtcagtgcaaaggaaaagcacctgctacttagcagactgggagagggagtctccctttccctgggggagtttagagaagactctactcctccacctcttgtggaaggcctgatatcagtcaggcccgcccgcagccatctggaggcctaaccgtctccctgtgatgctgtgcttcagtggtcacactcctagtccgctttcatgttccattctgtacacctggctctgcactttagatagcagtagcaaaattagtgaaagta

SEQ ID NO: 1884262 - DNA, 4001 bp, Homo sapiens
acacgtggtctgcagcattacgggcgtgccattcacctgcaccacagccgaaaggatgcctgaggtcaccgagggcccgcaagactggccaaagacgccaaagcccaccacactcacagcctcgcctgccagggaaggaaggagggtgaagctggggacacctgtgttacagcaggactcacactccctaactcccatccctaccctctccaaacattccaaacctctccacccttcaagtttctgctcagatactcctgcctccagagagccttccccatgtcccctggctggaagaggctgagaactccactgagctcctagcactgtatctgcatgaccacttctgagcaacaggctgttccctagtccttgttccctggacaggcggggcagtgacttttaggagttcctaacacctacctacatgctcaataaatgtttgtggaattcacacccatctcctcctggaactcctaagaagtctcttcgtgaaaagaaatggtgatgatggctataatgcagccatgaccttccttttccaagtgcagggtatgggggtaagtgctttacaggcaacgtcacacccagccctcacaacacccagaaataggatgcattagccccatttcaaagacgtggaaaatgaggcagaggatagttaactagcctgtccaaggacatgggactaataggtggcataggaaagatgcccatccagagcccctggacccttcatcactgtatcacactgcctccatggagtgcaacatcagtacttatgtggcagcatcacaaagccttttacccaaatcgtgcccctggagccttgaaagtgccacatgcctctctgaccagcctgaagtgttaaggaaccccaaaggcccagcatcctcacactacattgctgcaggcactcggggaaagggcgtgcagcattatccttcccagggcactccatgtgccccaccagcacaaaaagggaggcaggcctccaaggaccttgaccaatgctaccctgacttcatgagaatgcccaacactgattctccttcctgaggcccaccctagctcagaggggccctccttcaggctgcgcccttcgtcctttaccttcatggaagtgctcagcgggcacagggatggggacatcatccaggtcctcctccaggctcaccactgctatgtcatagggacatgtctcctgagtggcaaataccacacggccccagatggccacactcctgggagcaagggaaacaaatgacaggctagctttctgactcctcagtacttgggagaaatcaaggagctgagagtgacagtaaaagtcagaagatctgggtatcagccctgaatcgaccagcaggcaactctgggcaagtcatgtaaccattctgtggtatctccaaaggtggttgacaaactgtgctacttctctaaagcttcctgtacctgaataatcaacctgacacttagtgagcactgtgggccaggtttggtgttagtgttttgtggacatcactttatttagtcttcacgaccctataaactaggcactggcattatctccattttaggtggtataactgaggcccagagacgctcagtaacattcccaacaccaaacaaagtgggaggagccaaggcaaacacaacactttccttcactgcctcgttgatacccacaacaatcccgtcagttggtgggtcagatatgacatggtttcactcctctgggtccctatttacgtacacgctaacacttctgtagcacacgacgtgacaggctccgttccacgacattcagcgtcaactcccggggaggcagcttagacaggttaagtgacttgcccgggatcagacaggggcgtcctactacacactctgcaggggtagcttccaacagacctggcagtctccttaggagcaaggggcatgtggggggagtggaaggaatctggtgggggccacacaccataggcaaaccttcatcatcagtcttccctataaagtcatggctgtcctataggccacagtggggacacctatggcaaaactgggcagtgttacccacacctggctaagcttggggattcaggaagagatttggaaaagcctgggctgcaaggctgggctgaaccatgtacagctgcgtgggccacccccctaccttctgattacgtagaaactcacgtttcactcagacgggaagctctggctaagcactaaaagatggataaaattaacatacccatctccttaccccaggagagcaccatcctgggcctctgggaccttatcactttcagaggagaagcagcagggttagggaatctctgttcaaagggccagagaaccgaggggtatggcgtgcagggctatcagacagtgaagctgcccagaagaaactcagcctttgaggggagctcaaagatgccctgttccggattcagggtgtcccacagtacccaaatccagagctgcttcgagcttgacaccttgccccagattctccccacaggggttctgggtataaaggatgaggggagggttccaggtctctacccactacacgcccaaagcatccgcgtgacacaagaaaggcctgcacaatactcaagagtattagggctggacccagatctgagacctggaaagggatgaagtggcgtcagccctgcgggcttacttgggggtggtggagcgcaccaggaccctggctgcttcccgaggggacacgtgccgacaggtcactacaaggcggggtgccacagccactccggagccccatacggtgccgcactccaccaacactgccgcggctgcccacaggggcccggagtctcggaggggcagaccccacgggacgcccacctctggcggcagaagggcggccagggcagcggtgctgtgcggcaggcggtgaagcgcgtcgcgggcggcgcggaaaaggggggcggcggcgcagagcagcgtgaagcccacccattcgccggccttccaacagagcggcgccaccaccagcgccaccagcgcccccgcgggccgcgcggtgaacacgccgccgccctcggtgccgggcaggcagcgtgcgtcggtaagcagcagtgggccggccacgttgctgagcaccccgcagctcagcgtgttgagaaagatgtcggggcagaaggcgccgaaaggggagccgcagaccagcaatggcgcacccttgggcacggccccgagaggcgacaccgccatggctggcccgcgctcctcctccacctcctcctggcctagccgcacgcccagcagcgcaaaccagcccagcgctctcagttgatccgcctcctcgtcctccgacacttcgtcatcccgcgccgcgctcgagaagcgccactgttccgctgcctcgtccccgaagaggcgcgcgaagtgggcccagaaggccgggcagctcagcagcagcagcagctcagcaggaagccggggctgcaggggacgcccgcgggacggggcaggtgggccgggctcgaggctcgcgcactggggcgtgcacagccctgggcggccccgctccgcgccgcccccgggacccgcggccgttggggcccactgcacgtgcaggcgcaggtcgtccctgcaactgtcgccaggcaggaagacggcgccggccgcggtcaggacttcgctgccagctcgcaggaaggggacgaagatgcccccgtggcaaagcaccaggcccgggctacggctcaggattaccccgctgcagctccacgggcccgcctcgggctgtccggcccgggaggcgctcaccatgcagcccgcctgctcggccgccctcatggcagacccccactgccttctcatggcctctaggccggacactcgggagcttctccgagaaacagcaagctagcgagcgaggacccctacccggtccggctgaagctgcctagcgccacccacagctggaagcgagaggcgcaagctctgactcacgtcttcctcat

SEQ ID NO: 1884263 - DNA, 4001 bp, Homo sapiens; identical to SEQ ID NO: 914162

SEQ ID NO: 1884264 - DNA, 4001 bp, Homo sapiens
agacccaccatcatgggtgtgggcttgagactctgaaattgaggcaccacttaaggcaggcagctaaagataagatcgctttgatggctgctttagactggaactcatggcaggatggaggaaagaggttgagagttggaagggtgaagaggtgttccaggagagggggaacagggcagagccaaaggtcaggagtgaagctctgagaccaggcaagtgcccaaaggtggctcccccaacccccagcattggcctcctgagcaactgccctgacctggggaagggagacaggtcacaagccaagctcccttgggctgcatggccaaataaacattagcattttatagctctgcacccatttgtagagttggggacagaatatgtttttactttttacttatattcaaagctttaggagccagtgccctcccccacctttgttgttgagtttctcctggaccgcaggtctagtgacccttttcctgggtgtcaggcttaagacgaggtctgcctcctacgccccattccctgagccacagaggttttctaaggaggtttgtgggctgcctaagactttggggatgggctggggggagatggatcatttccattccaagtgctctcggaccaggttagtgattctgaatagacagtgctggtacctccctcccccagggcctgcaggcagcccgtcttttgaccctcagagttggggttgggtggaaaggagacagtttggaggccactgccgccttcaggaaagggcagagggggctgggtcataggctgggacttgggggtgggagcctgggcccagggaaactgctgcctgggcagatggcccccagagggtagggaggagaaagccggcgctcaggccagagctggcgcttctcttggcgtcctcctccttctcctcctcaccagtttcctaaacagcttccacaaatagagtcattaaagctgtgaaggcaaaatgaaaccaaacaagtgcgttctgtgcttttctgtttcttatttttttaaggaaattaaaaataccgtaattagaataatacaaggagagaacactttgcggaaggcctagggtaagggcacttcccacccactgggttggctcaagaggttgggactggggcgccacctcccgcccccttagggtctgcgatccgccgggggcgccgcgggcttttccgccggctccatgcatttccctgaggcaggatctttttgggggaagctggcatcccggcgctggcctcggcccccgactgggagttgggtggcgcttgattggaactccggcccggagccgcctcagccgctgcgcccccgcgggcagacaagcccgggcggagcgcgctaagccacaggtccccgcggcgttcctcccggtcttcggggatgctaatggcagcgaaaatatttgctgaagtgcaggcataaatcagccgcctccccgctcccccacccccaccccttttgtttcctcttccttctctccaaaagcgctgggctgctgggcgccagaatttaccttttccatcttagcggcctgattagcatcgccgccgcttgtggggctggattctaccctctcctgcgtcccccacccccagtccccatctccacctccctccccagccgagctaaatcggtctgcggagccccgggagctctaacgccaccgcctagcgagtgagtgcacggagccgccctccttctcacctcccagaacaggctgcccccagtgcttgcaacttaccccttcgcggcgctgcacggctcggctcacttctccaagaaggcaggcttgtgggtgtgagagtatgtattaaggagtgtgtggggggtgagaatgtgtattaagcaggtgggcggaggtgggagtttgcagggaggggagggtgggtgtggtgttgcactggggtgtcaggtgtgtgtgggggcgaggcatggactgggtgtgtgccggaggatggatgtgtgtttgaggagggttgtgccttttgtaactcaggaggtgtgatgtataggctgtgtctgtgtttgggtgtgtgtggggtgggcaatgtcacatgggcacacttgtggtgtgtttgtgtataaataggtatgtgtaatgtggagacagtgagtcaccaccaggcatgggaagctccatccattgtattccgttggggattccacttcaggatgggacccaggccatttgcccatcagcacttaagagacctcattttgccccacacctgcactgtgagcagggtttggcctgagtgccaggttctgctgttggaagggcagaggacagcttcccctgctgagtgcagatgggataggcctgcctgcaggtgggtcctggtgctccagggggaggaaggttggcagagatggaccctaagccagcccagcagcttgggctactgcccccaggaagatcagagtcccagacctggagtcttctgcagtcaactcccagcttccccagagcatgggagcggctgtggtttggagatctgctctctgacctgggtcagcttatgcttcagcctgtctcccccaaagggagtgagttctcctctagagtttgctggagaaggggccagcagagcttgagtgggtgggatccccagtggagaaccccatctcaggctgacgtggctggggcctgggactctcagcggtagcaatttaaagaggacagacacacccacacacatgctggactccactgtcgttacaactttcttggtcacagaagcgcttacctgctttcccagggctgtccacaggaaggacttccatcacttcaactctaggataagatggactgttctggagcagggaggcctataggaaaatcacagtccctcgccccaccctggtgtgcatgttgctttacagtttacaaaacccttttatatgtgcagtctcactttgtccttgtaagaactcaccgagaaggtggaagctctcacttagaaggctgaagagacaggactgggacccaggtttgtattagtcagggttctctagagggaaagaactaatatatatataaaggagagtttagtaagtattaactcacacgatcacaaggtcccacaataggccttctgctggctgaggagcaaggagagccagtccgagttccaaaaccgaagaacttctagtctgatgttcgagggcagaaagcatccagcacgggagaaagatgtaggctgggaggctaggccagtctctcttttcacgtttttctgtctgcttatattctagccctgctggcagctgattagattgtgcccacccagattaagggtgggcctgcctttcccagcccactgactcaaatgttaatctcctttggcaacaccctcacagacacacccaggatcaatactttgcatccttccatccaatcaagttgacactcagtattaaccatcacaaggtcagaactcctaagcagccctggccacagccctcgaggaggtgctgtctgtaagtgttgctgatgtccactctagaaatgttaagtggcattcagagcattgcagatgccatgtgagggtgacagatgatatgcagggaagagcatagcagagccaaggttttaaggcatggggcttcctggggcaggtgatgagtgccagaccttgactgtccttttccagttcttctgagagcatgtcctgaagagaggatgggatgggggctagctagctgggtatgtgggcaggggtgccagccgacctctccttactcttgggaaatttgcccctgttagcatctgctgtgttcactatcttgaggtggacaccaatccttggagaacaaaccctctggccccattccacctcccagcatcccaggttctactgaatgtgtgcgcttgggtcacgaaccctctcagctgcttctgactctgtgggctaggaccatggcaggccctggaggcaaaaggccttcttcttggatctctctgtatggctcccaaa

SEQ ID NO: 1884265 - DNA, 4001 bp, Homo sapiens; identical to SEQ ID NO: 914174

SEQ ID NO: 1884266 - DNA, 4001 bp, Homo sapiens; identical to SEQ ID NO: 914178

SEQ ID NO: 1884267 - DNA, 4001 bp, Homo sapiens
ttgcagtattgcaggaaggaggtatgaaatggcttggatctgagtgacagcaacgtaacagaggagtggatccaggaagagcggggcatgatacccattggatctgagatggaagagttagttaggaagtggcaatgatgaaagtttccaatcttgttgttttgctgtattgccctgaatagacagggaagctggcaggggaagcgatggtggttcatgggctttagggcgtgagacgagctaaacccagtcttgaatgtgattcctcctaagaggcaaaatggaatctaaatgaaaatttttaactcactaatgaaagtaatgttttagaatgcaggtgaaaacaaatctcccttcttacatagtatgatcactgttacgtcatttgattttgttttttacatcattttacatcgtaaacatggtgttatagctgtctgccaaattcctctaaaaatatgccccttcgcagcaagatctgtgttaatcatcccatctcttcagttcctggaacacagtaggtccctaaatgataagtccagcacttaatatttgtgaattgaactggttgatagtaagcaaaattttgttatcaaggcaaacagaaaagagaagtgcatttagagtcagaaaggcctcgattcaaattcttgtccccttcttcccacccctgctagtcatacaaccacaagaaaattgctagcctgcatcttaggctcctcattagtgaaatggatgatcaagtctatcttgcaggagggtgtgagtgcatcaagttaaattaaatatatacacagtgtctgtcattcagttggcatcgacattacctattatactatttattattattacctgtatttccatggattttaggttttgctatggttttcatgctctcagtgtaccctccttcttctttctaacattccatccaaacagtcctgctagatgctgttctcttggcatggctagccagctttcccaaagcctccataggccactaagcttctgtccacacggctggctggtccgtcagtttaagtcacccaattcaactgacatcatgacagcttgcaaattccaaaatcactgttggtaatttagatgtggtagtgtttatgcctggcctatgaattataccaccacgtctttatttatatgcaacttgcatcatgctgtgttgaaagcagcttcccagtccagcacttgaaaatacttctcagataggttttcatagcaattaaaaaataaacacaaaacccgggaaagctatgtctgtgtacccaaaagatacctaagaacacagtagcatagagagcaggctgagttgtctcactcaaggatgtgagttcagattcattgatctccctgactgaaaactatcacccattgattgaggcactgtatatcttatctcagaatgaaatgaattcttaagtctcatgaattctacatgaatgaatgaaagtgtttctgcaactttcacttctcttgcagcccaccaaaaacaatggcattttctaataggaaaaacacattgaacgctgtatatgtgcgtatgtatatgtgtgtgtagtacatacatatactttattttgagacaggttctcactctgttgcacagggtggagtgcagtggtgtgcacagcctactgcagcctcaatttcccaggctcaagcaatccccctgccttagtctcccaagtagctgggaccacaggtgtgcaccatcacgcctggctttttttggtttcatatatatatgttgcctaagctggtctcaaactcctgatctcaagcaatcctcctgctttggcctcccaaagtgctgggactacagaacacctacacttttatacattctatatgcatcaaacaaacatatgtctgtgacaagagagcagcctatcacagcccagagacttcagaatggggacaggttggaaggaggagctacctatccctgagatgatgaagaggaccagtgcccattccaggagacatcaccgcagccctgaggaatcggctatgggcaccagcagggcacagtgccacacctcgccaatgccttgtcctccttttccatagtgagtcagtcagcaagcgtcgcattgccctgggatcggcactgcacgtagaagtgagttccacactctcttcctcccatagggagatcacttttctcattctaagggttccaggcacactcacaatggtggcatttgctgagcagtggcttgaataaagggctctcagaaagcaagatgtaactcagagcataggcttgtcctccagggcacccagccccaggaatgctcttggggaatgacctgcagcctcccagtgaaagagagaataaaagaaagccccagcaggcgagctgggcagtagagagtcctgtaattccaccttggcaagcaccatttgcaagaacgaactgggataaggtaaacaaaatattgcctaaaagaggcttgtccaaagaagtcagaatacgctcttcatttacctctaaattatgtttcttaaataccaagtaacctgcagtaccccctgccgccaccaaaaaaaaagagagaaatacttttttttctcctatccactgcagaatcaattttacagtggttctgcagttaatcctttcagtacaccataaatctaaatactcaaaaaaacctgtgccttttcaattgctactaaatcacgagaagactgatttacatagtctccttttatctcccttggcgggtaagtactcagctctgctcgttactaatattgaaacaacagcccttgaattgagtgatttccctagaaaggttaaggtgaccgaatctgaacactccctccatgtcttggacacgaagttttttgctgcgtagacagttttatccccctcaccccaaggtcaattgcacgaattcttttggaaaacaggacctatggcatttcccagacaaatcaccgtgaaccctgtactgtgcattgctgtcctaaaattaacacataaatctattgccgccaaagattctgtcatttgtgttacataattgcctttcatttgaactcattaatcaaattggggtttttaagcaacacctaattaattctttaactggctcatattatacctttaatgacttccaccagggtaaaaaccactgatcactgagttctattttgaaactacggacgtcgagtttcctctttcacccagaattttcagatcttgtttaaaaagttgggtgtggtttcatggggggagggggaagagcgagaggagaccagagggacgggggcggggactctgcaagaaaaaccttcccggtgcaatcgtgatctgggaggcccacgtatggcgcctctccaaaggctgcagaagtttcttgctaacaaaaagtccgcacattcgagcaaagacaggctttagcgagttattaaaaacttaggggcgctcttgtcccccacagggcccgaccgcacacagcaaggcgatggcccagctgtaagttggtagcactgagaactagcagcgcgcgcggagcccgctgagacttgaatcaatctggtctaacggtttcccctaaaccgctaggagccctcaatcggcgggacagcagggcgcggtgagtcaccgccggtgactaagcgaccccacccctctccctcgggctttcctctgccaccgccgtctcgcaactcccgccgtccgaagctggactgagcccgttaggtccctcgacagaacctcccctccccccaacatctctccgccaaggcaagtcgatggacagaggcgcgggccggagcagcccccctttccaagcgggcggcgcgcgaggctgcggcgaggcctgagccctgcgttcctgcgctgtgcgcgcccccaccccgcgttccaatctcaggcgctctttgtttctttctccgcgacttcagatctgagggattccttactctttcctcttcccgctcctttgcccgcgggtctccccgcctga

SEQ ID NO: 1884268 - DNA, 4001 bp, Homo sapiens
tttaagcaacacctaattaattctttaactggctcatattatacctttaatgacttccaccagggtaaaaaccactgatcactgagttctattttgaaactacggacgtcgagtttcctctttcacccagaattttcagatcttgtttaaaaagttgggtgtggtttcatggggggagggggaagagcgagaggagaccagagggacgggggcggggactctgcaagaaaaaccttcccggtgcaatcgtgatctgggaggcccacgtatggcgcctctccaaaggctgcagaagtttcttgctaacaaaaagtccgcacattcgagcaaagacaggctttagcgagttattaaaaacttaggggcgctcttgtcccccacagggcccgaccgcacacagcaaggcgatggcccagctgtaagttggtagcactgagaactagcagcgcgcgcggagcccgctgagacttgaatcaatctggtctaacggtttcccctaaaccgctaggagccctcaatcggcgggacagcagggcgcggtgagtcaccgccggtgactaagcgaccccacccctctccctcgggctttcctctgccaccgccgtctcgcaactcccgccgtccgaagctggactgagcccgttaggtccctcgacagaacctcccctccccccaacatctctccgccaaggcaagtcgatggacagaggcgcgggccggagcagcccccctttccaagcgggcggcgcgcgaggctgcggcgaggcctgagccctgcgttcctgcgctgtgcgcgcccccaccccgcgttccaatctcaggcgctctttgtttctttctccgcgacttcagatctgagggattccttactctttcctcttcccgctcctttgcccgcgggtctccccgcctgaccgcagccccgagaccgccgcgcacctcctcccacgcccctttggcgtggtgccaccggacccctctggttcagtcccaggcggacccccccctcaccgcgcgaccccgcctttttcagcaccccagggtgagcccagctcagactatcatccggaaagcccccaaaagtcccagcccagcgctgaagtaacgggaccatgcccagtcccaggccccggagcaggaaggctcgagggcgcccccaccccacccgcccaccctccccgcttctcgctaggtccctattggctggcgcgctccgcggctgggatggcagtgggaggggaccctctttcctaacggggttataaaaacagcgccctcggcggggtccagtcctctgccactctcgctccgaggtccccgcgccagagacgcagccgcgctcccaccacccacacccaccgcgccctcgttcgcctcttctccgggagccagtccgcgccaccgccgccgcccaggccatcgccaccctccgcagccatgtccaccaggtccgtgtcctcgtcctcctaccgcaggatgttcggcggcccgggcaccgcgagccggccgagctccagccggagctacgtgactacgtccacccgcacctacagcctgggcagcgcgctgcgccccagcaccagccgcagcctctacgcctcgtccccgggcggcgtgtatgccacgcgctcctctgccgtgcgcctgcggagcagcgtgcccggggtgcggctcctgcaggactcggtggacttctcgctggccgacgccatcaacaccgagttcaagaacacccgcaccaacgagaaggtggagctgcaggagctgaatgaccgcttcgccaactacatcgacaaggtgcgcttcctggagcagcagaataagatcctgctggccgagctcgagcagctcaagggccaaggcaagtcgcgcctgggggacctctacgaggaggagatgcgggagctgcgccggcaggtggaccagctaaccaacgacaaagcccgcgtcgaggtggagcgcgacaacctggccgaggacatcatgcgcctccgggagaagtaaggctgcgcccatgcaagtagctgggcctcgggagggggctggagggagaggggaacgcccccccggcccccgcgagagctgccacgcccttggggatgtggccggggggaggcctgccagggagacagcggagagcggggctgtggctgtggtggcgcagccccgcccagaacccagaccttgcagttcgcatttcctcctctgtccccacacattgcccaaggacgctccgtttcaagttacagatttcttaaaactaccactttgtgtgcagttgaaggcccttgggcacaatgagagccagtcctccaaactttcagaaagtttcctgccccttctggcaggctgccaatcaccgggcgggagaaggaaggaggggaaggcggtggagggagcgagacaaagggatggtccctcgggggcggggatggcggggctgtcctgtaggtctgtgcggccaccgtgattgcccctctgcgcggtgcccgaagtcccgctgaaacctgccgagggcagcaggtctgaaagctgcaggcgctagttgcgcggaggtggcgcagctgctctggaggcgcagagcgaatacgtggtgtttgggtgtggccgccccgcccctggcggtttcctcgttcccctttggttaatgcgcaactgtttcagattgcaggaggagatgcttcagagagaggaagccgaaaacaccctgcaatctttcagacaggtttgtagactctcttcccactcgcagccgcctgaccccacccaacacaacccacgagcaattctaaaagttgcttaactcacgtctaaaaagtgcaaaacttcagggctgcgcgtaaagccctctagtggcgggaagaccacaggttggagcttctcatgattagaaaaatattaataaaaccccttgagcgattttttttttttttttgagacggagtcttactctgtcgcccaggctggagtgcagtggcgagatcttggctcactgcatcctccgcctcccgggttcaagcgatccttgaatgatttctaagcagttccttgggacataaagaaaaatcttttaactttttactttgtttcccaaatgttgcacagttttgcaacacattgaccttctggtttcgaacggttacaattttagattgtggtttgccaaagtcaagttgcttaatttttacaaggccacaaaaagcgcaattatgccctgcagtttaaaatggaaaacgtgttggaagataagaaaacttagtttccaactggaatggagccagcaagtttcttttcttctttgcaaattctattgtgtcattaaagttcgatggaagtatcactatgcacaactattttgtgatctaataagggtgaaaaggagccatctgtccccttggctaaggggtattaatggtttctatgggcttcactatggaatgtagatacagacattctggcaaatgtggtggctctggacagaaataataggagtctttgtattcccagggaagctttgcaacaggctacattcttactgaatatgtaatgatgtaagcacggttctaattggacacaagtatttgctaacatccgttatctaatatctggcccagacttgagaagtaggtaatgtaaaaagtttttaaagctacaagcatacctcacattttaaaagtcctttcttgattgggttcttgtgttctttagcactcttgccataaaaaataataacagtaataaacccaaggctgaaaaactgaattttaactaaagggtttttgtgcgtgttttttttttttttcaccaaaattagatggacttacagaatttttaacttaaaattggaatccaaaagccagaagatccccattatagtttatagttgtattccctggaatatttactgggattaactgcaaagcactctcagatgaatagtgtagtataacattttgaaactgaaatacatttaccaaattaatttaaccacagcaatgtgt

SEQ ID NO: 1884269 - DNA, 4001 bp, Homo sapiens
aaggagaagaaagttatcagctgtgtcaaatgctgctgacaagtggagatgaagactgagaaataaaaatcagacttgaaaacatggatgctacagatgatcttgaacaggtccagaagtgtgggaatgaagtctgtgggttcgagagagaagtaaagataaagtatttctgtaaaggagagcagatcagacttttgataatgtggttttatttagagacagtgtctcactgtcacccagactggagtgcagtggcaagatcttggctcaccacaacctccgcctcccaggcccaagtgattctcctgcctcagtctcccgaataactgggattacaggcgcacaccaccacacctggctaacttttatatttttagtacagatggggtttcaaaatgttggccaggctagtctcaaactccagacctcaaaatgatccacctgacttggcctcccaaggtgctgggattacaggcatgacccactgcatccggcctatttactttttgagacagggtctccctctgtcgtccaggctggagtgcactggtgtgatcatgactcactgcagtctcgaactcctggactaaagtgattgttcagcttcagcctctgggagtagctaggaatacaggcatgcatcaccatgcctggctacttttgagcaaatggtttataccaatttcagcagacatctagttatcaaacaaattagtagtaattttgctgccagttttcaaagtttctatgaaatgttatttgttgtactcctctgatgtttgtcttcaatggattcactacaaatatgtcagaaattacatgttaagatgctaccgaatttttttgttttcataatttcagtcactgtcaatttttttttttagttactggtagtttaagagagcattaaataggctttttattggtctgcacatctccacaaacagcaataagctctacatctggcagatggatgtgacaaataagattatgtaattaaaattttttttccaaccagttgtgatttcagagcctttctccctacatcattccatctctccattctattaggtctagcaataacgtaacttcttggataccaagtaaatcagttactttttattttttggagggggttgtttcttctgacttgtttactatttgcctcttctgtgttaatcacctaattatgtttaccacaattcttttcattaaactatgttgccttacaaatagtgcaaaaaaaaaaaaaaaagtcaaccaatcacccgaataccaccactctcaactaacggttgtttggtatacttcacgtttcttctctcaatgtacctgcagcagtacataaaatcaaatttgtagcaatttcacttaacacacctgagaactttcacatgaattttctttcaccaatggacttcagcgaggaagaaacagaggagggaaaagtgagagataaagagagggtgggcagggcaccgctgggtatggaaaacgttagaaagggatggaaaacgttagaaaggggtgaaaagccgagcgcagtggctcacgcctgtaatcccagcactttgggaggccgaggcgggaggatcgcttcaggccaggggttcgagaccagcctgggtaacacagcgagaccctatctccggaaaaactttttttaaaaaattagccgggtgtggtggtgcatgcccgtggtgccagctacttagagggctgaggtgggatgacccgtaagccccggaggtcgaggctgcagtgagccgtgatcgcgtcactgcactcagactggacgacagcgcgagacctgtctcaaaaaaaaataacaaggggtagggtggggcagtgagatggttcagcgttgttcccaaggaactcatctccctaaatttccagtctcaagcgccgctttcattccctgccccgagcggcgctccccgctccgtgcacgcatctccgctgagggccgccctgacgcacggccttctgccttgaacacagaacccctcagcccttcctattagccgtttctggccgggactgcacgcgctccttcctgcctcggggcgcagggtgagacttacgtctaaagggcgcccggcgagctcgcagcagcccctgccccgcggagggccggtggcgcgcggcgtccggtgaggggcagcggcccgggctcggttccggcttccagcagcggcccgaaggcgccggagcacgctccccgctccccagaacgcagcttccgcggctgcagcccaggcagctcttcgggaagcgtccgcccgtggtctcgccagggggtttccgacctccccgcccgacagcgcaggggcgggggccgcggccggagagctcgcccgagagcaccccctcccgctgcgcctctgggcgcacgcgcagccgctgcagcctcccttatttagtccgcgatggcttccctcgcgccccaccgtcctcttccggaaggcggctccctccctgcgcagcccggagcccctgagatcagcctcgagcaggcgcccgagcgagactatccctaaacgggaacggcggtggccgactcgcgagtgaggaaaagaaggaaagggcagactggtcgcgaagagaagatccaggcctcagaggaggagaaaggccggagccagccgaggtttgccgagggcggtgttccggacccgcgcggtgcggggaggaaggccgagggtgggagaggaggggcccggcggaaactgccgaggtttcccgaaggcggcagcgtccgagttgcccggatgtagttggtggagcggcagcggcggcaccagcggcggcggcggcggcgggaggaggaggaggagaagaaggaccaggcggcggcagcagcggcggcggcggggggaggaggggaggaggcggcggagcaggaggaggagaaggcggaggaggcagtcgctctccgcggggctgagccggacgcgtcgtcttgcccccctccccccggttcgcggtgccgccgtgtagttggcgccgctgccccggctgagagtgagcgtggtgtcgacggagggagatggcccgggagcgccggcgccagtaactgggagctgatgagagtcgccgagggcgcgccgggcccaggtgccggggctgcccgccgcccgccgccgccgccgcctgcgcgcccgcccgcctttcgcggccgctctcccccctccccgacacacactcacaggccgggcattgatggtaatgtatgcgaggaaacagcagagactcagtgatgggtaaattgtcttttcgtttcgggccgggcggcggcggggggcggcggcgggggggctgttcctccttatctggagctggccgggccgccatttttgttgttaaccctgatccggatcgggttggggaggaggagcggccgcgcgggcgggcgggcgggaacgcagtgtggcggggagcgggggcccggcttcgcggcatttcgccctctccggcccttccggaggctccgggtttgtgccgtgtgcgtgcggggctcggcgctggggcgctcggtaggtctcccgcggggaggggcggcgggggccccgttttcttcctccccggccccccacccgcgccgtgtcttatgtcgctgccttctcttcctgtttttcagctgtcacgaccggaggggggactcgcagccttaccaggtaccagccgaggccggggtggagggattggaaggggccggagggggaagggagggactgctactcgagcgcaggcctcagaagtcgatacaggcccttcggtgcaacacatctgaaactagcaccgcggatccccttaaaattccaggtttggttcctttagcgctctccagcaaggtttagtgacttattttgacaggtgactggagggagttcgctgatttaggaaaaaagaatcatttgcagccagaaagacctgactcgattatttgattatttgcgagtgaaggaatcgatgggatgagatgataggtgacttac

SEQ ID NO: 1884270 - DNA, 4001 bp, Homo sapiens
ctttccttctgtcagacataattcctcagtttagccttccacctctatacagtctgataacagaccagcctttattagtcaaatcagccaagcagtttttcaggctcttagtaggtgtcagtgaaacctttatatcccttacaggcctccgtcttcaagaaaagtagaacggactaaaggtcttttaaaaagacagctcaccaagctcagccaccaacttaaaaaggactggacaatacttttaccactttcgcttctcagaattcaggcctgtcctcagaatgctacaaggtacatcccatttaagctcctgtatagacgctcctttttattaggccccagtctcatttgacaccagaccaacttagactgtgccccaaaaaacttgtcatccctatcttttgtagtcatactcctattcaccattctcaactactcatacatgccctgctcttgtttacactgccggtttacactgtttctccaagccatcacagctgatatctcctggtgctatccccaaactgccactctaaactcttgaagtaaataaataatctttgctggcaggactatgctgaatctccttaggcactctctaatcagatgtcctatgtcctcccaattcttagaccttttatacctgtttttctccttctcttattccatttagtttctcaattcatccaaaaccgtatccaggccgtcaccaatcattctatacgacaaatgtttcttcttacatccccacaatatcaccccttaccacaagacctcccttcagcttaatctctcccactgtaggttcccacgccacccctaatcccacttgaagcagccctgagaaacatcacccattctctctccataccaccccccaaaaattttcgccgcctcaacacttcaacactattttgttttgtcttattaatataagaaggcaggaatgtcacgcctctgagcccaggccaggccatcgcatcccgtgacttgcatgtatacatccagatggcctaaagtaactgaagatccacaaaagaagtacaaacagccttaactgatgacattcaaccactgtgatttgttcctgccccaccctaactgatcaatgtactttgtaatctcccccacccttaagaaggttctttgtaattctccccacccttgagaatgtactttgtgagatccacccctgcccaccagagaacaaccccctttgactaattttccattaccttcccaaatcctataaaacagccccacccctatctcccttcgctgactcttttcggacttagcccacctgcacccatgtgaaataaacagctttattgctcacataaagcctgtttggtggtctcttcacacggacgcgcatgaaactaacaatgtattggggagagaaacacacatctgcaaatatcattgctgaaaagaaatcattgcattaagtgctatagttaaagcgtataaacccaacactgaacacaaaggagggaaggactgggtctgacctggagagcagcagaggagaaagtgcgaaatgaaaggtacccagcaacagacaaagggtcacacttggccccagacatagtgcttcttcctcaagtgcgaagggagtattgcaaacaccagatatgcagtgttatctgtatttggaaattgtttatattcaggccattcacttcattcagtctggcaatttcattcaattaatctcattcatttcttaattaatctcattcattattctctgtaaactccacgagagcggagactttgtgtcttcttcatcggtagatcccccatgcctactggcactagtagttgccctaaattcacttatcaaaggcagcaagaataactgggactcttctctcttgcttttcacgatttccagcagggcacaaaggcctacagtccccacctgaaaaaaacagacttgactggaggcagcgcctcttcttccaaatacagccccagctgacgcagattagcacaaccgcctaagcggcggaactctggagagtgcggaacctaggatcctaggaaactgaaggcaacggaacctgggggcgatggaatccgggagcggtggaacccggagcctgtagaacttgaatctagaggaacctgacagcggcgccgagggggccacccggactctgtttggaacggaagcacagtgtccgccgcttcctggttgcgggtcagcgcccaggtcctgggctggccgccgggatgttgccctacacagtgaacttcaaggtgtcggcgcgcaccctcacgggggccctcaacgcccacaacaaggcggcggtggactggtgaggacgccgagcttccaggtcgccaggatcggccaggaatgtgtgagggggaagggggaaggacaagaggtttcaccccctggttagtttggcctcgctaaggcagggagccgccctcacgcaatgagcttgctttcagttggtggatttttgttgttacaaaagtgataatagccccgtgtgggaaattcccccatgcaaatacatttcccctctttctcgcgtatttctctgctgttttctctgcacctcgcccttttgccgttccattcctctctcttttcctctcctccagcttccaggcttctctctctccaccattaattccctgtgcactttctctttcccatcctgtcttttctttttcgttgtcttgtattcctgttgtctttcaacaatgtgccagaccctgtgctaggcgcctgttctttcacctgtccttttcacctcttttcgggctcctcctgtgtagaacattcctgccttcaacaggtcgtctttattactctctcctttcactataaattactactgcagctctgaaaactactcattagacaaatgtaaagcaaaattctgtggctgtgggatgttgttaggaggactgaaacgtcttgtgcagtgtttgtcgttttatttagttggaaggactaggattagtcgcagtatccccaggcacattgtggatactaaggattagaaatcggataagcgaaagacgtatgcctacaagaacagtcagagggcacaagttcctttttatgtcctcgggtctctattttcatatcttttagaactttttttatccgaatgaaaagtgaatttcaacaagcattttaagcttagccagatcttttatttaagtgggataatgataaatactggcctttgggtttaaatgattttattaatggtggtacatatgaattagacttatcatttatttaggcttggcaagaaagaagtcgtcctgctttgttctgtacttaaactttaacattactgttttgctaggggctggcaaggtttaattgcttatggatgtcattcacttgtggtagtgattgattccattactgcccaaactcttcaagttttagaaaagcataaagctgatgttgtaaaggtaagtaaaatcccactttgacgctaacatgttgtctagtctaaagtttaatactgtgtatcactaagctctcattaagtcttacgtgtaagtgttgaatagcttttaaatataacaacctatttggggtagcctagaattttcatatatatgacttaatgtcaatacagggtgagttattaaatgctagttgttagatcattttaaggcagatgaaagttctaccatttacaagaccactcagtcattccttagttttgagcacttaccatatgctatggatatggagatgaaagccctcagataattctccatcttataaggaagactcacagcgtgatagtgtgataagtgagacttgcgtaacacgctgtgagaaaacagaggagctgcatattgcctggttgtgaggagagtcacagaagtctacagtttcaagactagtagacagtagttagccaagtaaaaaattgacaaggagcattgcagggaaaagcaagaatatacacagaagtaagtagcgtgccataaagatggctaaagat

SEQ ID NO: 1884271 - DNA, 4001 bp, Homo sapiens; identical to SEQ ID NO: 914195

SEQ ID NO: 1884272 - DNA, 4001 bp, Homo sapiens; identical to SEQ ID NO: 914198

SEQ ID NO: 1884273 - DNA, 4001 bp, Homo sapiens
gtctcttcacttcatctctctatgaggtgaggatgaacactgaaggaagcttagcagggaggtacaggccagaaagagaacatgagaaaatgctatttgtaatacctcctaagtttaagagtaggtaaaatgtgtgatagagctggaaagtttttttttcctttctggtcagaaatcagggtagctgtaaaaatgttggtggggtggggtcaattccatagtctatgacctgattcggtaggcgactgaaaaacattgtacaactcttaaaaaaagggaggaagaactcacacttaaccaagcaaagcaaggacaccgtgttgacatacacaagtttcggttaacatggtatcaaggaaagcgaggactgcctgtacttaaaatgatcattaagactaatgattctagttttggcattgaggatgaatgcagatatatagacataatgtatagcaaagaatatttacagtcacatttcatggaccaataaataacgcatttacttctcaaaatgcccaagaaaatgtgggagagaaaatgttcatttatattcaagattaaactttctaactttaaatcatcagacttcagctgtaaatttatttcagttgaaaggtttgaagacattattaatgaatattctaaaattccggaaggtgtttaaaagataattttaacctaataaaaaaatcctgccatagaagtgacaaaaattataagcataaatttattgagcacctactatgtgtcattgtgctaggtgatgtactacgttatttccaatactccggtcacgtttcagttttctcaatttctctatcaataactgctacattgttaatttataactatattacttgaaatacagctcagcttatttattccataaagttggtcccaaagacgtttccttattcgaaggaggtgggaagcaggaaggaaacctaaatctaaattctacttaatactgaagacgactttcttgatatttgtggttatctgtatggtcttttcagaaatcccaaaacttgtaccaagtcaaggataaaataagataaaatcagcaatctatcaggttcagagatcacatctgtcagccgatgcttcttgccttaaggtcctgcacggcgatgaccgctcatttaggaaggaattcatggcctgtggataccttagctctgagtcctgccacctaggatcccacggttctacgcgaggaagagggcggggagcgcggaccgggtgtgggaggccgaggtgacagcaggtgagggccgggtgcggatggggaagtgagacaagcaccgtgtgggtattactcattccgctctactaaggaggctgctggcaagcggaacttctagcctctctttcaatccagctgaagttcaatctcattgaagtcacttcccatcccggttcgcttggggggaaaccaggcgtccctggaagggaagggaagggagtccgggctgcgcgggtcaggtagcctctctccggtcgccgcgtgtcctcgccgtccccaaacctgcccttcccctcatcaagggaactccccggggagtccagaccgcgatccctttccttggccccggggtgcggggggcggacacgcgaggcgtgggactgatggtagccctgcctccaggaagcaggcaggcggggacctctgggcgctcggaggggcagctccgagggcacagggtacagggagaatcagccagatccctccctgccccgggcagccgcggcgggtgtggccagcgcggaggcaggacgccgccgagcctccaactttacctttccaactccgacagcccgtcgcctttctgaccgcgtccctacggtttcccggcatccgcctccctctccccaccacacctgaggaaaacttttccctcgcccctcaattcaaattcagcagtgcccacggttgccgcaaaccgcccggtccctagcaacaaggttccggccgtagagcgagagcctctaggtgtaaggaaggtgatgtcgtaaagccgggagtgtcgtaaaccaggtgcggtggggaggggggaggggtggaggcggaggggtgggggggaagggggagggagggggaggaggtgactcgagcatttagacacaagcgagaggatcatggcggatggccccaggtgtaagcgcagaaagcaggcgaacccgcggcgcaataacggtgagtggcggaggggaccggggagcggcggagtcagggggagctgggcagccggggcgcccccgggggtgaggggggcgagccgggctgggggcagccggggcagggacggcaaagtggagtgggaaagtagaaagtagtgctctctgcccccctccgctgccgccgctgccggagccgcgccgcggccgctcgctctccctgaaccgttatgtctcttacctggtctctctccgcctagcggctcccgccgcccctgccgcctccctggaccgttagccggcgccgacgccgccgcatccccggcgcagggcgggcggccgggacgcactggccacttttctggtcccgggtggagcggctgttgcttctttccgcacttttccccactcttgtgcccttcggcgcctccctctccccctcctcctggccccctcagcgcgattctccctcagcgcccaggcccccgggagccgcggaacaaacttgtgcccggcgctgaccgtgcaaagtggcttccgcgcgccgcggccccggccggcgccgtcgctgtcgctcgggccccgcgactcgggccgggctgtgggcgcgcggcaggcgggctgcggcggcggcgggacggggcggccgcgggttgcgtggggtttgtgcgcgcgtgtgcgcgggcgccggctgtgcgcgccgcgggcggacagggttcggccggcggcggtaaagttgggacccgcgggccgggcgcgctcgcgtaacggggattagaggcgcgggggcgcgggtccctaagcgcccctcctccctggcgcctcccgctgcccggcccagagccccggcctggggactccgcggcgagccccgcgagtggggtccacgtttggcggggcgcggcggggcggcgcggggaacaaggcaggaaaggtacccacttaacgccgccgggagccgcgcggatgggggcgagctgggcggcgggtgtgtttgcggagttgttacctgggcttagagaccgggaagcaccacagacagatccccctcccggggcagacgaggtctctgcgccgggatgggccggtgtgcgtgcgcctcgcgcttttctctttcggtttttggggaagttgttacctgggccggacgcacggagcgctgaagccggataatggggcttggatggcgctctgggtctcgggtggaaggagggtgggggagggggcggacggaccgacggacgcgcggggctgctacttgcaccgcagctgcagtgtttattgatttgtgctgctgtgccaagggaaacacacacccctctgcctggcgtgagagttaaaaaaaaagagagacagcccgagggatcgagacctgaacatgtggtggtggttgcacagtcgccttttccagtttggagagacgttgtaagttgattgtatttctggttatctcggggcgatgctatgctttctctccctctcgtgcagcagcgaaatgtctgctgattgttattgtctggacagttcctgtggcgagaggggcgagacttgtccgcccgggggcggcgggagcgcagggagagcagcccccgcctgcgccgccccggtacctgtttgtataataatgggcggcaacggccctgccgccggccgcagcccaggctatataaggaattacacgtacatttcggaccgaggggctcgctttggttcctgcgttatttttaaaacgacttttaagagaggggcaataaatgcgtctataatgggaccgctgcagcgtcgagaaaacgaggaaatacgtgtttaggagaaaactctct

SEQ ID NO: 1884274 - DNA, 4001 bp, Homo sapiens; identical to SEQ ID NO: 914202

SEQ ID NO: 1884275 - DNA, 4001 bp, Homo sapiens
ggacacacagttcccagtgagtcctgatggcaccatggaccttacaggggctcagagggggaaagcagcttgcttggggctacacagtctatggatgaacagagccagggctgaggggacaacaggaaactctgttcatgggggcccgagttcccatcctgaccaatcttgggcaagtcattcacagttgagtttcctctgaaagggggatggtagcggcacctaacttaagacaatgtgacagttcaatcagggaactgaattctcaatacctaggaggacccaccacagtactcaccacatagtagacagtaaataagtcatagcttcttccaagaccccagaggtatccaatctaccccattacctccctggaagatgaacaaagagagcaagggcctcagagacccaaggactggagcctagggaagacccaggaccctggtgggctttctgacttgctgccatgcttgcacagaaggggagggttgaaatgatccctggttccatgctactaagttgagcctacttggctcctctgccctctgcagccacttcctgggtttcagatgtaaatactggtgggagagtagggggctgggatgtggggtagggggtggagcttctggacaggagactttgaacatgagtggtcacctccgaggtcacctgcatcccccaattcctggaagtgggcaggccctggatacttattgaggaatctggacagaaaggttgagagggctgggcgtccagacctagctggtcattaaggcaacaagaactggtctaattgtgggctgggctggattatcacatcccaaatccttaaatacccagaaactctcttttgggattttggacctgggtatggggtggctgctgccactgctgcaatgctgtggattgctgggagtgggacagctgtggctgcagccaccgttctgcaagcttaattcctaccttcggaggtttctcaggtggccctggtgtacctacctgtgaacttaggccacccacaggctgaggaggggctcaatcacacagcaatgtgctgggaccatgactccctggtgtccctagaggtctggaagtgctttcataccacccaccctctccagggatgctcagctgccacctacagggagggcgggggtggaagagcagcagtcatcacagtccatgtccatgtgacaggtaggaagactgaggccccaaaggagtgccttttcttgcacccaatggcatagggaggcagaatttcccctggggaaaataaaataacgcccccactccgccgcctgcgcccccacacaccccgtcccccacgcccgggtggacctaagcagcagttttctgagctttcaggaattccagactgagttcactggctgtgagactagcggagccttgagaatgaattcaaagctggcaaattcattttgcctcctctccctcggtggtggaaggagtgatctctccggctctgaaggagttcaagccgaggtcagcgaagccctcagaaggatgttctaaaatgggggtggggggtagtgctccggcctgcttccccggttggcccaaggtccgcgctgatcaccgcccaagaggcccaggagacccgcaaatctgtgctgcacgtccgcactcccatgcgggcctcgtcaatcaggaggcggctccggccaggcctggacatcttcggcccgccccaggccccgggggagacccccgcctgggccgcctccgggtgcccgccccccggcggtgtcattgttctctgacgtcacgcctcagccccgcccctctccccccacccttcctcccccacctccggctccccgcgcccccgaccctgcagcctccgaagccccggccgtgcaaggctccccccgcagcccggccggggctgcgcccccttgcgctctccccaacttgcctttgttattccagctcccttcctcgcctcgcctccgacacggtggcagcctgcaaaacgtggagcgcggagtcactgccacacctggaatccgaagcgggctccgccggctcccggccgaagccgcccccgcctgccggggaggggagcgcgtgcgtgggcggcgcgtgtgtgtccaaagagggctgcgcgggcgccaattatgattgggactgggggtgccgaaaatcaggggtggggggcctcgaggaaggggtatggaagaggaagtgggagaggagggcgtgtgtttgtgtgtgtacgttaacgtgaggatttagtgcccaggggaacgtttcgtgttttgttttttgattgtatgtggggttgtgtacagcgatgtgtgtgtgtaactgcgtgtctctgagcgtgcctgctgtggccgtgtaagcgggcatctttgtgagggaaagtaagcgagtgtgtgggggcgcgtttgtggtttgggggggagcgtgtttgcaatgctgagggagcgaacgtgtgtgccgttcttgtaggagtttccgtgagagtggcagtggacgtgagccaaagtgggcgcgtagttggatgctctcggggggggggggtgggtcggctaggggaactcccgcgagtgggtgcacccaactgcgcctcgtgagtaccttagctctccgctatctctggcagtgcccagtccggggcagagggccaggccccagcctagcagctcccacgcagcccgcgcgcacagcgccccgggcgctccgcgccgggcctaggggaatccacgcgtctctggactgtgctaggtgccgcggatcaactgtggccaccacacccccgctcccccacagctgtcggggggccgcgctctagtctccctcaaagtcacccttggtggtggtggtcctcttcccaccccaaccaccagtccccgggctgtaggaacaattccaaagtcaaccccaggggaaggctttggaggtccagttaccaactcgcttaccccaattcgggtacctgacagcgcccggggccacgagtgcactccaggcgggggcgtgccagcgcggggcaggggctctcgggtgagcagtgtgattttggcttcctccccaaggtggtccctacctaggctcagcatttgttcccctctccaaacttactggggctggggcctgcaggggggctgggggctgcagggggcgtcagggagtagcggagggagtagggcaaggagagaggtgagtggactggtggcgtagcggggaaccaggagccaggagaagaaaagctgggagagcgccgagaccgaggagcgaggaagagaggaagagaaaggaaaggaaaggcgagggagagaacgaggagaggcgaaaaggaaaggggaaagagagcgcagagcgcgagccaagccgagcgccggcagcggcggcggcgcggcgcggcgctccactccggcctgactccgcaccggcttttgcgggcggccggcggcgcggggccctttggaaatagaatagccaatgtaatctgacacttcaacttgctcggctccgggcgagttgattcacttactcaccccctaacgccgagttccttttcactgtctgtggacattaaaaaagcgagcggcggcggcgggcgccggggagagcgggcggccgggcggcaggcgggcgagcagcgatcgggcggccgagcgagcgagcaacgccggcgcagcgcggtgaccccagccccagccggcgcggagcaggagccggagccgagcggatctcggcgccctcgctgcgctcctcccggcccgagcctgccctacccggcggtggcggcggcgcgtcctccagcggcggcagcggcgctcgcagcgcccggtaagtttggggccagagccaggcgcccgctggctccggggctacctcccgctccccggggactctcggggtgcaagcgtggggattgggtgctggggtttttcccttaaagtgtcccccggagcggggcgaccggccggcggcgcgggctccgctccgctctccttggcggccggggg

SEQ ID NO: 1884276 - DNA, 4001 bp, Homo sapiens
ttgatatggaggtagcgttgaagtagtctctgagaatgaatgagcagcttaaatctcagcactgtctctgaataaggcaagggaacaaggagaagattaccctggagtgacagacaccaagaaaactgttaatggtgatgaatggacccatatttaaagtgcaccaggaggctcagatgcagggcagtattcggaaaaaaaaaagtcaatatctgcatagagaataacttccaaaccaaaattgatttcagttttgccatagcttagtagactgaaaatagcaaggattttaatgggaaaaattccttggatcagattctataattgccatggctagatctgcagtatcagacaggttatttaacttccttaagctccaggttcgtctgtaaaataggacaataagttctatcttgtagggttgcagggattagcaatgatagatgtaaagtacccaggattgtgctacatattttctgaggtcatggtgcttattctattgtcagaacagattggacagaggtggatttctgaagaagcaaatgcagcttcagttttaggacccctcacttggattggtctctccaagaccctgtgcttaattttatacattttcttaaaagggtgcctctaaaatgggaaagttttaggccttatatagcctggatccacacctgttttggagtcagataaaagttgggtatggggctctgtgtgattctgtatagttttctaaattttctgagcctgttttctgacctgtaaaatagagaaaaccatgtctatcttacaaggttatttgttggcctaaattaaatttagaggcagtacactgctatggagaatgcctatttgagtcagctctaacttacctagctctgtgacctttgacaggctccctttgctcccattatctgtatcactctcatggcattgttttcaggattgcattgtctatgcaaagaataaggcctggcacatcataagcactcaaagtattatgtttctttttccctattctaactcagcattattggtgcttcttatatgacttccctctcattttatcagatgtgatgactgaagcccaccacaaatatgaccactctgaggctacaggatcctcaagctgggatatccaaaattctttcagaagagagaagctggaacaaaaatccccagattcgaagacactacaggaagattcacctggagtgagacaaagggtctatgagtgccaggagtgtggaaaatccttccggcaaaaaggtagtctaacgttacatgagagaatccacactggtcaaaagccttttgagtgcacccactgtggaaaaagcttcagggccaaaggcaatcttgttacacatcaacggatacacacgggagagaagccttatcagtgcaaggagtgtgggaaaagcttcagtcaacgaggtagtctcgctgtccacgagagactccacactggacagaaaccctacgagtgtgctatttgtcagagaagcttcaggaatcagagtaaccttgctgttcacaggagagttcacagtggtgagaagccctatagatgtgatcagtgtggaaaagccttcagtcagaaaggaagcttaattgttcacatcagagtccacacaggcctgaagccctatgcctgtacccagtgcaggaagagtttccacaccagggggaattgtattctgcatggcaaaatccacacaggagagacaccctatctgtgcggccagtgtggaaaaagcttcacccagagagggagtctggctgtgcaccagcgaagctgctcacagaggctcaccctttgaccactttcctgaagagaagttctctttatgaattaagagtacaaaatcctctgagatgaagcaacctatccagttctatggaatgaatggagaatctttcagaaagaccatcattgggtagggcaaactgatttttttcctttcccccaaaagagtatgaaaaataaatgtcttgtttattatcattatcatgtatgttttataatttctgtcactttattctgacctgatttttcaaggtacccccattaatctggtgccacactagagattgttctgtgtatacccaatacagattttaaatttgtagttgacaccatcaggcttttataaatgtaaaaaatcagcccctcatcaatcccaagttatttttcttccttacatattcaaattaatcttgttttgccttcaaaaccactgggcaaaatccatggggcaaatctagttacctttataatcttcttgttgaacatttcattacctggatgatacccccaataacctattgtaactaatcactcatgtctatagcaaggggcctagccttttattacaaaagaaaatttctttccaagcctgcacagccttagtttgtgcattgagacatacttcagtcctccactcctaactaggatagagataattcacctgtaaccaaagagcaaacaactactgtctgtgcaatttttaaaaatctttaacccatttctccccatctactaaagggactcctacattttcagagaccttcactccctctttggtaacagcagcaatatcttggggttgggttatctagaaaggatataagtgttattactgaacccagacttgtagtttgtagtcaataatgaacttccactttccaacaatactatcctcttcctcctgcacacacaccaagaaatttggaattctaacccatccttttttctgacctccaggggatgagatttgaagaaggctgcagaggagaaattggttttgaggggaaatttccatttccattttttaaaatcttagccatctctataatttttcatactgagcatttatgtaagtgaaatgatgaatgatagagattttggttttcttggtaagacaccattccatcctttctagtggatcctataaatcagtggtccccaacctttttggcaccagggaccagtttcataaagacaattttcccacagagggggatgattttgggatgatccaagcacattacatttattgtgcactttattattattacattgaagtatataatgaaacaattataaggtactcaccataaggtagaatcagtgggagtcctgagcttgttttcctgctactagacagtcccatctaggggtgatgggagacagtgacagatcataaggcattaaattctcataaggagtgcacaacctagatccgttgcatgcacagttcacaatggggttcacactcttatgagaatctaatgctgccactatctgacaggaggcagagctcaggtagtaatgtgagcagcaggcagcagctgtaaatacagatgaagcttcgcttgctctcccaccactcacctcctgctgtgtgccccagttcctaacaggccacagactggtactgatccatggcccagggttgggaaccccctgctataaattattgcttccttaatcccaaaaagcttgtaatagtaaatctttaccatgtagagaggtaaatttcaaaggtctttgagcactgaaacaatttggaaacactggattctaataatacaaaaatattccaaagataccacaataacatttgaagctgtatacaagaatgttcatgtcatcttcatttataatagccacacacttagaaatgtccaacaatgggtgagggataaagaaactgtagtatatccatacagtgaaatacaactcagcaataaaaaagaacatacacgtggtacatcaacaatatggatgaatctgaaagttttatttgagttgaagaagccaaatacacaaatagtataattccacttatgtgccttcacagaacaggaaaaactatgtgtgaggattgacttgaaaggcacgcaagggaagtttacagagtgaaaacaatgttctgtacctgacatcaggcagttgatgcaggggtctaaacaattaccaaaattcattgaactcg

SEQ ID NO: 1884277 - DNA, 4001 bp, Homo sapiens
tctagggagaaaaatatgacaatttctcccttactaatcacggaggtccctgataggcggcggagttgtaacttgaagacctcacagcaggtggagaggcagagctgtgaattctactctaatttctggaatccccggcgacagagtccaaccccaggcagcaggcgccatgtaccccagggacttttaatgtgtgtgcagctgttgagcaagaataccttgaacttccaaatgatgtgctggcatgctggtagggaattcctttgcagcttgtgttccaagttggaagtgagtcctccaaataaaaatttaaatgattctcctggtcatcacagcatgtagcagaatgtgcagttgtcaagaagaaccaggtgcttaggttgacaaaacaaagaatggtagcatcatactattatttcattaaatcagaaggccagcattttgataggacaaattagagggaaacaaggagtatgcattgaaccactgcatttcttaaaagtataagaattcagtaattaggatcctgaagtaagaagaaatattttttttaaaaaatagatcatgtgggccaggtgtagtagctcatgcctacatgtcttgggaggccgaggcaggagggtcacttcaggccaagagttggagaccagcctgggcaggataatgagacccgatctctacaaaaaaaagttaaaataatttttaaaaattagccaggcttggtggtgcttacctgtagtcctagttatttgggaggctgaagtgggaggatccgttgagtccaggagttcaaagtcacagcaagctgtaattgagtcactgtactccagcctgggcaacagagcaaaatcttgactcagaattttaaaaaaattaaaaaataatttagagcacatacaagaggattcctaggatctgaaagagcacttcaatctggtcaaactctcttcctttctgttcaattttataagcattctgaccagctctttagtgattaggaactagacaactgtctaatgtaagagcatacattttggatccagaaagtcttggatttgaacctttgctccactttgactccttattttctgtgggtttctgggcaagttacttaacctagttggagtgccttgggcttggagtccagagtaggtctttcttttccaagaattgacaagtgtttacacttggtcagaactggtattcttgtatcttcaagagcaagagaaaggcgagtctgggtctggagcctcctaagaattgttcagtggtaacaaatggactctcttgttaagtctttgtaactacagataactggagagctgattggctccaaccaatcatgaaggctgaaatgttgttttcttagattctgaattcctctggggcttggagggaagaaagtagtaggtggttaggtggggaaccaaaatggaagatcccaattacatgccaagaccaaagtgtaaacaggagtgactattaacttgggattggcaggaagagatatatgtttatgtgttctctgctttcccacatcctgcttcctcctagactcatttgtgtgtggtcctggtacctttgggcccattttgcagtgatattttagtaactgacattatgtcaaacaatctaggtttcttacattcacttatgtctcaacaactgttgactttttccttctcacatatcaattattctgccctttcctgtttgtttctgtttgtttttctccctcaggtgctcaggaacagcccatggaagaatcatatgaagaggtggtgactgaggtcgtaagcaggagtggacatgtttggatttccaacagctaccctgctggactgtcatggaagatatgcccagaatgtagcgttcttcagtgagtgagtcagttgatggctggatgcgctcagctcacagatattcagtgtccctgttctcagcactggtcggcagtctgaggaagcagaggagaccttgctttggtagagcttgctgttcctagggttataagaaaagcctgtgagctggagttagaagtaatagtagaaacagagcaagagaaccatcttgatatggaggtagcgttgaagtagtctctgagaatgaatgagcagcttaaatctcagcactgtctctgaataaggcaagggaacaaggagaagattaccctggagtgacagacaccaagaaaactgttaatggtgatgaatggacccatatttaaagtgcaccaggaggctcagatgcagggcagtattcggaaaaaaaaaagtcaatatctgcatagagaataacttccaaaccaaaattgatttcagttttgccatagcttagtagactgaaaatagcaaggattttaatgggaaaaattccttggatcagattctataattgccatggctagatctgcagtatcagacaggttatttaacttccttaagctccaggttcgtctgtaaaataggacaataagttctatcttgtagggttgcagggattagcaatgatagatgtaaagtacccaggattgtgctacatattttctgaggtcatggtgcttattctattgtcagaacagattggacagaggtggatttctgaagaagcaaatgcagcttcagttttaggacccctcacttggattggtctctccaagaccctgtgcttaattttatacattttcttaaaagggtgcctctaaaatgggaaagttttaggccttatatagcctggatccacacctgttttggagtcagataaaagttgggtatggggctctgtgtgattctgtatagttttctaaattttctgagcctgttttctgacctgtaaaatagagaaaaccatgtctatcttacaaggttatttgttggcctaaattaaatttagaggcagtacactgctatggagaatgcctatttgagtcagctctaacttacctagctctgtgacctttgacaggctccctttgctcccattatctgtatcactctcatggcattgttttcaggattgcattgtctatgcaaagaataaggcctggcacatcataagcactcaaagtattatgtttctttttccctattctaactcagcattattggtgcttcttatatgacttccctctcattttatcagatgtgatgactgaagcccaccacaaatatgaccactctgaggctacaggatcctcaagctgggatatccaaaattctttcagaagagagaagctggaacaaaaatccccagattcgaagacactacaggaagattcacctggagtgagacaaagggtctatgagtgccaggagtgtggaaaatccttccggcaaaaaggtagtctaacgttacatgagagaatccacactggtcaaaagccttttgagtgcacccactgtggaaaaagcttcagggccaaaggcaatcttgttacacatcaacggatacacacgggagagaagccttatcagtgcaaggagtgtgggaaaagcttcagtcaacgaggtagtctcgctgtccacgagagactccacactggacagaaaccctacgagtgtgctatttgtcagagaagcttcaggaatcagagtaaccttgctgttcacaggagagttcacagtggtgagaagccctatagatgtgatcagtgtggaaaagccttcagtcagaaaggaagcttaattgttcacatcagagtccacacaggcctgaagccctatgcctgtacccagtgcaggaagagtttccacaccagggggaattgtattctgcatggcaaaatccacacaggagagacaccctatctgtgcggccagtgtggaaaaagcttcacccagagagggagtctggctgtgcaccagcgaagctgctcacagaggctcaccctttgaccactttcctgaagagaagttctctttatgaattaagagtacaaaatcctctgagatgaagcaacctatccagttctatggaatgaatggagaatctttcagaaagac

SEQ ID NO: 1884278 - DNA, 4001 bp, Homo sapiens
ttaattttctctttaataaactttatctgattttcccattaaagctaaacatgctccttaccacttccaaagaaaaagttatacttaaaaaagccaataatctccctactccaaaatcccaagtgttacatcattccaaataacatcactccaaagttacacacacacacacacacacacacacacacaccacagtatactggtcgtgtgtatttctatatactatttgatatatatacttacacaaaccatggaatttgaacatattttcttatttcattctttttaaacaaaaaaggaccactctatacacatcgtttggaagtttagtttttcttttttcattaataaacgtatctatctttacattctagtaacatattactgcaaacttagcaggttgaaaaacacaaatacattatctcacaattttgcgtggttctgaagttaaggaggggccaagctgggaactctgctcagggtctcaccagcctgaaatcaggttgccagccaagccgtgtccatctggtcttaactagagaagatccctccttagcccattcagatggtggcacaatgcatttcccgatggctgtagtactaagggtcccagcttcttactattagctgaagtttgccctgaggtcctgcaggccacttaaacttctctgccaccacatggcagtttgcctcttcaagtccaacagaagagaatttatcttccaagtctgctaagagtctgcttatcttccaagtctgctgagagtctccagagtcttatataacataaccaccataggagtggcatcccatcacctctgccatattctatcagaggcaagtctctggttattcccacaaagggagaggttacacaagggcgtgacccattgaaggtaactttagtgtgttacttttctaaggattctataataaagtacaacaaaccaggtggcttaaataacagaaatttattatctggcagttctggaggctagaagtccaaaatcgaggccgtgctccctctgaaactgtagcgagagcccctccttgcctgtccctagctctggtggtttgctgtcaacccttggcgctcttggcttgcagctgcaggacttcactttccgcctgtgccatcacatggccttctcccatgtgtctgtgtctctacatttctccacctcttatatggacaccagtcacattggattaaaggcccaccctatgccactatgatgtcatcctaactaattacatctgcaaagatcctatttccaagcaggacatggtctgaggtactggcagttaggacttcaacatatctttttggaggacagaattgaacccataacacttggggtgtatcctccacggtatcaaaaacattcttctgcagaaatacatataaatccaacctagtggttcctgaggacatcagcatcacctgggaacttataggaaatgcaaatcctcagggcctatcccagacctactgaccccgaaactgcggagattgcggaaaagggagggagagacagcacactgtgttttaacaagcctacagcccattcttcttaccagctgcacagtttgactctcaaccctaccagactctctaggcagacccaaaactcccttcagggcaataaaagagcaggaagaaaattccaagcagcaggtggcctggattaccctactccttacacagggggttgagacagtgcatgtctgtcctccttttccacgccaagttcctcattgctagggcttccattcaagaatcaatgccacagaaaactagaaaagtcaacaaggatgaataaatacatgatttcttacctaattttgatgtcaagtcacaggaaggagtacagacaagtcaaccatgccaaaaaggccccacacatgcaaactcaaaggaacatcttcatcttcccttttatcatgggcacaggtctctcccaaagtcccttccacaccatccaccaagtccagttcaccagatcacctgtagccctgccctgattttgtttactttacttgcatttggggtcattatgatgtcgttgccatagggtcagggacttagtgacaacagaatgtacaatccagccatgaccaagacttgtgtttctgcagtgctgaatctcaccttactcttagagagcctcattcctttgattaaagaatgcaaatcactctacaattctgcttgttttctaatttctatctcttcccagtaattctggccagcctgcctagtttttcttgattttactgattatactccttttatgttttcaggccactaacctccctagctttgccatagtccgagatggcgactgtaatcaatacatctcattcaacacaagctacagatgtgatggaaaaacttgttttactattaccgtaacctttcaggaagtttcttggggttttgcctatacaaacatctcatataatcctgactatagcctgttgtgaccctgtctctgcttgcttcaaggcaatactctctccctccctcttaactccaacgttgagtctcttgccttaaagccattgtacacattattcctctttgcagcaatcatctatcacctgggtcaccccttgaagattttagttcctgtatcattatcactcactccagctctactgtcatcacacttggagtgcttataaatgactcatcacttttcctccttacttccaatgaacttcctctccagaagaccagagccactcacctccatccatgatcatatttgtaacttctgcattattaatccaacaatggtctcaattttaatcatctcattttctgattatcaactcctgtctttgcatctcacttcctctagtgaactaaagccaataaattgtcagctgcatcaataattcatggatcctgctactctcccactactcttcaaccttccttaccagcttacattatatggtccctctttgaatcaatcacctgcttgcaaacaccctcaactcccatatcttgctattatttttaaaaacagttttatcaaggcataattcacatacaataacactcacttattttaggtgtacaattcaattatttttagaaaatgtgcaaagctgaacaactaacattgcaatctatcattagaacatttgcactacaccattaacaaacttcatttccatttgcaatcatccctcattgctaccctctgctccacgggaccataaatctaatatctgtttctatagacttgccttttctggacatttcatataaaaggaattatacaatatatggcttatttcatttagtataatgtttttgaggtccatccatatagtaacatgtatcagtactttattccttttattgttgagtaatatttcattgtgtgaatatagcagatattgtttatccaatcataagttgatggacattttggttgtttccagtttttggctattttgaaaaatgacggctggatgcggtgggtcacgcctgtaatcctagcactttgggaggccgaggcaggtcgatcacctgaggtcaggagttcaagaccagtctggccaaaatgatgaaactctgtctcaaataaaaatacaaaaattagccaggcatgatagtgcatgtttgtaatcccagctactccggaggctgaggcaggagaatcgcttgaacctgggggcagaggttacagtgagccgagatcgcgccactgcactccagcctgagtgacacagcaagactccatctcaaaaaaaaaagaaagaaagaaagaaaaatgatgctatgaatatttacatataagtttttatgtggacatatattttaattttcttgggtatacctcagagtagaatcactgggtcatatggtaaaactgtatttagcattttaagaaactggaaaactgttgtcaaaatggcattttacatttccaccaacaatgtatgaaggctccagtttcttcacattctcccctgtatttgtc

SEQ ID NO: 1884279 - DNA, 4001 bp, Homo sapiens
acaaaaaaaattacccaggcatggtggcacatgcctgtagtcccagctactcgggaggctgaggcagcagaattgcttgaacctgggaagcggaggttgcagtgagccgagatcacgccactgcactccagcctgggtgacagagagagactctgtctaaaaaaaaattattcaaaaataaaacttttatttcaataaagcagatggaaacataaacaaacacaaataacaataaacacagattctttattaaagatgtggttcgataccaatggccaataccatctaattaggccaaaaaaatgttgaagaaagggtatcaaatataacattttacatttgtcagataaaataaataaaagtgttgaaagatattaaggcaaagtggtgtggagaattcagtgggtctagttctaatgattatattaagggcaaatatattcattctatacccacttattctggaatcacatatgcaaatccaatatgtgcataattcctgtgatgcaacatatgcatatagatctcagagaccttatatgtttatttctattttcttgatcattaaacttatccaaattttaaaggatttcctacttttccgtgtatatatgcgtgtacacatatacatataagaatgttggctttatgctataaaatatttcacatcacatctgatgcaaaaactgtgatgacatttctttttaatatgtttttccacgttaagatccctaaaaatggattctcagatgtataatttttttaaatcttgtcaaatgttaataccaactgtccataaggtttaaatcctagactaataatttgatgtacaagtaattatgcttatatatacaaggttttttttattgatttgttgattatgattatttgatgttcacggctgcatttcatcagttctctcatatataatgagtttggtttatggatttaattttggagtttcaatatttaagacattttcaacatttaaaagacattttccgctatgtgtgctatctgatgtaccacagagtttgtcttctagcaaaaggatttcttacattcattatacttacagtgcttctttcctctttgaattctctgacatttagtaaggactgaactgtggcacaatgatgtgtcacatttattacattcacagagcttttgccctatattctacaatgttcattgagacttgatttgtgagtgtaggttttcccacattcagtacattcatagggtttctctcttgtatctgttctctgatgtagtgtgagatttaaattgctactggttttctcagtcggtacattcatagggtttctcccccgtgtgttttctctgatgtactgtgaggcatgaattaccactgaaagttttcccacatctgatacattcataaggtttttccccagtgtgtattctttgttgtccaatgagttttaactttgcaaaaaaggttatcctacatttagtacattcatagtttctcctgtgtgtgttctctgatgttcagtgagtgttgacttgtggttaaagattgtcccacattcagtacattcataaggtttctcccatgtgtgttctctgatgcacactcagtgttgatgtcacacaggaagttttctcacactcagcacattcagagggcttctcccctatgtgtattctctgatgtctagtgagatgtaccttactataaaaggctttgccacattcactacattcatagggattctcccctgtgtgtagcctgtgatgttttgtgagataagactttttgttgaaggttctgccacactgactactttcacaagatttctatgtgagttctctgataatgggtaaagtggaactttttgtgtaaggcatttctacactcagtaaactcataaagtttctctactgtgtcaattctcttaaagtttgaaatcttaattgcttgtttacattcattatattcattgggttcttgtcctgtaggagctctctgatgtacgtacagtagaatgtgatggttcaattatagttttcatacactgaggataatcatgagatgtctactttgattgacttctttgatgtataataattgttgatgagtaaccaaaggtcttcccaaatgaaccatattcaaagaggctctcccctgtatgtgctgtttgatataatttttttgacactgtgcaggattgccatgttcattgctttcatgcgcttactttctatttcagttctctcatatatcctgacaactgacttttggaagaaagtgctttcacagtcattaaattcaaaaagcgtttttttttccccctctcccaacatgagatctcttttggctgccagagtctgccttataaaagtcttttccatattcattaaatccttagtgtggccccaaaatttgaagctgaacacagtattcattatgactgatatcctttccattttgattgtattcatgaggtttaatttcagtagatgtttcctcaagtttaaatgcaatgtcacttcccacatatatcacattcatgaggcacctttctcatgcagtttctattactaatcattaattctgaaatatatttcaaatttttatcatatgaatcatattactgatagagtacttttcttgaatcaacaagattaataccaatattaaatgccttccacgtaaagtctttttatgattaatcattattttgttttttattaatataacctgtctgggttgctggtgttgaatattctggagtccccagactttttctagaatagaagaaaattaatcacatctggtgaattttacgtttgttatgaattggttatacaattgcacttaaatgtggctaagctttggcttcaaatacatttctctcaggaagaaaatgcaaattcttcttaattggttatagtctgtctatttgattaactgatatatctaactatgggaaataatattttgtaataataaaagggggggaagcaagcaataaatagaaatacctgtggtgttctccaaacacaaatctttataatactttttttttttttttgacagtcttgctctgtcacccaggctggagtgcagtggcacaatcttggctcattgcaacctctgactcctgggttcaagcaattcttgtgcctcagcctcccgggtagctgggattacaggcatgcacccctacagctggctttttttttttgtatttttattaaagacagggtttcaccacattggccatgttggtctccaactcctgtcctcaagtgatccacccacctcagcctccgaaagtgctggaattacaagcatcagccacaatacctggcaaatctttaatacttgtaaggaataaatacaccaaatgatgatctatcgttgtgtcaagactaggttcacagctttttatgagtgctgatatagtcatcttagtctatcagagttgtttagtaataagccaatcctaatcaccaaatcccattttccccctttcagtattctaggttaccttttttttttttgcaaaaaaagtatttgtaaaataatattgtttaattcgattttacatcttggttcacacatctgtagtttctaccattttgggggagaacagaaaaatatctctccctcaactggctcctccatcaatcaattagaatatcagttacacataaacattaggaagacaaaaatagaggcagttatatagcagaattataagcaaggtgagaaaaagaaacctcatgcatcaacaaatatagttttttttttctagagcccctaactgcaaatggaagataagaaaggagagaattataacatctaatagtaattaagtctaactgatttaatcctcacaaccctttgagataggttatattattatccctgttttacagatgaggaagctaaggcatataaagattaagaaacttgtctaaagacatacaacttagagtagtaaagaatagtttcttgaaagcaattg

SEQ ID NO: 1884280 - DNA, 4001 bp, Homo sapiens
aagaatggaacataatactttcattaaaactgatgctaaacaaaaatattcaggttttaatctttattataaaccagagaatcccaacaaggttttgaaaaaagtgatgtggtatttttcagcccagtttttttttgtttgcttttttgagacagagtcctgccctgtcacccaggctggagtgcaatggcacagtcttggctcactgtaacctctgcctcctgggttcaggtgattctcctgcctcagcctcccaagtagctgggactacaggtgcgcaccaccacgtcgggctaattttttgtatttttagtaaagacggggtttcaccatgttggtcaggctggtctcgaactcctgacctcgtgatctgccggcctcagcctcccaaagtgctgtgattacaggcgtgagccactgcgcccggcagagcccagtttttttggaaggaaaacgaacttgctctaacttggtttcaggttctcaaaaccatctttggattttaaaaagcaaacggattttttcttactctgttgtcaatgcagcaaacacctgcctgagtcctcaagcgactcagtgtctgttcttgactctgccacaacaaaatgtgtcaatgtcaacagtcacttaacatgttaagcttgtttcctgtccaccccaccccatcccatcttttaaataaagccgaaatagataacttacagacctttcttgcggctgcacctctgattctgtaagatcaagatgggggcatccgtacatctctagttgtgctgcaatatgccagcagctcaacatcgagaacgagcgagtaacgaatccaggcatggagggtgctgtcctccacttggctgctaagctcggccctccgcatgatgccttcacaactccccaagaagcggtgctgtctgctccttcggccttgccctcctctgccgccacatctgaatgggcacaaatctcccaccatcacccagcctgtgggagtctgaacaggacacaaatcgagcctctgctcctcccatccgtgctctagatctctaatgaggtctcggcccaacaggtccgatgtcctcctaggagggcccctgcaccctcacccctcctttcccttctcaccccacaacagatgttttgctccaagacagctgggcctaagcccttcagttcgaatcctcatccaagactgaaagctcctacatcttcctgtcactttagccacaagctgcaccgtctggaaatgcccactgctactagggacacaggcgaggccggacagtgccggaggacccggggtgcctccctccacgtgcgcggcctcacaggtcagtggaaacaagaaatcccccaatccacagccacgatgacttcaaaatacttcctgaaggcatcaggccatgaagctgcgacctgcgaggacacagcaagcggggtgacgctgagcagaggcttggtgtggagtccgcgcccgcagggtccctccccgccccgcgggtgcttcccgccacctcgctcgcctctgcgtcgcagtgacaacgcggggatgccgaccacaggtggttggaaggagacagcgagattctgaggggaaagaataaggagagaagcagcatcttttgggcagaaggcccgtttccgcacggtcctgccgaggcctccgggcatccttcacctcagggaagagaaaatccaaccttacttatcacaggcgcgggacctacgttcccttcgggagcagaagaaccaggacaggattaggacgcaggccaggcggcaaagccgctccctctctcccacctccaggacaagcggcacctccagtccaccctcgctccagccctcccgtactctacccccggcatcctctgccccgaagcagggagatgccgggagccctccctaccaggctgtaccggagaaaaacaaacctggagccacaccgcgcacatgcgcagaaagcccaaagcggctcccgcgaccggggccaaaaagtgcacactacatttcccacaagtcctcgcgccgctcccttagaaagtacacgctacatttcccacaagccctcgcgccgctccctgagaaagtgaagactacatttcccagaagtcctcgcgccgctcctttagaaacggcctgaggtttcagcgccgttcggtagttagttcccagatgcaccgagtgcaatactgcaattttattcgttagctgaaataaattatgagtatttaaattacacaggtttcttatgaattacatctccctgatgatttggctgtcctcaacacttcctcgtttggcagaattcaggagtggaatttctccagacacggtcggttcctgtggccccgctgcgccgcggcggcaccacctccacttgcgcctgtggctccacttgcttggttctggtccactggacgctcaccctgagaaaacacgctggacatgagcattaccagcctgtacactgttgtaaagataactcggaattgctcttcaaattttatttgttaaaccacgtaataccatcttttatgacaaacctgcattttccattcttcaggagtatgttggatctcttgatcaaaataactttttaaaatgttcactgacagaggtaacacaggagtggataactaaaaaacgtacgttctcacttataagtgggagctaagctatgagtacgcagaggcatacagagtgatacaatggactttagagactcagaagggggctggtgggaaggaggccggagatttaaaaaactacacatggccaggcgcagtggctcatgcctgtaatctcagcactttgggaggcggaggcgggagtcaggagttcaagacaagcctagccaacatggtgaaaccacgtctctactaaaaatacaaaattagctgggcgtggtggcacacatttgcagtctcagctatttgggaggctgaggcaggggaattgcttgaacccgagaggtggaggttgcagtgagccgaaatcgcgtcattgcactccggcctgggcaacaagagtgaaactcagtttcaaaaaacaaaacaaaacaaaaaactacacattaggtacagtgtacactactcgggtgacaggtgcactaagatctcaaaattcaccattttataattcatccataaccaaaaaccaattgtactccaacagctattgaagtttaagttaaaaataaaaaataaatgtccactgaccaaaacagaagcatttttctccatttctattcctttttttttttttttgagacggagtctcactctgttacccaggctggagtgcagtggcgcaatctcaactccctgcaacctctgcctcctgggttcaagcgaatctcctgcctcagtctcccgagtacctgggactacagacgtgcaccaccaagcctggctaatttttttgtatttttagtagaaacggggtttcaccatgttggccaggatggtctcgatctcttgacctcgtgatccgcccgcctcagcctcccaaagtgctgggattacaggagtgagccaccgcgcccggcttctattcccttctttaccaccactgatgataatcccacttgttcccatgctggaaaagcatttagtaccatccacgtaaaagagtcagtttattcaagggatgagatgtatttcagaagacatcatggcaagtacagtaatgattatcatttcaagtcacaatttattttcctgctcatgattttttttctttttctttttttttttttttttttgagggagtctcactgtcacccaggctggagtgcagtagcatgatcttggctcactgcaacctccgcctcctgggttcaagcgattctcctgcctcagcgtcccaagtagctggtactacaggcttgtaccaccacacctggctaatttttgtaattttagtagagacagggcttcactatgttggccaggctggttttgaactcctgaccttgtgatctgcccgccttggcctcccaaagt

SEQ ID NO: 1884281 - DNA, 4001 bp, Homo sapiens; identical to SEQ ID NO: 914225

SEQ ID NO: 1884282 - DNA, 4001 bp, Homo sapiens
gggattacaggcatgtgccaccatgcccggctaatatttttgtacttttagtagagacaaggtttcaccatattggccaggctggtctcaaactcctgaccctctgatccacccacctcgacctcccaaagtgctgggactacaggcgtgagacaccgcgcccggcctgcccagctaatttttgtattctttattttattttattttttgtggaaacaggatctcgctatgttgctcaggctggtctggaactcctggactcaagcaatcctcccaccttggcctcccaaagtgctgggattaccagcatgagccgctgcatccagccaagattttcttcctaaggctgaatgatattctattgtatatgacacattttgtttatccatctatcaatggacactggggttacctctcccttttgactattgcaaataatgctgctatgaacatgactgtacaagtaactgagtccccgctttcatttctcttggattcagacccagaagtggtactgctggatcatatggcaattctatttgttaattttttgagggaactgccatactgttttccatagctgctgtaccattttacattcttaccaacaatacacaagggtatatttcttaatatatgggggctgggtgcagtggctcacgcctgtaatcccagcactttggggggctgaggcaggtggatcacctgaggtcaataattcgagaccagcctggccaacaaggcaaaaccctgtctctactaaaaatacaaaaattagccgggtgtggtggcacgtgcctgtaaccctcgtcacttgggaggctgaggcaggagaattgcttgaagccaggaggtggaggtttcagtgagccaaaatcacgccactgcactccagcctgggcgacagagggagactccacctcaaaatatatatatatatggaacctaagacaaaagcctgcactcacccctaatctgctaaattcaagttctctccatgatgaggtttcaaaaggaattagtgcaaaatgtatttaaggatatgaccagaaaggagaaagaaaaaacaaatggctattacacacacagcagaaaagtaacactaggaggcaaaggaactcaatgaagaaatatttcggtggcaggcggtggttcagcctgtaatccccgcactttggaaagctaaagcaggagaatcacttgagcccaggagttcaagaccagcctgagcaacatagtgatacccctgtttctatttataaataaataaataaataaatatttccaaccaaagaatacaaacttagtaaagctaatgaaggaagaacacagtgaagagctgccgatgtaagagaaaaaaagaaaatttccggaggaaaaaagttcaaagatttgcaactatttcctcagaaggaactgggaaaagggagttttgagtaataaggccttgtgcaagtttctgactcttaaggatgtgaatgtactgccttaaaaaataaactaaaaagagcctcttttctcaccacaactcaacaatcatgaaggtatccttgcaagtgtgtgtagacctctcatgcctcctaggtccagggtcactcgtccaggactctcccaatatccctgcccagaggaagcgcttcctcagactcggttccttctggttgcccttgtctcgcttctctagggtgggctggccgctcccgcactggggtcaaagatcctccgggttctctctgccacgactcgccctgatcccaaatcccagccccacggtccccacccccagcgggcccagtccccgctcgatcctgggtgtgcggccctcgacctcagacccggcccctgcccgccggccgcccctcacctcggcctcggaggctccacgctccccctctcacagcccgcacctcggcggtctctcggaggagggaggaacccgaggtacctggtagtcgtagctgaggaacttacaggcttgttgaccatctcaccatggaaactgccgcagcgctccctgggcggggccgccgaggggcggggcctgcgcgaatcccgggcgcccgccagtccagcgctccctgcgcttccggaagccttgctgctcccgcgtgcctagcgggggctcggccctatgccacgggcatcccaccctgctaccagctgccctcttgtccgctggccggactcttaccccagccttcttcaggaagacacggcgcagtccggcttccccacgaaagcgaaggtcgctgggaccgcggctgggcgtccgggggcggggccgcgacgccattgtgacgcgctcggagcagggctgggccgaggaccccgggcgctggagggcaggccctagccactgctcctgaggccctggaggcagctgacgcttgaggccgctgggcgccgcaacgtgagcccaaaggacgccccgcttcaagactggcgcaagaggaaaaaatgaaggtcgttttctgcggaggatgttaggagaacgagaactgcgggccagagaactgacctagcttaaggagcgcaggcagcctctgccgccggctcttggggagacacggagaggatggggtccccgctccgcatcaggtcctctgacgcaccccggctttccaggaggtaggactggccacaggcctccttcccagggacaaagtgcaaagcagaggctgtcagcagcgtgaccttcgctgcaggagaaatacgcgtccagttcgttttcgtcagagttctgctacatcaggcctgccgtatttgctgtacacaaatcagccaacttcccaggcctgggtgcggaggtatttgttaagcacatgcacacagttggaattagcagcctcagggatcaaaagttgtccttttttttttttttttttttggagacgaagtttcgctcttgttgcccaggctggagtgcagtggcgcgatcttggctcactgcaacctccgcctcccgagttcaagtgattctcctacctcaggctcccgagtagctgggattacagtcgtccgccaccacgcccggttaattttttttgtttttagtagagatggggtttcaccattttggccaggctggtgtcgaactctttttttttttttttttttttttttttgagacggagtctcgctctgtcacccagggtggagtgcagtggcgcgatctcagctcactgcaagctccgcctcccagggtcacgccattgtcttgcctcagcctcccgagtagctgggactacaggcgcccgccaccacgcccggctaattttttgtatttttagtagagacggggtttcaccgtgttagccaggttggtcttgatctcctgacctcgtgatccgcccgtctcggcctcccaaagtgctgggattacaggcatgagccaccgtgcccggcctggtgtcgaactcttgacctcaggtgatccactggcctcggcctcccaaagtggtaggattacaggcgtgagccaccgcgcccctgcccaagagttgtcatttctgtagcaaagcagctaagcaatattcttttgcctgccacctaaatgtgattaggtgcagcatcattaagaaaaaaaataaaaagcccgggcgtggtggcttacgcctgtaatcctaacacattgggaggccaaggcgggtggatcacctgagatcaggagtttaagatcagtctggcctacatggtgaaactccaactctactaaaaattcaaaattagctgggtgtggtggcacatgcctgtgatcccagttattcgggaggctgaggcaggagaatagcttgcacccgggaggcagaggttgctgtgagccgagatctcgccattgcactccagcctgggcaacaagagcgagactctgtcccaaaaaaaaaaaaaaaaaaaaaaaaaagccctgagacccacggtagctggcctggattacttgatgaacataaacaggttcacagaaaattgatatcagacgagttctttctgtgactgagggaagg

SEQ ID NO: 1884283 - DNA, 4001 bp, Homo sapiens; identical to SEQ ID NO: 914229

SEQ ID NO: 1884284 - DNA, 4001 bp, Homo sapiens
agtgatttccaggactaaagggagggaaaagtggggagtgactatgaatagatatggggtttctttttggtgattaaaatgttctcgaattaaataggggtgatatttgtacagctttgtaaatatattagaaacacataattttaccttctaaagtgtaggctttacagtatgtgaattatatcttagtaaaattatttttaaaaaatggatcccagacctaaacgtaaaacctggtagtctggggctggggttggggctggaactgagtactgactgaaaattgactcaggaggattctttgggatgatggaaatgttctaaaactggattgtgatcatggttgctctttataaacttactaaaaaatcattggattgttcatttataatggatgattttacggtatgtaggtttcacctaaataaagctgtttataaaatgaatccagtgaaaacagaaatcaaaacatcacatggtaaacagttggggagaagctgggatgagaatgtatcttaaaaatgaaataaaggaggataggaggtactggggtaatgaatgttatgtttcttcacctctttatgggttgtagtttgtgaaaattcattgagctgtacttttgtgatatatgcacttttatgtatgtatttcatatcacaataaaaagtttcttaaatgacatgggcctaggaagggccatgaatgagccaattaacgagttacagaagctgtgaagctcagctgtgcagctgctcttgggtctctgtgagattttctgccttccttattgccaccattttacagtaatacccatttctagagctagcctgagcaagtttctgtttcttactataaaagagcctcattaatacatccacaaatacagctactgaaatgaatgaaatccacaaatacacctccagaagggcaggggattttgtatattgctaaatccccagtgtctagaacaatatctgtcacacagtaaggtcttaatgtacatttcttgaatgagtaaacgaatgagcagaggaatagctgtagaggaaggaaggtgtagagcaagagacttgtaaacacagacatttttcaatgcagcctagctagagtcgggggtgggggtcagaggatgaataatgcctcctgggaatgtcaggaaaatgtcacagaggaggagatctgagagctgagtcttgaaggatgagtaggagtttgccagggaaagaatacaggagagtaggatagacagaaataaacacagataaaatcacactgttctgaaagaggctggcactcttggggatcctaagaaggctcatgtggcagaagggcaaggtcacagttgaggacaagtgagagataaggctggagagagaaactgggggtagatggagaggctcacctattcccagccaagacactgcaactgactcccgtaggaatcacagccaggagagaatttttagcaggggtcaaaatggctttttaggaagctcactttggctgaggcaagaagagtttctcctctgagttcatgggccatctcctctgttggtacctacacgtcctctcctgtatgtctctctctttctctgcattctcttctctctctctccctccccctgccccatgttttcatatctagatatctcttttctgcctgtggatttctttccatttttctctcaagacatcactccttgaaaatgtccctcaaccccttccagcttacttgtgcccaaacagcttcgattccatcttcaggactcattcatctccaccaggctggagtccttcataaagaagtaacacaagatttcctcttgaacaacaagctcttccgggcttcaccagttacagatgagaagcctggaggaagggggggtgtctgagccaccctctacttggcccagaaagagtgggccaccaccctccaagacctgcatggatccaatgaagcaaaaacaccatgctctcctctcagacatcctgatgccactcacaacgtgaaaggggccaatggctcagaagccactgcccttccggtctcctccagcaaatcctaatacccagttctcatgccgatgaccttccgctctgaaatgcttcctggcatccacccatcctcccaggggctggacaactaggtcagggagaaaacagcccctctaccatgctgagacagggacccctctccaggacaattctcttccctgagacaagagggtcaaacagctctcctagacatgacctcagagatgtgcagccagggccctggcccaatttattaccacggggctataattaggtttgttaacatacagtcgagtgtagtcttgttgactaggaacttaatcacgttactattgagttcctgtacgtattgctcggggtgactgttttacttgtagagttatagccaagcccaacgggaggaaattagctttggacacaagtttggaggggggttctttttcctcctgactttgtctctctctctccccccttccatgtgaaaatatttagcaaacagtgacaatgatgaaaaacagtaggaaacaaaatgttctacattagtataaaacatgaaaaatgcagaaggacccttagcggtacaacatgtgttatgctggctggcagtccattagctctgatagacatttcacttacctaagtcaaatataacagtcgagtattcattaatataagaaggggctgtggaatcagagctaccatctggctgggccgacagaataatctacaactcatgattaggtctaaggagtggggtttcactttaatctttctcattgctcgaaatttccatctgcgcagttcggcacatcatttttcttcaagacaaatgtgctgtttttcatgttccaaaattagatcagaagaaaacgattaatcatgtcacggcctgggaaaggaaacaaagctccgatactctcctgctctcgctcccagctcccgcccctccctggccctggacggttgcaagtttcgcttttccccccctcaacctctgggtctgcggcacaactttgggagaggccgccgcccgccaggaggaggagggcgggactgcagggagaggtgtgagggcgccccggggcccatgagggggcgcgcccctgcctcctcctgccacccctcccgggggtcgcccaggcgggcccgccccgcgccgtgccgcctgccccccgagtcggagtcgcgggcccggcgtgacaggaagggcccggagcccgcctcccgcgcgtcccctcccggccgccgcagccctgtctgtcaggcggctcgcaagtcataacaaatccctggcgcggggctgaagctgagcatttgccggagcgtcatggggatgatgaatgacccgtaggcctttgaagtgctctgccagttcagctgggtccgcggtgctgacagagaaatatacacaacagcgtaaccaataatgagaacattaaacattcctgcgccgtgacaggctgacagaaaaacccgggcccgcatcaatcatcgcgcagatagaaccctgacaggcggcccctcgctgacaccccctccgcgcgccctcccgggcctccccctcttcctctccggggtctcccttctttctctccgggctccccgccgcccctcctctccttccccacccctcctctctcttccttccccgctccgctcagtgtcctccccctccgccctgtcccctgcccctgcccttgggcgactgccttcagggcctctcagaggtcaagtgaggtctgggccacgtccgttctgtgaggctgcccgtgcctgaacagtgaagagatgccaccccagagtgagaagactgcagtctttgaaattcagcgttaataatttgtgacttttcacccatgcaaaaaaataataataatacaatcatttacatgaaacctcatgtggaactaggatcgaaagcccaacgccaggcccttagggaaagggagctccaggggaaccccgtc

SEQ ID NO: 1884285 - DNA, 4001 bp, Homo sapiens
acccgagtgacggtgcaaatcgaggggaacgcggcagtcccgctccgcttccctggaagaacccgcgttcccacaggcagccgccccctccctctctcgctccttccctcggctctcctagcgcagctcattccgactcggcgttccaataaattcgagagagcagccccgagttaccctggctccccagcctgcggggatggcggcaggtgggagaaggtcggggagggggcatgagtgagcctgagatgtttcttcccccatacacccatggccaggcctcttcttcgcagcctcttagccctgcttacgacccgagggggtcaaagaattgaggcgaggtttgccccaccattgacctccaggactagaagttccttggtggtgtggctcttagaagtctccgagtttggggttagggaactacagagggtggcagcctgacctccgcacgcaacacgccccgcgaggactcgcggcggcggggtggggtggcgggaaatctcccgtgttagaagttgccgccgctggtctcgggtacccggagccgcgcccgaactccgcgaccccaacagaccgaggctcccagaggtggaagggcgtctctccgacaccgagagggcaggcgcacactccaggcctgcgcgcccctctcggcgccctgggcgcacctgcgcactttactctcgctattcattttcctgacaccgtgcgcctctttcattctttttcttagagcccccaccccacccccatcccaggaggccgctcctcttttcccctcctccagttccctctcaatctcctccttcctctccgtctctctctccctctctctttttcccttcaagtcgcacccgccttgtaatcagcaacaaaagctgacataaatcacgggaggattgacaagagctgacaaataactgattgattgcggtcgaggaacattgacaattgatggaggggtggagatgcccaaagaagggggggagggaggaaaacagggtgggagagtaagaatggggggttgggggacagactgagggtgaaacagaggaaacatgtgacccccgctgctgccccaatctacgcgtccccgggcgtcacgtggccgggaagggcggagagcccagcgctcctcgcggtgttgagccgccgccgctgcgactgcccatctagcttctggtttctccgccgcggaatctgaggaaattagagcgggcgggcgggcttcttccagctccggctccccaccttgccttcttaccctggtggctgcgctgcgccgcgcgggatctcgattactgcgaaggaaaaaacactgggtgtgcaggttcccttcgcccctggagttgacagtccggccggtgtccacactcccaccggtgctccttctggacaccccccgcagtctgttcctcacgcgcaccccccttcaaaagaaggtttcagtttattttcgagctggggaaaggaagaacgacgaggaggaaaaaagagggaggcggcggatggcaaacgtagaataaatgtccatctcgtcctcccagcgaaatcgagggaggggacacacaggggggcggcgaagagggagctgcccattaaaaccggcactgagagtcctggcagcggcggcggcggcggcgcgggacgcgtcacatccccttgaccctccaatcacctcgggctcccatttgattggaaggcggcaaaggctttaatctcccccttggtgcagctgcttttgaagtgagtttcctcgccagagccccggctggacacgcagcggctcgcatcgcagagcgcagcgccggcgcggggccgcgagaacgcagcgcaggggagcagcccgaggcggacaccgcgagccgcccggcactcccgcagtccagccggctcctctagcccggccacggctccgctgcgggccacccaggattactcgcgtctggctccaggcgccgagaaggcgcgctgggcgcccgtggccgccgcgccagctcctcctcctcccgctgctcctgctcccggggcgagcgcgcagccccgagcccgccccgcgcctcccggagccctcccccccgctgctcccatgcgcgcgggtgggtcatgagcacagcgccctcgctttctgccctaagaagcagtaagcacagcggcggcggcggcggcggaggcggaggcggcggtgcagaccctgcctggaccagcgcgctctctggaaatagctccggccccggcccaggctcgtccccggccggcagcaccaagccttttgtgcacgccgtgcccccctctgaccccctgcgccaggccaaccgcctgccaatcaaggtgctgaagatgctgacggcacgaactggccacattttgcaccccgagtacctgcagcccctgccttccacgccggtcagccccatcgaggtaaggaccctctctctggatcgcactgggaccactaccctggctgccaccctagggctttctttttctcgggatctgggcggaggtgggggggtcggagtgattcagctcccgaatgggggaagaggctactgcttccgtacctcaaaactagggcggaaaagggggaggaagtggaatggggcgtgcatgctagggagcaaggctgccaatacttgtttctcctttcgatatgaaagcccctaccccgacccaggccccttcactcggcaccgaaggcaggcggaggtctgaaatacggttccaaagtcgccgtccttcgtatccgcagaagccagtgtgtgcacacagcctctgaggcgccagccgcccgagcccttactctgaagaattaaggagtgtttgtggggagggggtacagttctgggtctaggaaccgaaaaccaaaacattttgctctttaaaaatctagttagcgctcagagagggcaggaaagatgctgctgggggtggtggttgggcggggggagcaatctgctgcctttcccaacggcgagaatgtttgtgagtgggtgttgaagagggggtgccgcctagaattgcgccttggggctgggaggatcttcgtgggctgttgcggagaggcatttgaaccccagaagccaggattctaaagggtttccacttctttctctgtgtgacgctccccccccatcgtctgaccccgcagctcgatgccaagaagagcccgctggcgctgttggcgcaaacatgttcgcagatcgggaagcccgacccctcgccctcctccaaactctcctcggttgcctccaacgggggcggcgcgggcggtgccggcggcggtgctgcgggcgacaaggacaccaaatcgggccccctgaagctgagcgacatcggcgtggaggacaagtcgagtttcaagccgtactccaaacccggctcggataagaaggagccgggaggcggcggtggaggcggtggcggtggcgggggcggcggcgggggtgtttcgtcggagaagtcgggattccgggtaccgagcgccacctgccagccattcacgcccaggacaggcagcccgagctccagcgcctcggcctgctcgccgggaggtatgctgtcctcggccgggggtgccccggagggcaaggacgacaagaaagacaccgacgtgggcggcggtggcaagggcaccgggggcgcctcggccgaagggggacccacggggctggcacacggccggattagctgcggcggcgggattaatgtggatgtgaaccagcatccggatgggggcccgggaggcaaggctctgggctcggactgcggcggttcatcgggctccagctccggctccggccccagcgcgcccacctcctcctcagtgttgggctctgggctggtggctcccgtgtcaccctacaagccgggccagacagtgttccctctgcctcccgcgggtatgacctacccaggcagcctggccggggcctacgccggctacccgccccagttcctgccacacggcgtggcacttgaccccaccaagccgggca

SEQ ID NO: 1884286 - DNA, 4001 bp, Homo sapiens
ctcccaaaagccccgggcgcgcaggcccccaggcgcccccatgcgctcggaccctcggagtggagttttgagaaaagcgaacgcacgctgaccacgacccgcacccacgcagcacagcgcagccccacgagcgtgtgtggccacaccgggggacgcaggagccactccacggcccccccaggcttcaggtgctgaggctgcctcccctgagccgccggcgtaataagctgctggaattagaggagagggggaagagctgagtctggaggctggggagggacgcccttggctgcgtcccccccggccctgtcgcaggccccagaatttcagtgcccgggcctcgcggggaggccgcggcgatagcggcccaaaggtgggctcgcggcgttaggagcactaccattggttgggtcgacacctagacggccgcgcactcagtaaccaggcacacatggacacacccgaaggataagagtgcttcacagacgcgctgccccgcagagacagcgtaggactgtcccgccctccgaaacgcgcacctgggacttgctccccggagaccagacaaccgcctccctcagcgtggggcctcgccacccgctcgccgactcacctccctcagatgtcgcacggacactacaaacccccttgaatgcaggtgtgctcttacacgctcacactgacaaacaccagccccaagcacacaccgcctcactcccctcttctctccaaatgagcttcagtcaagttaccatttcataaagtttaccaacccaaagaatcaagggataaaatccaaacgcagaaaaagaatgcctaggagcaaattctaaaactcaccccggaaagttctcggtacccgtgcggagtgggagacagagaaagaagccggggaggggagtcaggtgggggaggggagtgagatgggccaagaggagagggcgagcataccaagggcagttccagacccgacccccgcgcgcacccggctcagccccaggtgcgcgccggtcgaaaccgggtctccaggctcggcccccgccccccacgcgggcacagactggctcccgactcccagagctcccagccccaccatttatcaaaaggacttgacaacaaaagaagagccggggcggaaaagcggaggaggggagattcaaagtcttctaagtcgttccgaggaagggggtgtgtcctcctccccaccccctctaatttctgcgagttcctggaggagaccctcgaacccgctccggacgctatcagagccccgataactcacgcagcgccacaggcatgcatacacactgggcatccaggtccaggtacccggtggcacgcacagcgcctccccttttcttcccaaacaacccgagtgacggtgcaaatcgaggggaacgcggcagtcccgctccgcttccctggaagaacccgcgttcccacaggcagccgccccctccctctctcgctccttccctcggctctcctagcgcagctcattccgactcggcgttccaataaattcgagagagcagccccgagttaccctggctccccagcctgcggggatggcggcaggtgggagaaggtcggggagggggcatgagtgagcctgagatgtttcttcccccatacacccatggccaggcctcttcttcgcagcctcttagccctgcttacgacccgagggggtcaaagaattgaggcgaggtttgccccaccattgacctccaggactagaagttccttggtggtgtggctcttagaagtctccgagtttggggttagggaactacagagggtggcagcctgacctccgcacgcaacacgccccgcgaggactcgcggcggcggggtggggtggcgggaaatctcccgtgttagaagttgccgccgctggtctcgggtacccggagccgcgcccgaactccgcgaccccaacagaccgaggctcccagaggtggaagggcgtctctccgacaccgagagggcaggcgcacactccaggcctgcgcgcccctctcggcgccctgggcgcacctgcgcactttactctcgctattcattttcctgacaccgtgcgcctctttcattctttttcttagagcccccaccccacccccatcccaggaggccgctcctcttttcccctcctccagttccctctcaatctcctccttcctctccgtctctctctccctctctctttttcccttcaagtcgcacccgccttgtaatcagcaacaaaagctgacataaatcacgggaggattgacaagagctgacaaataactgattgattgcggtcgaggaacattgacaattgatggaggggtggagatgcccaaagaagggggggagggaggaaaacagggtgggagagtaagaatggggggttgggggacagactgagggtgaaacagaggaaacatgtgacccccgctgctgccccaatctacgcgtccccgggcgtcacgtggccgggaagggcggagagcccagcgctcctcgcggtgttgagccgccgccgctgcgactgcccatctagcttctggtttctccgccgcggaatctgaggaaattagagcgggcgggcgggcttcttccagctccggctccccaccttgccttcttaccctggtggctgcgctgcgccgcgcgggatctcgattactgcgaaggaaaaaacactgggtgtgcaggttcccttcgcccctggagttgacagtccggccggtgtccacactcccaccggtgctccttctggacaccccccgcagtctgttcctcacgcgcaccccccttcaaaagaaggtttcagtttattttcgagctggggaaaggaagaacgacgaggaggaaaaaagagggaggcggcggatggcaaacgtagaataaatgtccatctcgtcctcccagcgaaatcgagggaggggacacacaggggggcggcgaagagggagctgcccattaaaaccggcactgagagtcctggcagcggcggcggcggcggcgcgggacgcgtcacatccccttgaccctccaatcacctcgggctcccatttgattggaaggcggcaaaggctttaatctcccccttggtgcagctgcttttgaagtgagtttcctcgccagagccccggctggacacgcagcggctcgcatcgcagagcgcagcgccggcgcggggccgcgagaacgcagcgcaggggagcagcccgaggcggacaccgcgagccgcccggcactcccgcagtccagccggctcctctagcccggccacggctccgctgcgggccacccaggattactcgcgtctggctccaggcgccgagaaggcgcgctgggcgcccgtggccgccgcgccagctcctcctcctcccgctgctcctgctcccggggcgagcgcgcagccccgagcccgccccgcgcctcccggagccctcccccccgctgctcccatgcgcgcgggtgggtcatgagcacagcgccctcgctttctgccctaagaagcagtaagcacagcggcggcggcggcggcggaggcggaggcggcggtgcagaccctgcctggaccagcgcgctctctggaaatagctccggccccggcccaggctcgtccccggccggcagcaccaagccttttgtgcacgccgtgcccccctctgaccccctgcgccaggccaaccgcctgccaatcaaggtgctgaagatgctgacggcacgaactggccacattttgcaccccgagtacctgcagcccctgccttccacgccggtcagccccatcgaggtaaggaccctctctctggatcgcactgggaccactaccctggctgccaccctagggctttctttttctcgggatctgggcggaggtgggggggtcggagtgattcagctcccgaatgggggaagaggctactgcttccgtacctcaaaactagggcggaaaagggggaggaagtggaatggggcgtgcatgctagggagcaaggctg

SEQ ID NO: 1884287 - DNA, 4001 bp, Homo sapiens
tgcaaataaaatccgcaggacatccacgccaactgctgctgggggttggaggctttaggcctggcgcagagtaattaatggcccccactcccgggcccgcgccggccttcgggggtttggcctcctgcgcgaggtgcgcaggctcggacgctggcgcctcccaaaagccccgggcgcgcaggcccccaggcgcccccatgcgctcggaccctcggagtggagttttgagaaaagcgaacgcacgctgaccacgacccgcacccacgcagcacagcgcagccccacgagcgtgtgtggccacaccgggggacgcaggagccactccacggcccccccaggcttcaggtgctgaggctgcctcccctgagccgccggcgtaataagctgctggaattagaggagagggggaagagctgagtctggaggctggggagggacgcccttggctgcgtcccccccggccctgtcgcaggccccagaatttcagtgcccgggcctcgcggggaggccgcggcgatagcggcccaaaggtgggctcgcggcgttaggagcactaccattggttgggtcgacacctagacggccgcgcactcagtaaccaggcacacatggacacacccgaaggataagagtgcttcacagacgcgctgccccgcagagacagcgtaggactgtcccgccctccgaaacgcgcacctgggacttgctccccggagaccagacaaccgcctccctcagcgtggggcctcgccacccgctcgccgactcacctccctcagatgtcgcacggacactacaaacccccttgaatgcaggtgtgctcttacacgctcacactgacaaacaccagccccaagcacacaccgcctcactcccctcttctctccaaatgagcttcagtcaagttaccatttcataaagtttaccaacccaaagaatcaagggataaaatccaaacgcagaaaaagaatgcctaggagcaaattctaaaactcaccccggaaagttctcggtacccgtgcggagtgggagacagagaaagaagccggggaggggagtcaggtgggggaggggagtgagatgggccaagaggagagggcgagcataccaagggcagttccagacccgacccccgcgcgcacccggctcagccccaggtgcgcgccggtcgaaaccgggtctccaggctcggcccccgccccccacgcgggcacagactggctcccgactcccagagctcccagccccaccatttatcaaaaggacttgacaacaaaagaagagccggggcggaaaagcggaggaggggagattcaaagtcttctaagtcgttccgaggaagggggtgtgtcctcctccccaccccctctaatttctgcgagttcctggaggagaccctcgaacccgctccggacgctatcagagccccgataactcacgcagcgccacaggcatgcatacacactgggcatccaggtccaggtacccggtggcacgcacagcgcctccccttttcttcccaaacaacccgagtgacggtgcaaatcgaggggaacgcggcagtcccgctccgcttccctggaagaacccgcgttcccacaggcagccgccccctccctctctcgctccttccctcggctctcctagcgcagctcattccgactcggcgttccaataaattcgagagagcagccccgagttaccctggctccccagcctgcggggatggcggcaggtgggagaaggtcggggagggggcatgagtgagcctgagatgtttcttcccccatacacccatggccaggcctcttcttcgcagcctcttagccctgcttacgacccgagggggtcaaagaattgaggcgaggtttgccccaccattgacctccaggactagaagttccttggtggtgtggctcttagaagtctccgagtttggggttagggaactacagagggtggcagcctgacctccgcacgcaacacgccccgcgaggactcgcggcggcggggtggggtggcgggaaatctcccgtgttagaagttgccgccgctggtctcgggtacccggagccgcgcccgaactccgcgaccccaacagaccgaggctcccagaggtggaagggcgtctctccgacaccgagagggcaggcgcacactccaggcctgcgcgcccctctcggcgccctgggcgcacctgcgcactttactctcgctattcattttcctgacaccgtgcgcctctttcattctttttcttagagcccccaccccacccccatcccaggaggccgctcctcttttcccctcctccagttccctctcaatctcctccttcctctccgtctctctctccctctctctttttcccttcaagtcgcacccgccttgtaatcagcaacaaaagctgacataaatcacgggaggattgacaagagctgacaaataactgattgattgcggtcgaggaacattgacaattgatggaggggtggagatgcccaaagaagggggggagggaggaaaacagggtgggagagtaagaatggggggttgggggacagactgagggtgaaacagaggaaacatgtgacccccgctgctgccccaatctacgcgtccccgggcgtcacgtggccgggaagggcggagagcccagcgctcctcgcggtgttgagccgccgccgctgcgactgcccatctagcttctggtttctccgccgcggaatctgaggaaattagagcgggcgggcgggcttcttccagctccggctccccaccttgccttcttaccctggtggctgcgctgcgccgcgcgggatctcgattactgcgaaggaaaaaacactgggtgtgcaggttcccttcgcccctggagttgacagtccggccggtgtccacactcccaccggtgctccttctggacaccccccgcagtctgttcctcacgcgcaccccccttcaaaagaaggtttcagtttattttcgagctggggaaaggaagaacgacgaggaggaaaaaagagggaggcggcggatggcaaacgtagaataaatgtccatctcgtcctcccagcgaaatcgagggaggggacacacaggggggcggcgaagagggagctgcccattaaaaccggcactgagagtcctggcagcggcggcggcggcggcgcgggacgcgtcacatccccttgaccctccaatcacctcgggctcccatttgattggaaggcggcaaaggctttaatctcccccttggtgcagctgcttttgaagtgagtttcctcgccagagccccggctggacacgcagcggctcgcatcgcagagcgcagcgccggcgcggggccgcgagaacgcagcgcaggggagcagcccgaggcggacaccgcgagccgcccggcactcccgcagtccagccggctcctctagcccggccacggctccgctgcgggccacccaggattactcgcgtctggctccaggcgccgagaaggcgcgctgggcgcccgtggccgccgcgccagctcctcctcctcccgctgctcctgctcccggggcgagcgcgcagccccgagcccgccccgcgcctcccggagccctcccccccgctgctcccatgcgcgcgggtgggtcatgagcacagcgccctcgctttctgccctaagaagcagtaagcacagcggcggcggcggcggcggaggcggaggcggcggtgcagaccctgcctggaccagcgcgctctctggaaatagctccggccccggcccaggctcgtccccggccggcagcaccaagccttttgtgcacgccgtgcccccctctgaccccctgcgccaggccaaccgcctgccaatcaaggtgctgaagatgctgacggcacgaactggccacattttgcaccccgagtacctgcagcccctgccttccacgccggtcagccccatcgaggtaaggaccctctctctggatcgcactgggaccactaccctggctgccacc

SEQ ID NO: 1884288 - DNA, 4001 bp, Homo sapiens
acgcgggagagaaaacaaaaagaagggaggaagaaaataaatgagagccgaggagagcgcaggccgtggcgagaccccgggccgggccgcggctcctgcacgccaggcttctcccctgccccgagcagcggcgagggccgcgcgggactgtcccctactggccccgcgaatctgggccttgctcccagtcaggtggggcggacctgggtgcagaggcctccgcgcgcgctttctctccccgctcccagggaccgcgaggcggggcaggacaggggtggggaggcccccgggggcgcgcgccagtccgggactgtttgggtgctctgggccaggctttccagctcgccgggcctgacctgtcaggcggattatcttcgagggagattaataggggaggcgggctgcaataataatcgttttgtttgatgtgacaactctgataggcgttgatttacttacaaactgataggcttttaattgagcgcctccgccgagcccgagatgaaagggaagcggcggtgaaaggcggcccgcctgccctccggcctcaatactgattagccatctcgacagtgaatagttcaaggcattttcaaacttttttcctcagctctttccccttccttctcctcctcccaccccctcctccaatatctgccttgcccactccttttttagagaaaacaaatcatttccattgtttgcaaataaaatccgcaggacatccacgccaactgctgctgggggttggaggctttaggcctggcgcagagtaattaatggcccccactcccgggcccgcgccggccttcgggggtttggcctcctgcgcgaggtgcgcaggctcggacgctggcgcctcccaaaagccccgggcgcgcaggcccccaggcgcccccatgcgctcggaccctcggagtggagttttgagaaaagcgaacgcacgctgaccacgacccgcacccacgcagcacagcgcagccccacgagcgtgtgtggccacaccgggggacgcaggagccactccacggcccccccaggcttcaggtgctgaggctgcctcccctgagccgccggcgtaataagctgctggaattagaggagagggggaagagctgagtctggaggctggggagggacgcccttggctgcgtcccccccggccctgtcgcaggccccagaatttcagtgcccgggcctcgcggggaggccgcggcgatagcggcccaaaggtgggctcgcggcgttaggagcactaccattggttgggtcgacacctagacggccgcgcactcagtaaccaggcacacatggacacacccgaaggataagagtgcttcacagacgcgctgccccgcagagacagcgtaggactgtcccgccctccgaaacgcgcacctgggacttgctccccggagaccagacaaccgcctccctcagcgtggggcctcgccacccgctcgccgactcacctccctcagatgtcgcacggacactacaaacccccttgaatgcaggtgtgctcttacacgctcacactgacaaacaccagccccaagcacacaccgcctcactcccctcttctctccaaatgagcttcagtcaagttaccatttcataaagtttaccaacccaaagaatcaagggataaaatccaaacgcagaaaaagaatgcctaggagcaaattctaaaactcaccccggaaagttctcggtacccgtgcggagtgggagacagagaaagaagccggggaggggagtcaggtgggggaggggagtgagatgggccaagaggagagggcgagcataccaagggcagttccagacccgacccccgcgcgcacccggctcagccccaggtgcgcgccggtcgaaaccgggtctccaggctcggcccccgccccccacgcgggcacagactggctcccgactcccagagctcccagccccaccatttatcaaaaggacttgacaacaaaagaagagccggggcggaaaagcggaggaggggagattcaaagtcttctaagtcgttccgaggaagggggtgtgtcctcctccccaccccctctaatttctgcgagttcctggaggagaccctcgaacccgctccggacgctatcagagccccgataactcacgcagcgccacaggcatgcatacacactgggcatccaggtccaggtacccggtggcacgcacagcgcctccccttttcttcccaaacaacccgagtgacggtgcaaatcgaggggaacgcggcagtcccgctccgcttccctggaagaacccgcgttcccacaggcagccgccccctccctctctcgctccttccctcggctctcctagcgcagctcattccgactcggcgttccaataaattcgagagagcagccccgagttaccctggctccccagcctgcggggatggcggcaggtgggagaaggtcggggagggggcatgagtgagcctgagatgtttcttcccccatacacccatggccaggcctcttcttcgcagcctcttagccctgcttacgacccgagggggtcaaagaattgaggcgaggtttgccccaccattgacctccaggactagaagttccttggtggtgtggctcttagaagtctccgagtttggggttagggaactacagagggtggcagcctgacctccgcacgcaacacgccccgcgaggactcgcggcggcggggtggggtggcgggaaatctcccgtgttagaagttgccgccgctggtctcgggtacccggagccgcgcccgaactccgcgaccccaacagaccgaggctcccagaggtggaagggcgtctctccgacaccgagagggcaggcgcacactccaggcctgcgcgcccctctcggcgccctgggcgcacctgcgcactttactctcgctattcattttcctgacaccgtgcgcctctttcattctttttcttagagcccccaccccacccccatcccaggaggccgctcctcttttcccctcctccagttccctctcaatctcctccttcctctccgtctctctctccctctctctttttcccttcaagtcgcacccgccttgtaatcagcaacaaaagctgacataaatcacgggaggattgacaagagctgacaaataactgattgattgcggtcgaggaacattgacaattgatggaggggtggagatgcccaaagaagggggggagggaggaaaacagggtgggagagtaagaatggggggttgggggacagactgagggtgaaacagaggaaacatgtgacccccgctgctgccccaatctacgcgtccccgggcgtcacgtggccgggaagggcggagagcccagcgctcctcgcggtgttgagccgccgccgctgcgactgcccatctagcttctggtttctccgccgcggaatctgaggaaattagagcgggcgggcgggcttcttccagctccggctccccaccttgccttcttaccctggtggctgcgctgcgccgcgcgggatctcgattactgcgaaggaaaaaacactgggtgtgcaggttcccttcgcccctggagttgacagtccggccggtgtccacactcccaccggtgctccttctggacaccccccgcagtctgttcctcacgcgcaccccccttcaaaagaaggtttcagtttattttcgagctggggaaaggaagaacgacgaggaggaaaaaagagggaggcggcggatggcaaacgtagaataaatgtccatctcgtcctcccagcgaaatcgagggaggggacacacaggggggcggcgaagagggagctgcccattaaaaccggcactgagagtcctggcagcggcggcggcggcggcgcgggacgcgtcacatccccttgaccctccaatcacctcgggctcccatttgattggaaggcggcaaaggctttaatctcccccttggtgcagctgcttttgaagtgagtttcctcgccagagccccg

SEQ ID NO: 1884289 - DNA, 4001 bp, Homo sapiens
gcaagaaaggtttatacggcacaccaagaagagagagccagaatgggaaatactccctggcaagtaaaaaaaagggaaaaggaaaaggaaatgaaggaaaaagatgggggagcccagaaagacgcgggagagaaaacaaaaagaagggaggaagaaaataaatgagagccgaggagagcgcaggccgtggcgagaccccgggccgggccgcggctcctgcacgccaggcttctcccctgccccgagcagcggcgagggccgcgcgggactgtcccctactggccccgcgaatctgggccttgctcccagtcaggtggggcggacctgggtgcagaggcctccgcgcgcgctttctctccccgctcccagggaccgcgaggcggggcaggacaggggtggggaggcccccgggggcgcgcgccagtccgggactgtttgggtgctctgggccaggctttccagctcgccgggcctgacctgtcaggcggattatcttcgagggagattaataggggaggcgggctgcaataataatcgttttgtttgatgtgacaactctgataggcgttgatttacttacaaactgataggcttttaattgagcgcctccgccgagcccgagatgaaagggaagcggcggtgaaaggcggcccgcctgccctccggcctcaatactgattagccatctcgacagtgaatagttcaaggcattttcaaacttttttcctcagctctttccccttccttctcctcctcccaccccctcctccaatatctgccttgcccactccttttttagagaaaacaaatcatttccattgtttgcaaataaaatccgcaggacatccacgccaactgctgctgggggttggaggctttaggcctggcgcagagtaattaatggcccccactcccgggcccgcgccggccttcgggggtttggcctcctgcgcgaggtgcgcaggctcggacgctggcgcctcccaaaagccccgggcgcgcaggcccccaggcgcccccatgcgctcggaccctcggagtggagttttgagaaaagcgaacgcacgctgaccacgacccgcacccacgcagcacagcgcagccccacgagcgtgtgtggccacaccgggggacgcaggagccactccacggcccccccaggcttcaggtgctgaggctgcctcccctgagccgccggcgtaataagctgctggaattagaggagagggggaagagctgagtctggaggctggggagggacgcccttggctgcgtcccccccggccctgtcgcaggccccagaatttcagtgcccgggcctcgcggggaggccgcggcgatagcggcccaaaggtgggctcgcggcgttaggagcactaccattggttgggtcgacacctagacggccgcgcactcagtaaccaggcacacatggacacacccgaaggataagagtgcttcacagacgcgctgccccgcagagacagcgtaggactgtcccgccctccgaaacgcgcacctgggacttgctccccggagaccagacaaccgcctccctcagcgtggggcctcgccacccgctcgccgactcacctccctcagatgtcgcacggacactacaaacccccttgaatgcaggtgtgctcttacacgctcacactgacaaacaccagccccaagcacacaccgcctcactcccctcttctctccaaatgagcttcagtcaagttaccatttcataaagtttaccaacccaaagaatcaagggataaaatccaaacgcagaaaaagaatgcctaggagcaaattctaaaactcaccccggaaagttctcggtacccgtgcggagtgggagacagagaaagaagccggggaggggagtcaggtgggggaggggagtgagatgggccaagaggagagggcgagcataccaagggcagttccagacccgacccccgcgcgcacccggctcagccccaggtgcgcgccggtcgaaaccgggtctccaggctcggcccccgccccccacgcgggcacagactggctcccgactcccagagctcccagccccaccatttatcaaaaggacttgacaacaaaagaagagccggggcggaaaagcggaggaggggagattcaaagtcttctaagtcgttccgaggaagggggtgtgtcctcctccccaccccctctaatttctgcgagttcctggaggagaccctcgaacccgctccggacgctatcagagccccgataactcacgcagcgccacaggcatgcatacacactgggcatccaggtccaggtacccggtggcacgcacagcgcctccccttttcttcccaaacaacccgagtgacggtgcaaatcgaggggaacgcggcagtcccgctccgcttccctggaagaacccgcgttcccacaggcagccgccccctccctctctcgctccttccctcggctctcctagcgcagctcattccgactcggcgttccaataaattcgagagagcagccccgagttaccctggctccccagcctgcggggatggcggcaggtgggagaaggtcggggagggggcatgagtgagcctgagatgtttcttcccccatacacccatggccaggcctcttcttcgcagcctcttagccctgcttacgacccgagggggtcaaagaattgaggcgaggtttgccccaccattgacctccaggactagaagttccttggtggtgtggctcttagaagtctccgagtttggggttagggaactacagagggtggcagcctgacctccgcacgcaacacgccccgcgaggactcgcggcggcggggtggggtggcgggaaatctcccgtgttagaagttgccgccgctggtctcgggtacccggagccgcgcccgaactccgcgaccccaacagaccgaggctcccagaggtggaagggcgtctctccgacaccgagagggcaggcgcacactccaggcctgcgcgcccctctcggcgccctgggcgcacctgcgcactttactctcgctattcattttcctgacaccgtgcgcctctttcattctttttcttagagcccccaccccacccccatcccaggaggccgctcctcttttcccctcctccagttccctctcaatctcctccttcctctccgtctctctctccctctctctttttcccttcaagtcgcacccgccttgtaatcagcaacaaaagctgacataaatcacgggaggattgacaagagctgacaaataactgattgattgcggtcgaggaacattgacaattgatggaggggtggagatgcccaaagaagggggggagggaggaaaacagggtgggagagtaagaatggggggttgggggacagactgagggtgaaacagaggaaacatgtgacccccgctgctgccccaatctacgcgtccccgggcgtcacgtggccgggaagggcggagagcccagcgctcctcgcggtgttgagccgccgccgctgcgactgcccatctagcttctggtttctccgccgcggaatctgaggaaattagagcgggcgggcgggcttcttccagctccggctccccaccttgccttcttaccctggtggctgcgctgcgccgcgcgggatctcgattactgcgaaggaaaaaacactgggtgtgcaggttcccttcgcccctggagttgacagtccggccggtgtccacactcccaccggtgctccttctggacaccccccgcagtctgttcctcacgcgcaccccccttcaaaagaaggtttcagtttattttcgagctggggaaaggaagaacgacgaggaggaaaaaagagggaggcggcggatggcaaacgtagaataaatgtccatctcgtcctcccagcgaaatcgagggaggggacacacaggggggcggcgaagagggagctgcccattaaaaccggcactgagagtcctggcagcggcggcggcggcggcgcgggac

SEQ ID NO: 1884290 - DNA, 4001 bp, Homo sapiens
ccgggcaacgccaacagcgaggtcggcaacgttacagctatgaaattccaaggcaaaatactaattccagaataggacaactgtccaccagtctctctccctctttttcctcttcacccctccaaacccacccaacccttaaacaggcgcagagcttctcagagcccctgctcggaaagagattatagaggactttgccatgagtttctgggaactgcacactcctggggcaacccgggagaaataacccgggccctgagaacatcctactccaggcagtgtggctgcgcaagaaaggtttatacggcacaccaagaagagagagccagaatgggaaatactccctggcaagtaaaaaaaagggaaaaggaaaaggaaatgaaggaaaaagatgggggagcccagaaagacgcgggagagaaaacaaaaagaagggaggaagaaaataaatgagagccgaggagagcgcaggccgtggcgagaccccgggccgggccgcggctcctgcacgccaggcttctcccctgccccgagcagcggcgagggccgcgcgggactgtcccctactggccccgcgaatctgggccttgctcccagtcaggtggggcggacctgggtgcagaggcctccgcgcgcgctttctctccccgctcccagggaccgcgaggcggggcaggacaggggtggggaggcccccgggggcgcgcgccagtccgggactgtttgggtgctctgggccaggctttccagctcgccgggcctgacctgtcaggcggattatcttcgagggagattaataggggaggcgggctgcaataataatcgttttgtttgatgtgacaactctgataggcgttgatttacttacaaactgataggcttttaattgagcgcctccgccgagcccgagatgaaagggaagcggcggtgaaaggcggcccgcctgccctccggcctcaatactgattagccatctcgacagtgaatagttcaaggcattttcaaacttttttcctcagctctttccccttccttctcctcctcccaccccctcctccaatatctgccttgcccactccttttttagagaaaacaaatcatttccattgtttgcaaataaaatccgcaggacatccacgccaactgctgctgggggttggaggctttaggcctggcgcagagtaattaatggcccccactcccgggcccgcgccggccttcgggggtttggcctcctgcgcgaggtgcgcaggctcggacgctggcgcctcccaaaagccccgggcgcgcaggcccccaggcgcccccatgcgctcggaccctcggagtggagttttgagaaaagcgaacgcacgctgaccacgacccgcacccacgcagcacagcgcagccccacgagcgtgtgtggccacaccgggggacgcaggagccactccacggcccccccaggcttcaggtgctgaggctgcctcccctgagccgccggcgtaataagctgctggaattagaggagagggggaagagctgagtctggaggctggggagggacgcccttggctgcgtcccccccggccctgtcgcaggccccagaatttcagtgcccgggcctcgcggggaggccgcggcgatagcggcccaaaggtgggctcgcggcgttaggagcactaccattggttgggtcgacacctagacggccgcgcactcagtaaccaggcacacatggacacacccgaaggataagagtgcttcacagacgcgctgccccgcagagacagcgtaggactgtcccgccctccgaaacgcgcacctgggacttgctccccggagaccagacaaccgcctccctcagcgtggggcctcgccacccgctcgccgactcacctccctcagatgtcgcacggacactacaaacccccttgaatgcaggtgtgctcttacacgctcacactgacaaacaccagccccaagcacacaccgcctcactcccctcttctctccaaatgagcttcagtcaagttaccatttcataaagtttaccaacccaaagaatcaagggataaaatccaaacgcagaaaaagaatgcctaggagcaaattctaaaactcaccccggaaagttctcggtacccgtgcggagtgggagacagagaaagaagccggggaggggagtcaggtgggggaggggagtgagatgggccaagaggagagggcgagcataccaagggcagttccagacccgacccccgcgcgcacccggctcagccccaggtgcgcgccggtcgaaaccgggtctccaggctcggcccccgccccccacgcgggcacagactggctcccgactcccagagctcccagccccaccatttatcaaaaggacttgacaacaaaagaagagccggggcggaaaagcggaggaggggagattcaaagtcttctaagtcgttccgaggaagggggtgtgtcctcctccccaccccctctaatttctgcgagttcctggaggagaccctcgaacccgctccggacgctatcagagccccgataactcacgcagcgccacaggcatgcatacacactgggcatccaggtccaggtacccggtggcacgcacagcgcctccccttttcttcccaaacaacccgagtgacggtgcaaatcgaggggaacgcggcagtcccgctccgcttccctggaagaacccgcgttcccacaggcagccgccccctccctctctcgctccttccctcggctctcctagcgcagctcattccgactcggcgttccaataaattcgagagagcagccccgagttaccctggctccccagcctgcggggatggcggcaggtgggagaaggtcggggagggggcatgagtgagcctgagatgtttcttcccccatacacccatggccaggcctcttcttcgcagcctcttagccctgcttacgacccgagggggtcaaagaattgaggcgaggtttgccccaccattgacctccaggactagaagttccttggtggtgtggctcttagaagtctccgagtttggggttagggaactacagagggtggcagcctgacctccgcacgcaacacgccccgcgaggactcgcggcggcggggtggggtggcgggaaatctcccgtgttagaagttgccgccgctggtctcgggtacccggagccgcgcccgaactccgcgaccccaacagaccgaggctcccagaggtggaagggcgtctctccgacaccgagagggcaggcgcacactccaggcctgcgcgcccctctcggcgccctgggcgcacctgcgcactttactctcgctattcattttcctgacaccgtgcgcctctttcattctttttcttagagcccccaccccacccccatcccaggaggccgctcctcttttcccctcctccagttccctctcaatctcctccttcctctccgtctctctctccctctctctttttcccttcaagtcgcacccgccttgtaatcagcaacaaaagctgacataaatcacgggaggattgacaagagctgacaaataactgattgattgcggtcgaggaacattgacaattgatggaggggtggagatgcccaaagaagggggggagggaggaaaacagggtgggagagtaagaatggggggttgggggacagactgagggtgaaacagaggaaacatgtgacccccgctgctgccccaatctacgcgtccccgggcgtcacgtggccgggaagggcggagagcccagcgctcctcgcggtgttgagccgccgccgctgcgactgcccatctagcttctggtttctccgccgcggaatctgaggaaattagagcgggcgggcgggcttcttccagctccggctccccaccttgccttcttaccctggtggctgcgctgcgccgcgcgggatctcgattactgcgaaggaaaaaacactgggtgtgcaggttcccttcgcccctggagttgacagtccgg

SEQ ID NO: 1884291 - DNA, 4001 bp, Homo sapiens
gtatctcactcacccagctcaccctgcccaccccatgcctcacatgccccggcctgccgtcttccctgtgcccagctctgcatacccacaggtgagaccagtgttctgctggggggtaaggcatgggaaaatactgggaattcatagggggttggagtgggtactctgggagtataattggtcagtcggagagtcctggtgaggtggtgggagtctgggggacccagcccaactaaaataagaaatgacggccgggcatggtggctcatgcctgtaatcccagcactttgagaggccgatgtgggtggatcacttgaggtcaggagttcgagaccagcctggccaacatggggaaaccccgtctctactaaaaattagctgagtgcacgcctgtaatcccagcttcttgggaggctgagatgggaatcacttgaacctgggaggcagaggttgcagtgagccgatatcgtgccactgcactccagcctggaggacagagcgagactctatctcaaaaaaaacatgtcaggatagcagcttgtgggggtgaagcacgacagcaacatcctaatcaagtttggcatcttcccctttcttctccctgcccctagggtgtgcatcctgcattcctaggggctcagtacccttattcagtgactcctccctcacttgctgccactgctgtgtctttccccgttccttccatggcacccatcacagtacatccctaccacacagagccagggcttccactgcccaccagtgtggcctgtgagttgtggggccagggaacaggtgaatggaggggaggcacactgggcaggggaggtggggagggaatgttctttgtctctctttgggctctgagttcctcacatggctctcaccccacttagtgagcagtgtccatccagcatccacgtttccagccatccaaggtgcctcactgcctgccctgaccacacagcccagccctctggtgagcggaggttttccaccgcccgaggaggagacacacagtcagccagtcaatccccacagcctgcaccacctgcatgctgcctaccgtgtcggtgagaggacatccctttctgtgctcctacctgcagttgtgccagtggctcttcagaggacccttcctctagctcttcatttgtttactgtggggtcaggtgacaggttggggtaaagggtgaagaggatacaccgtaccatgtgcccacccttatctatctcccaggaatgctggcactggagatgctgggtcgccgggcacacaacgatcaccccaacaacttctcccgctcccccccctacactgatgatgtcaaatggttgctggggctggcagcaaagctgggtaacacctcccctccctaggaccattgccccccccccacctgctctccccaccttccttatcccagacctccttcctagctcttgctcagagttgaggccttggtcgggtatgtgtgcgtgcgcggggggcggagggttacctcagctcctggggtggagggaggctctctgccaggccagagctgagatctgtaagttgggtccctagggcagaggtggccacccccgtctcatgcccctccccctgccccccaggagtgaactacgtgcaccagttctgtgtgggggcagccaagggggtgctgagcccgtttgtgctgcaggagatcgtcatggagacgctgcagcggctgagtcccgctcatgcccacaaccacctgcgtgccccggccttccaccaactggtgcagcgctgccagcaggcatacatgcaggtgacaacctagaattatggagcagggtggagcacttcctgggtggtcttggaccagagggaggcagggcctgtttctgtgctttgtactaaggctcatcctgcacacatcctcctccagtacatccaccaccgcttgattcacctgactcctgcggactacgacgactttgtgaatgcgatccggagtgcccgcagcgccttctgcctgacgcccatgggcatgatgcagttcaacgacatcctacagaacctcaagcgcagcaaacagaccaaggagctgtggcagcgggtctcactcgagatggccaccttctccccctgagtctttcacccttagggtcctatacagggacccaggcctgtggctatgggggcccctcacacagggggagtgaaacttggctggacagatcatcctcactcagttccctggtagcacagactgacagctgctcttgggctatagcttggggccaagatgtctcacaccctagaagcctagggctgggggagacagccctgtctgggagggggcgttgggtggcctctggtatttatttggcatttataaatatataaactccttttttactctagtcgacctgggcctttcccttctttccaaattccatgtgcagatgaaccttcaactggggaggaaacttctgacacttgctttagtctaggtttttcccactccagggaggcagacaaaacagaaaaataaggatgtttattaaggacatttctagcccacagctagggctcatactcggctctatgagccactgtccgacctcatccccattcaatgtgaatgacattagggaggccgggccacaggtagatcccactgcctggctaaaggggccatagcaaggggtccctcccatgcaaggggtctctcccatagccaggtatagaatagatacactgctgcggatgaagagggaaatctcattggactaatacattcccctacaccctgcctggaccctctcattcctccccacctcccaagatgatgggtcaaaggtacctagcactattatgtggggtaccaaaggaagcccctttatttgtcccagaactgtgggaaaaggatacccttcccttctcagccatctcaggcctgggggctactgaggtagagggggaggggccaggccactctaatcccccttgtgggccctgctctggacctgccccttagggaagcagggggcattttgctggtatgggaggctgggacatcagcccagactggaatgctgcagttcttcccgaagccacgagggcactggctgtccaagccggctcagcagcttcgacaactccaaattatggttccggaaaaaatccgtaaggaaaagacgggactgacaggagaaaatgaaggcagaaatggtaagaagtgggacacagaatcagatcctggaagtggagagggattcccctgcccctggctttacttacctcagtgtccatatctggatacctccggcctttgctccggcctagacagcgagtcttaccaccttcaagtccctggcaccaaaatcccttatcatcatcaaacctgctcaacaggaagaggccatgaggtggcagggaaaagagaaactcaagttccataaatgcacaatgcccttccctgcccacagggacatgtctctccttgtgagacagagtaaatctatgtctctaacagacatggtcaacctgcttccccatttcccatacagtactcctcccctgggtcatgctctcccacctgagggtccgtgtgtagttcagaaagggtgtgatacccaggaacttctggatgctctccattgaggctgctgggttggtacgcagctcttgcccatccacaatcagcaactaaaaggacagggatgtggttccctctatattcctaagaagcctctgggctgaagggaagaagaggggaaggggaaccccactgagggctcttgtggggattatacctgtccagaggggtagtaagtcagccagcgttgtagatgggtagaatagtagccagggacaagacagcggttctgcagggagcgtagtgccagaggggtctgggaggaggctgaaatcacctgatagaaggtatagttcagagcaactgggtctccatgggctcgctgatgctgaaggacaaagagaaggaaggtgaaggactggtgatttg

SEQ ID NO: 1884292 - DNA, 4001 bp, Homo sapiens; identical to SEQ ID NO: 914251

SEQ ID NO: 1884293 - DNA, 4001 bp, Homo sapiens
aaaaaaaaaaaaaaggtcgggcacggtggctcacacctgtaatcccagcactttgggaggctgaggcgggcggatcacgaggtcaggagatggagaccatcctgggtaacacagtgaaaccccgtctctactaaaaatacaaaaaaaaaaattagctgggcgtggtggtgggcgcctgtagtcccagctactagggaggctgaggcaggagaatggtgtgaacccaggagggagagcttgcagtgagccgagatcacaccactgcactccagcctgtgccacagagcaagcctctgtctcaaaaaaaaaaaaaaaaaaaaagttaaaaaaaacccctaatatttaacttatttgctatgaaattcggcaaataagctattttccccccactagactgaaagatcactgagggcagaagaccttttctgacttttcattgctatattgtcagctacagggttaggcattcaataaacatttattgggtgaattctaacttggatttaccccctggtttaagtccttgactgattacaatctgaccgtgaaggctgggcaggagaaacaggtagtgtccagattctccgtaaattccagaaagatccaaatgtggtccatcagcaggtgatggggcatagttttggttcacaccaacttaccccacactgacttgaagtatagtccatgaattcagccattgttctgaaggaagcactaagggttgggggtctctcttctctctatttgaataaatggcacgtcacaggttagctctaggattccctactggagaatgaagccattttggaaatagtctcctttttacttttggaaaggctctgcaagtttatgtcagaaagaacgatgttattgagaaagaattccaactctaaaagatagacatgcaatttatccaggatctaagagacaggcttgcaggctttcctctactatcagatgatagctgtaagattttttttttttttttttttttgagacggaggtttcgctcttgttgcccaggctggagtgcaatggcgcgatctcggctcaccgcgacctccgcctcccgggttcaagcgattctcctgcctcagcctccctagtacctgggattacagacatgcgccaccacgcccggctaattttgtatttttagtagagacgggatttctccatgttggtcaggctgctttcgaactcccgacctcaggtgatccgcccgcctcggcctcccaaagtgctgggattgcaggcatgagccaccgcgcccggctaatttttttttttttttttaagtaaccaaccagggctgaacactaccgttattctacagctacccaacaagaatctgtcaaatgtaaagcgttttgaaaggacttttccattcattgttctgatcctttccagcttccgctaagggaaggtttcctcagctgcttctgcgctgcgcacccctggctcccagcgggctaccgcggcgcgaaggactggggcggcccccggcacagcgaccctcacctctcccgggagaacgcgctgcgggccggctgccggctgtttctctaggtggggcgcctcccgggcaaggacccccatgcagcctttgggacgctccagggcatgccagtccaccgccctcctcttggccctctccagcacttctagagccagccttgctgaacgctgcagggaacgtcggtccaccccattcagcgctgcggccgccaaacagttgtccatggctccctgagtgggcacacaacgtacaaacgccggcgggtcagctgggccgcggcgaccctgctccaaatccgggtgggagccccagcctcgacctccctggagaccaccgctcctggtccgcccccaacgcacactccagcgggagcccagccaggactaggcctagcgcgcccgccccttccattttcatctaccccttccgctacttagggagccccctcacccggctcactcgtcaaggcgcatgcgcgcaacgctattctaggaagagggaccaggcctagcgctcccggcggcgccggcgcagctgggccattggcggaaggcgggagaggcgggagaggcgggagaagtgggggaggcggggcggctgggcggccaaacacgccttctgcgtcccagccttggcgtctgcgcgcgagttgcctggttaactgctgagcgctggaggcggggcgccgggcgctgggggccgggggtcgggggtcgggggccgggggtcgggggtcgggggctgggggctgaggactgagtcgagccagcagcccagggcatctgtccacgctgtcagaggagcctctgggcgtggggctggcccttagagggctactgcgctgcttaacttggtgggtataaaggcaggtctcctgttgagctaaaaaattatggggtaccagctaggtaggcaacatagcgagaacccgtgtagacacacacacacacacacacacacacactagccaggagtggttatggggtaccagctaggtaggcaacatagcgacaacccgtgtccacacacacacacacacactagccaggagtggttatggggtaccagctaggtaggcaacatagcgacaacccgtgtccacacacacacacagtaggaggagtggtggcgcgcatctgtagtcccaggtactcgggagggtcgaggtgggaggatcgcttgaacccgggaagcggaggttgcagtgagacgagatcgcgccactgcactccagcctgggcgacagaggaagacttcgtctcaaaacaaaaacatcatggggaataaggcaagtgcctcccgcgcctctttctgcttggtctacattttggggtgtcgctactcttgtttgaggaggtgattaggccaaactgtgtggctgccaaggtggcctttggagaagggaacagctcgggattgaggcgagacggaggcggggctgtctgcagatgttcctggcccccggggcagggggcgcctgagaagttgtagggtctctcataatccctcagcgcagctctctctcccctccagtgggaagtacggattcacatatttttggagacctgttctcttggggtctgactccatcttttaggaagactgcaccatgtttaagtaaggaactgtgaatgcttacttaaaccatgtttaagtaaggacctgtcactccactccgctggttatttggtaggagatacagcccaggctctcactgctaattagtgactcagccgcaccacccagcgcaaagcaaagcgccgatgcttaggaaggtccactttgagggacacgctcagtgggggtcactttaaggaacacaaataaatcctcctttaagtctcctctgtggttcatgaaaaaggagagaaactccatcctcacctagtctcaacagatggcttgatgagcaattatcaggtaccaggtgagtagtagccgaccaatacgacctccttctatgctacttaacttttgcaaatttcctgctttccccttataaaaaagaataacagtgagtgaaaccctacattattcttgagatgatttttttttcattttattggtattccaaaacatttccttcaataagggtttatcaagtgcctcctttagaacatagtggttgtacgtgcatggggtcctgtatatccactcgggagagctggtttgaattctggctctgccatctttttttttccatttcttctccttctccttctccttctccttcttcctcctcctcctccttcctcttcctcttcttcctcttcttccttcttccttcttcttcttttttgtttaataaagaaacgagggtatcaccctgtcagccaggctgaagtgcagtggcacgatctcggctcactgcagcctcgacctcctgggctcaagcgatcctcttcttcagccaccacgccctgcaaattttttaaatgtttcgtagagacagggtctccctatgttgcccaggctctctgcc

SEQ ID NO: 1884294 - DNA, 4001 bp, Homo sapiens
gagtccccaggtgtgcacatactaacctccagattgtttttcttctcgttctagatgttcatccttgctttttgggacttgaaataaccctacacagacaaatatttatgcctattatccacttatggaaaacctatatgtcccaagcccatagggttagtattattatcagtattaaaaccattagtactagtatcatgatgatcattattcctgttaatatccatcaatatttgtattactgccattgttaatatggatttttcattattgtacagcaatgaatatagtttatccattcacaaatggtgttcagttaccaaagatgactaaaaggcatgttctacagacatatacacacacagctgtcctggagacacagctttgccaccaattgctctttcgtaagataggatcccccaatacccactagtttttcaggactcgacctgagctagctcaactagacctggaaaagtttcctatgctcaaatgtacttggaaaaatttaaaagtctcttcagaggcccagtaatagcttttggcagcttctaagaccagggagggtttcttggccattcagagccattcaaatatgctaagtaaactcaaggatccagaaaccccacctgcagtcatgaaataccagtgaatggcctctttgagtctcttcaaggttttcaaagatgactgcctgggaaggctgaccaggaagtcacccaagcccaaccttctgcaggatgttctatgtcagccagggacccagtgaattgccattgaacagaagggaggaacagaaacagcatgcctgagcttctggaaacattctaaatgtccttgttggcccagcaaagactggtactaccatatgaggcacagacttggcaacctacctactccagaaaccacagaagctttaaaggttcccaggaagtcccaggaagggcagccacggccctttagagccatcagattttattctaagtctacgtgggagacagtgcgcttagcttcataaaaacaccagtggaggtgctaacacttgccccagtatccagtcttttctacctcatctcagagccaggcagccactatttcccaaagctgctgtgcaatgaaaggggaatattctaagtgctctcctgtgcccacgaaattctgtggctgcgctgaaaggtaggagttgtcctccggaatgctcttcagaaatctgacactggtcaagattaaagaagctcaattcaacgtcatacaaaaccaatcccccccccaaaaaaaaatgcatagtaagacaaaatgaacacacctgctaataatcataaatgacaataataacaacaatgatgatcttagtgataatgccaccaacactgttaatggcaataacaataaacctgaggtaatgagtgttagggtcccgattcaccgatgtgaaggatggcgacaatttctggcctcacagaaataaaggaaaagtaaacacctggaggaggaggaggtgaacctggagctcccgccggcctctgggcgctccttggtggaaggagagggacttggtcctgagcctgccccggatctacctacaccagaaccccggagtccccccgaatgggctcagtcccacccaggccagacgccccagagccccgtagcccgggtcctccagccctcgctgccgctgcttctcgcggagccgggcccgccccccgcgccacctcagcctctgcggggctctgggagggcagcgccgaggatgctccgggcccatcgacggcatccgggcccagctggggtatccggcctcaggcggatactgacgccctgagggcgcggaatagggcggcctgcgcagggcccgccgtctcgggccttgcaaaaagagcggcctctccaacgcccctaccggaacctccccggaggccccagccccaaagccagggcgattgcgcctccctaactatgggtgaagaaaaatcaggtcctccctggagacccggcccgccgagggaggcagactgctcatgcgccctgcatggccggaaagatgggtttcattgccctctgccggccatgaggtggcagcacaggacgtttggccttagcggtagacctgagtctgaatcactgaaattcaggtgtggattattcagtactttccttttggaagatcaaatggaaattgagtacgatatcttgtgctttaattaaagaagatggaaataaagaagcaaatacaaaaatcagtatacaaaagtcgattgattccctctatgtggagggaagacgagcttgaataagagaagcattctgtgttacgctttaataatggctggagatctgccaccatgcatttgtcaaatcccatagaatttcacagcacaaatagtacatcttaatgtggctcaggagtacatataatgtcagctacagtttgtgggtaaattacatatttaattaaatagattaaacaataaataattatatgagctctgtctgcctggacacagtccttgcctctccaaccagtttgccaagggcttgaatttcttgctcattatcctcacagttgacataaaccctggctgcagagtaaaatcaatcatttgtggagtttttaaagtataatgatgtgtcaatttcaaccatggataaggccatttagccttagtaaggccgatcgtattaagattgtgcctgtttggcaaaatttcaagtcatcccacttgatattcaggaaacattttctcttgagttttaggttcagtggtgaggctccttcacggacaatacattttccaattctgaggacaaggcagaggagggcccctctgtgagaactttcattttgcttcgggaaaagtacattgaatcaaatataggaaagacttgcaaggtagctgacaggttcggctgttttatcatgctggtgttttatcttctggactgcagtaaaaggagcacagctgtgtctatctctgtgtaataactcaggacttacctgaataaaatgtggggtgttatgagatgaacttctacttccagttagagaggctccagggacaaaatttcaagagccttctgagggatagaagagaagagctcccttattctctgatcccaggtaactgctcagagacagaggaaagggctggggacacccaaatgcatatactaagtgtctttgatacagcctccatttccctgctaaatctatgcaatgacacactgagaaatctagcaagtggggctgaagatccctggtgtgtcaactcgagggttggatggaaacaagtgattttagtggacgttgaagtaaagggaggtgagctgtgaggaaagagctgttgaagactggggagactcagaagttggggtagaatctcgaccaagaatctcacccaaggggtgcagatgcaaatcgatttgttagggctgcataaatgaaacaagggctttgccaacatactaagttttttcaacaacagattgtattctttcaatatttgtaagtattgatcttttggaaaagtttaatgagatttcttatataattctgcattcaattttttccctggtcactttgctattatgcatctacatgccacatttttatgaatagatattttctcaaatttctgaattattttgctaaagtatgtgttaagagttttttctagaggtccaccttcttgactcacttttctgataagaaatctatcaggtttcttcacagtgattttcaagtttgatagctcctcaatgtgagaaacttagtgtcaactaagaaatgaattaccactaaagaattttctcctttcaagatgctaaccatgttttgtccagtgagaaatctcacatgtgccacaagtgttgctctatgaagaaaggatttctcatgatttttcattgcataacttctccagtaagacgtatttggtattccaagagaattcattgcccttggaaagactttcccttcttatttagcttatgaaggcttt

SEQ ID NO: 1884295 - DNA, 4001 bp, Homo sapiens
cagaggtttccatttttttttgacctctgtcaggttctgttgcatcttgattacacaggcaaaacatttattacaacaaatgctgttttctaggaagagaatggagactacacatatgtggaaagagtgaagatacccttggatcatgggaccttgttaatcatggaaggagcgacacaagctgactggcaggtgaggatctgcaagtaatatgaatctgctttcatgtggaggcagtttcctgactctgaggactatttctaagtagacatggtgaaaagcaagctgcttttacaacgagcaagagggaatgagctgacattctttccaaggagttttgctactactgacaatccaggtggacactagtgtgtccggtagaactttctgtgatgatgaaagtgttcagtatctgtgctgcctattgtagtagtcactagccacatatgactgacttcttaaaatgtggcttgcatgctataaagaactgagtttttaatttaattttaattaacttaaatttaaatagcttcagggtagctagtgactatcttattggaatacacagctctgcagctaggccatgccatttttaggccagatcatttctaaggtgcacatgttaatgtcaaaacacttaccataagaatggaatctcatgcctctctttggtctcatccatttatatgttttatgagatttgggaaatggcaggtgtctgagaggaacagcaacaattagaaaagatgaaaatatctcacttcagaggtgctggcatagcacagtggggctggggatggaaatttgtttcaaagaagggacctttctccacaagacttcaaagagcttactactcatttaagggggatgagatggaaatatttctgcattctcatgaataagttttaagtcgctttgaactaaaagtgtgtatgtgtgtatttatgtcagagttatgtgtatttccatttagcatcgagtgcccaaagaataccactctagagaaccgagagtgaacctgacctttcggacagtctatccagaccctcgaggggcaccctggtgacgtcagagctttgagagagaagcttcactgaaacggagcaaaccttccactgagaagccacttcaagaggctggtgctgctagatctcatgatgtggctgttgggaagatggtggggtttgtttgccagcttggagtcctattaaatgaaagccagcaactcatgttggtaataggtctactgtgggaacagttatccctaaccacagctcaaaatcgctatcatctttaggcaaattaaaatctatgtggcagtgctcatggatgattttgttctaagcagttttcctcctgccctcccccgccccccacacgccccgccttcatttgaagaaatatcaatggacttgtgcctctggggaaaagaaaatctcacgtgtttgttccttgtgacttcagtgaagtggagatataaatatgcgtcagggactctggagccttccgtaggcagacagctgctgaaacccaaacagaggtggtttcatcttggcttgcatactattgtaatggaaagctacatattcagggaacactgtaactgagtcttcctgcaacacactcaagacaggttacaggcctccaaataaagagtggtggcagtatgctctcgtctagccaccttcaagtagtcacctgtaatacaagagaaaactgtccccttaaagggaggaatcactgaatgatgtcacgggaagtagcaggctgaaattgaggctgaagagcagcagaaggcctgctcatgacagctgttccacatagattattttcccctcgggaatcacttgagtcatctagacccaagtcagatagaagtgggagcagccctgcagggaatgcactcaattgcctaatagttctcgtcaccttgtgtttcagtagccctatgactaacgctctcttctgactcaatgttttcttacatacaaggtcccaaggtacaagggttagtctgtgatgtcactgaggttcccaaaacaaaacagagtggctgcccattgttgcatcataaaaccacgtgtcttcttgacctcttgactcaggagccgtgtaccagattcattccaaaccaagatacagaaaacctgagagaaaggaaatgaatttaaatggatgaaaatagggcgggagagttagagtttctctgtctgccagtgggggaaaggtacagtgccttcttgctttttatcctgtttccattccaggctgtaagattgatgctgtccatgatcataggaaaatgccaaaggctgggcatgctctgactcggcactcagatggagcaccatgcctggccaggctgttctctgacaagctctctggctcctggcattgtagtccccctgcccttttaaaaaacaaaaaacaaacaaacaaaaaatgagcacggcttgtttctctaagaaatatgaaatactttctaaaatttgagcaccacaccaagctttcctgtgagggaggttcaaatcaccataggaataaaataaagcctcttttcaatgcttagctgttctcctattaatgcaaataatacctggccaggtgatacagccagctttggtgatcagtttgatgcatgacactaggaaatttatcttccattccttactaatgaaagaactggcagatggttccaagtcttccagcgtccctctttcttaatggagggtcatgatctccccgtgtggcagctgtgcatttgatctcttcacttgtcacacccatgtcttccagggaaacatttctactctacagcagatggagtgggccaccacctgggtttcttggtctgagagcagcaaatcttcagttttgtttttcttgctgtcactccagataccacatgccagaactgcccttttctttaccattaagataatgtcccttctgaaatggcaagtaggtacttgccatagagtaaaactacagggtgtaggcatggacaggaattccagaccatggcaaagggcagtgtgcctcagtgactgcagcagcctgttgctttgttttgctggtgctagatctgaactaggaattagaggtgaagctgtttttgcttacatcgcgtgtaaagctgaggaagcaaatataacagcggtagcatgaagaaaaacaggtttcggttttgtttttgctgcccttcttctgagcttcagcaggcactgtcctaggagcttttatacataatcccttatccttcccacagcgctgcaagagagaggtcctattcccattgtagaggctaggaaactgatctccaagacgttaggtaagttaacagggcttgtagtggcagaaccagattgcagactgcaggctagtttctcggcctgtttggtttccctttgccatgctgaatgtaggcgaaatggtctgctgagcactcccgggagcctgagcctcagggctggctcctgtggagctggtcacagctgaccacaggccacctgtttgttccctgactttcctgttcatcagggcaggcatctgcatctcatctttccttaatcagcatcagcatcctctagccagaaactgctggtgactggactagcagttgcccatttcattggggaagctccttttgaggggacagaatccaacttctggtgagttagacaaattctcagccaactttccttgattttctggcaagtgtttcctgaccatatccaccttcagagatatgaaacttttagagacagataagttttccccggtggtcctttctcacctcattcttacctgtgaatacacttggggaccctgaatgacacccaaactcatagcaggctttttcacaatacttaccaacaccattactccagtcagcagcccaaagaaacatcaggctccacactaaaaatgtcttctttataacaggcaacttgcttcaaacatgggttggaacacacacttagcaccagattgcatcccca

SEQ ID NO: 1884296 - DNA, 4001 bp, Homo sapiens; identical to SEQ ID NO: 914276

SEQ ID NO: 1884297 - DNA, 4001 bp, Homo sapiens
tgctctgtcacccaggctggagtgtagtggtgcaatctcggctcactgcaacctctgcctccctgggctcaggtgattcttccacctcagcctcccgagtagctgggaccacaggtgtgtgccaccactcccagctaatttttgtactttttgtagagacggctttcaccatgttgcccaggctggtctccacctcctgggctcaagtgatccgcccactttggcctcagaaagcgctgggattacaggagtaagccacaacgcctggcccttcatcaagtcttgacgcactgctatggctcagctacgcccaaccactctgccctggagagggtgggccaagtggggcactacagtggtcttcagacaatgaggctgtaagcacctggaggtggagggccagcctcaacctggccatgagcctgtgcagagccctgggggagcctttgtttccactgggtctcagagtcctactctgtaaagggggcacagtggctccctccgagcctgctcctggggtagggggtatgagatagtatgctctgccagccaggcccctccgtgtgcttccagaagggtgcgtagtagcaagtattccagggtttcaggccataatccaccgagtcaacctgaagtccctgctccaggtaatctgcattcttcaggaggcccaaagctggcaaggcttctcttccaaagggtccagtctctcccacgtgagcctggccgtctctctttcctacgtgaccctgggctggggtcaagatagacagacctccttgctggtggcaggaggcacactgcacaaactgggtgcctttccaaggccaggcctggcacagtaaccagggtggtgccctgccatggtaccccacctccataactgtgccctgctgtacctggcgaagtttgttgagcagttccggaatgcccgccagcctctgcgtggccctctggtagtcccgatactggagcaccagctgcaccatctcggggtctccagtgctgactgcctcctgcaggactgcgggcaccaggctgctgaggggagccctccagatgaccccaggcctggctgctcactgccccccgcctgccagcctcagggggagccccttgtcctctgcagtacctgcccagccctggcggttctctttgcccacgttggcattgtgtcgaaggagcactctcacagactccaggtttcccagagacacggccagctccagtggggtccgcccgcgggggtcctcctgttcaatgtcgtgctgggggagacgggacactcacaaagggcaggagagaagagggcaaggcagggaggctgccagggcgagcagggttgggaatcgctgtgggaaataaggacggcggactgaccagggagatggcagagggtggcctgcgtgtcctggcaggggagaggagggggcaggagggaaggcaggggcagagccggggtctggcggcggggcctggtcaggcagagctgcaggttgtcaggagtttggcggaacctggggaccaggaccagagttcttgttctcagcttgggtcagcaaggatgcggaagcgagttcgggcgagcagggcaaggcccagcgcaggggagaggaggccagaggctcaggcgcgaggggccggtgacctgggcttgggatcgtgcaggggaggaaggcccaggatgtggctgcggagctgagcgggcggggggggggggggggctccaggacggaggccacagccttgggtgggggacccgggggaagggccgggtgccccagcggggcctcacctggtggctgtgcagtgcggcctccagttcgcgatgccggttcgcccagacgagccggtgcagcgggaaggtggggcccgggccggccatgctgggcctcagcgccgcatcccggccccgcctcggcttcgggcctggcacggccccctagcctcccctccgagccgcgccccagctgcgccccccgcggcccccgcagcagtagcggcggcggcggcggcggcggcagcgcgggcggcagggagggcggggcgggcggcggagcgggcggggctgcgccgggccggggcggggcttcgcgcgcgcccccgtccccccgcaaccatggcaaccgcggccaggccagcgcgcggcagagcaaccgcgagcgcccgaggagatgcccggccttgggtctgcgccccgacctcggtcgggcccgggtccgctggggcggcctggagggcggtgcccggttacagctccgcccgcggcccgcaggaggcgccccgagccctgcgcagacccccggagccgggtccggaagaggaaggcggggccggagggggcgggcactgggcccctcggtagtgcacgcgcgtgcgcggcgggccgcggtcctgctgcagccgtgatgcctgcgtttcccccgcggatccccttgctcgccccggtcttcctaccccaggtcccgcggtcaccgactctgctggggtgtgcgggtgaagtggggcgccccggctcccctcacccggcctggagacgagcaacgagcagacgccactaagtgcttgccggctgagcgggaagcaccttcccctgggacctggccggtgtctgcaggcccagcgatgcggggaggcggcccccggggccctgaagtcagggataggagttcggggagagaggggcgcaggcccaggcagcggcagagccgtcccggcggaggaccgcccgcggcgaacggctgccttcgcccgccgcacgagtcccttttgcagaggctgcggttggctgccagcgtcaggagaggaaggcgagtttcgaaatcagggccggcccctccacccacaccggaactagggtgcaggcctccgtcagctcagttccggcccttgattactggaggcccagcctggggtctggggccctggttttgctaggtggccaaggctgaccctctattctccctttccctacgtggaacatgattgaggagggccagctagcttgagcatcacttcctgctgtagggcgtcctcagttctgagactctgggctggaaggcctgattgccatttttaccctgccttctccctgtagtcacatggcgcctgtgccatctggggtcactttgccaccccacgctatggtgtcaatctgtgaggtcctggggttggtagcagcccgaaggcttctgaatgcccagagctcacctgctcaccactactgcagccctccctggccaccccttttctcagaggcggtcccttccctgagccctctccaaactcaaccccgacaggactttcttggttccagcctctcctgatttctgccatcttgaacacagctccccactggcacttaattccatgacagtgccttctcaaccctcttccacggcctcctctctctccctgacccccacatccctgggagagagactgtccgttcccattgtcaccctgatgccacccccaggtccacatttcagcttactccaggacatctctgtgcccagggatcccatgctatcccatcagtatgtccgaagccaacccaaccacacctaccctcttccccagactcccgcctcactcagccccaagtccagcctgtttctgctggaccacgttcttcccgtctggcctcttttcatctcttcctctcccactgcggaggtttgtctccctgcctcctgtccttcacctccctccccacatcctgtactcagtaaccaggcaatcactttagagccagctctcaccactctcagccctgttccgcaccttcaagggctccctgagcatggcaggtctggactccatgtcgtttgtatcttcattctgcaggccctgagcacacacctggctccgggataggttaagcctggcattcagtgcctccaggcatggctccttcctatagtcctccggccagcctgggccactcatgagtccctggctcttccctgcctcagaaatgtcctccctccttcccacac

SEQ ID NO: 1884298 - DNA, 4001 bp, Homo sapiens; identical to SEQ ID NO: 914290

SEQ ID NO: 1884299 - DNA, 4001 bp, Homo sapiens
ggtaggggatggttaatgggtacaaaaaataatgagaaagaataagacctagtatttgacagtacaacaggggactatcatcaataataatttaattgtacatggacaaataactaaaggagcataactgggttgtttgtaacacacaggataaatgcttgaggggaaaatacccagttttccatgaggtgattattacgtattgcattacctgtaccaaaatatctcatgtaccccataaatatatacacccactatgtacccacccaaattaaaaattaaatgaacaaacaaaatatcccccagcaacaaaagctatggcaaaagctaccaagtgaatgagggctccccatgcacatggataggggctgaggcagagctgagctcaggttctgtgcgtgcaaatctcaatctctgatggccagtgtcagaggcagtgccatgtcaaggtggccacagggccactaactagctgtgtgtccagaggtgaggctttcactgtcttagtcagggctctcccccaaacagagcctgagcagaggccaggggtgcaagcgttttacttgggaggtgatctcaggtgccagagtagggtgaaggggagggaggctgacaggggtgggttaaggagcggccaccgctatgtgcagctggggtccgtcctgctggggaccctcggagtgaccttgaagggcacatcccactgccagtacccagagggtgaggaagttgggtgatcatgcacccgctctggccctttcttggctgggggtcactcctggggtgttaatgaccctgcgcttgcaccttccccacacgtggcctgcggcagcacctgcacggtcagtcacctttgggtgcagaggacagtgagccactggtatggatgggcaccgctggtgggtgccctggggtgaccaagggggcggggttagggctccaacagggcctgccctgcctcagtttccttatttgtttgaaggactctagggggccacgggagatagcagtatggagcagtttgtttaaaaaccagatattcccacagtggcagtgtgatgggaccattgctaaagccaagcctgcattgctggaattcccgaggggtttggccggttatcaagacagacaggtcgatcagcaatctgggtttccgaaataagaaaaaataaaaaaagccatgctgggtagaacctaacaggcaactccaagctgctaatggtccacagagctgtgcctcatccctcgagctggccgcctggtttccacctcagtttcctgtggctacgtgaggacgctccctagggcactatcagttcccgaggggcatcatccgagaagagggcctccctgatggagtgcagggacggcatgctgcgccaggcagggcccgagcacctgtggcctttggacagagctgtgcttgggcctcgctggcctggagggtccccccacgtggtcgcctggagcccctgggcagcttccggctgcaccatggctctaaatggctgtgcactggtcgggaaaaggggcaggcagaatccctcattcgaggcaggtgggctgtatacaacccaaagtgtatcagggaagccggagggtggagcccctccccaaacagtcagcactgcagtgggggagagggggagggaaggcctcgagtggaggctgtcctttttagttgtaggggaaggagagaggaggctctgggccagggctgctggttgggggctgccccacctttcataggtgttgatgtcaagggtctagactcctctacccctggttaggggacagttggggccatgtccctggcaccttggcctctctggccctaggatgcctctcctggaaacagcattgctcaccacctgggagggcctggtcagcatctggtgccggcaggaggctgaaactaagcaactgacttctctctacagtaacacagggccccgctgtgctggtgaccttcaggaggacctggactcagtgtgcgtgccccgcccaccttgccctctgtgacaaagtctgagggtgcttaggggccacgaccacgcccatgtgggtgggtggcttgggagggctcagggggaagggtgggggagggctggcttttgagggcagtgggttcccatgcccagccccatgaaggacggggttcacggaagaccccagtatcgcaagtctgtagccagcacggggggcctgcattccttctgcaggagaagcacgaaagagctattcttctcaattcgccaaggaggaaactgaggcccagcagggcaggagagcccgggttacagcgcaggcgggaggctgagctcagcctcaagtcccatctgcacgcccaaggtgcggccccccttagtaggagccgcgactaagggtgacgctgtttctcggcccaggtatgtcatctcgctgagtccccacaagctgaccctatgagggggttactatagttaggtccatttgacctggaggaaactgaggctcccacgggtgagctgcccagctcagtggccctgagtaccagactcctgctggctgaccccagtgcagggctctgtctctggtgctgaggggcatggggagagtgcagcaatttagcaggcctcagttctgtcccagcctggggcagtggttaagcagggccagtagagacagcagataagcacaggctagtcgggaggtttgggcaacaccaggccacaggtatgtctggacagtgtggggcagcaggtgaggccagcccaggacagggcactggcttcatggcaggccgtgtagtcagccagacctgggtctacatctaggcttggcccctctccagctgcaaggcctgggggaggctctggacactctgagccccagggttggtttctgctaaatgcggagcagcgggaggcttcactgaggggatgatggtctctgctaagctcagcacacactgaccagaacgtgccaggatggacgctccatctaattctggggccaggcacctgggagccatccccgtcaccctgatggccacccaatggcagatacgctttcccctcaacatctcagggaggtcaaacaagggcagggttacagggagctggtgactaaaggtgcttttctctccccatggctgagggggcaaaagagcccgaccggaagctgctcttggaagacagaagcccatgtgcagggaatgtgccagtgcccagcaggtgaatgcagggtctcgaggggtcggagggcacacctgcctgagtcccaggtgcgcctgagggcttcggctattcctcctcatctcctccccatactgccttccccagtctcctctccccctcccccaggccttccccagtccctcctccttgcctttgcagacactgtgtccctccctgtacgccctttctgtccttctcagccctttgtaattcaacctggttttcagggcacagggcaaatccagcatcctctgggatctgaaggtggccagcccctctggcctctgcaggtctctctgtgctgggactgcctctgagccatctacccacaagttcttaacttgcaaattagccccaaagctggatggcaggaccccggaggcctggccagggactgtctagagatgtgttaggacagagctccaacctgacctcagtacacagggactgagaacctggttggggctccataaacactcctggttggcagggataatgataatagcaaacaaatccttagagacagggaggaaattccacagggatccctccaagccagaaagcagggaaattacactaaggagtggccaaaaatcctctatcaagttgaaacagggaaggctaccaggttcaatacgaacccccatcatctgtccactgggggcctatcaagggacacacctaccctcaggggcctacagtctttgggagagcagaaacatcatctaacttcccatgcatggtggagggagagacagcactggggcctgatcaagagtgggc

SEQ ID NO: 1884300 - DNA, 4001 bp, Homo sapiens
agaaaggacccaggagggtgcgtccgtccgtgtgaatgcacttgcagatggctgtaatcaccctaaccgcgcgacttaacatttgtaaagagcttagcacggtgctggctcatagtaagcgctgcgcagctgcttgttaaataaataaacataaatggggaacatctatagtgtgccaaggatgggaaggagagtaaagagtgcagaaatgaagcccaaaaaactgaggatggtgggcagaagggaacgtgagtggctggagtcgaggatggaaggagcagaggtgagggatgccgtctgagctggaccagaaaggctaccaggaggaggtggcctagccaggctctcagctaccccaggtgagctttaaagctcttgggattctcagaaggcaggccttgtgttcacaaaacacattaagaatctgaaaaccctcctatggaaactggatgtccatggattctgttggaggaaaaaaaaatccgcaccctccccccgccccccacccccaagacagaacttcatgctttggctgcgtttctgagcttcggccggcagtttccgagcccatggagtcccgccgtcaagctgcggttggccggcctctgctcgggcactgacatcatgcaagggaaggaaatgacagtggtcccgtctcccgcccaccatatctcagttgtaaattctccaggcacgtcttccccggggtaattatagcccaagttgcttttaggaggtgatatcatttacctgtttggcctctgtttctgtcctacgcgggttgccgggcagcacggggctggtgtgggagtgggacgggtggccattggcgctcacaatggccttgagtcatgactgctcactccttccatgctcctttccctcccctgggctgctcatgagtcaacagcacttattaaacccctctgaatgcagagatttgtactgggccaaccgaggggcagggcaagctcagtgcacccgggctgtgtgggtgccacgacctctaccaatggagggcaaccctgggcacctgtgtatttctattttgtaaaaagaaacccaatctcctttctgccacctctctaattctagattgtgtgttgaattcatggagtgagctctggtttgaggggtgggggtcaggagagctagactgaaagcctagtttgctctcctgcctgaccttaagccaagtacatcacctctccaggtgtgtgcacctgtgaaatggggactgataaagctggcccccccaggtccagttgacatgcaggtgagggctgctgagaaatctgagagcagtggtgctcaactggggctggttttgtcccctggaggatatttgacaacatcaagaaacatttttagttgtcacactggggctggaggcagagggtgctgctggcatctcatgggtgggtagaggtcaccagggtgcctgcaaaatgtcccacactgcacaagccagctcccaccacagaggatgatccagccccacacatccactgtgctgagacatccactgtgccccacgctagagctcctttattagaagagacctttgcctccctggcctggactcaccaccgccaggcgctgggcctcttggtcctcgcctaccatccaaagggagacacttcagcctcactttacaaaagaggaaatctaggcacaccaaggccatgcggttggttaatggggagcgaggttcttgttccggtccatggtcttggtaaccagtccctgtgtctccataatttggggcacctcgttcttcctccctttgtaaagtttggtttgttcaacttcccactgagttgcagacagcttggcccgtgctctgaggtattcttccctgtgggcaatgccaacgggatggaaataaaatatcgttgaaaagggctcccctgtgctgcctcctaccaggaagccaccctcctgacagcttgttggtctgcgctccttgtcacctgatgcttgcatccccggtgactattaaaatgtccgcaaagtgctcgcttcggcagcacgtatactaaaattggaatgatacagagaagattagtatggcccctgcgcaaagatgacacgcaaattcatgaagcattccatatttaaaaaaaaaaaaaaatcagcaaagacacctgtacctgtatctgttggcacatgccatcaaatgacactgaagagcaacactgtggccaaacaggccagctgggaggcccggagcttcccataatgaaatgcaccatctagacgaattagacaagggttttactaattcatgagcagggaattaatcctgcccacaaaatctgtccctgtggggttttagtgataaaaatcactgagacaaaaagaaaactgggtgcaacagtttatggagagcccccacgtataagcagttagtgactggagtggagagagaatcccagcaaagtgacccataggacacaggcggggacagggaaccagagaagagaaccatctatggaacaaaaaggaccctgtaaacttgtcctggcttgggagatatctccagctacaggaattcttttcccgctcctattttggggggctattgtttttactttgtgtcggtccctgaaatccctagacccacgaacccccggcgaaggccacgagaggcctggaggcagaactggtcctctctggcccttgctgcacagaggccacgctgcatttcctctgcccttgctgtggcatgtccacactgtccacctgggaagacttggggaaggggcgagaggaaacagaatgtggggatactggagagaaaaaaagaaacatagtggcaatagcaaagaaagtggagtcttacaggcaagcagatgccctgagcctggctacagtataaatcacagaaactagaggttaagcactgtttcttgagtaaagccgcaaggggtgctgttggggagaaggtggggccaccttgcctaggagatggccccccagcaggcagcccccaagccccagagccctctcaggccagaaatgtcacttcccaaacctttgggagcaccagtgtgtccagatttggccaagtatatttttactcttttttttttttcatgcaaactgcacctcatagagctctggaaggtctgttggcactcgaacacaaatttgaaaagacagtacattagtattacacaatgttggttgtttaccaacaaagataagtggatggagttacataatcctctgtacatgcgtgtgggattctcccagccctggacacttgaacttttaaggagcagaggctgtggagcactgttcctggcatggatttggccagcctggggcacttctccaaaccctctctcgctgtccaaggtgcagacaaagggtcctttagggccactcagtgcccgttggcaccaccagcctgagaaccaaatagccttcctgcaccgccccaagttcaaggaagtcacagacttgtgcctaaatgggagagtctcactgaggcaccaggaaagggtaggtcatgacaagatgacattagtagtgacaacagtcaccattgctaagcctggcagcttcaggcacgcttaaaactcccatgagaaggcagaggctctgaggcccaggaggctctgaggccaaggaggctggcacaaggtcacaaggctggaaggtgccagagctggagctagaccccaccccttctctccaaccctatcctagctgactccaggttccatgcttggaaccatggcacgctgacgacatcgtggcctttaaagacaattttctaatcacttctgtaggccttgaatgttccccagtggccatttaacaagcaattattgagcatcggctgtgtgaacctggtagacaacccactgtaaaatgagacggaataaatgaagtgctagttggggttcaggcaggttctttggatagacaggaaggcctgcatatttgggtgggaaggggacagtaggggagaatccagcaggacttcctgc

SEQ ID NO: 1884301 - DNA, 4001 bp, Homo sapiens; identical to SEQ ID NO: 914298

SEQ ID NO: 1884302 - DNA, 4001 bp, Homo sapiens; identical to SEQ ID NO: 914304

SEQ ID NO: 1884303 - DNA, 4001 bp, Homo sapiens; identical to SEQ ID NO: 914306

SEQ ID NO: 1884304 - DNA, 4001 bp, Homo sapiens; identical to SEQ ID NO: 914307

SEQ ID NO: 1884305 - DNA, 4001 bp, Homo sapiens
agagaggcctggaggacctgctggggactaaagaagagcactggtgggaggacagggcgggggaagggggaggggagtgaagtagtctccctggaatgctggtggtgggggaggcagtctccttggtggaggagtcccagcgtccctcccctcccctcctctgccaacacaatggacaatggcaactgcccacacactcccatggaggggaaggggatgagtgcagggaaccccgaccccacccgggagacctgcaagcctgcagacactcccctcccgcccccactgaacccttgacccctgccctgcagcccccgcagcttgctgtttgcccactctatttgcccagccccagggacagagctgatccttgaactcttaagttccacattgccaggaccagtgagcagcaacagggccggggctgggcttatcagcctcccagcccagaccctggctgcagacataaataggccctgcaagagctggctgcttagagactgcgagaaggaggtgcgtcctgctgcctgccccggtcactctggctccccagctcaaggttcaggccttgccccaggccgggcctctgggtacctgaggtcttctcccgctctgtgcccttctcctcacctggctgcaatgagtgggggagcacggggcttctgcatgctgaaggcaccccactcagccaggcccttcttctcctccaggtcccccacggcccttcaggatgaaagctgcggtgctgaccttggccgtgctcttcctgacgggtaggtgtcccctaacctagggagccaaccatcggggggctttctccctaaatccccgtggcccaccctcctgggcagaggcagcaggtttctcactggccccctctcccccacctccaagcttggcctttcggctcagatctcagcccacagctggcctgatctgggtctcccctcccaccctcagggagccaggctcggcatttctggcagcaagatgaacccccccagagcccctgggatcgagtgaaggacctggccactgtgtacgtggatgtgctcaaagacagcggcagagactatgtgtcccagtttgaaggctccgccttgggaaaacagctaaagtaaggacccagcctggggttgagggcaggggtagggggcagaggcctgtgggatgatgttgaagccagactggccgagtcctcacctaatatctgatgagctgggccccacagatggtctggatggagaaactggaatgggatctccaggcagggtcacagcccatgtcccctgcaaaggacagaccagggctgcccgatgcgtgatcacagagccacattgtgcctgcaagtgtagcaagcccctttcccttcttcaccacctcctctgctcctgcccagcaagactgtgggctgtcttcggagaggagaatgcgctggaggcatagaagcgaggtccttcaagggcccactttggagaccaacgtaactgggcactagtcccagctctgtctcctttttagctcctctctgtgcctcggtccagctgcacaacggggcatggcctggcggggcaggggtgttggttgagagtgtactggaaatgctaggccactgcacctccgcggacaggtgtcacccagggctcacccctgataggctggggcgctgggaggccagccctcaacccttctgtctcaccctccagcctaaagctccttgacaactgggacagcgtgacctccaccttcagcaagctgcgcgaacagctcggccctgtgacccaggagttctgggataacctggaaaaggagacagagggcctgaggcaggagatgagcaaggatctggaggaggtgaaggccaaggtgcagccctacctggacgacttccagaagaagtggcaggaggagatggagctctaccgccagaaggtggagccgctgcgcgcagagctccaagagggcgcgcgccagaagctgcacgagctgcaagagaagctgagcccactgggcgaggagatgcgcgaccgcgcgcgcgcccatgtggacgcgctgcgcacgcatctggccccctacagcgacgagctgcgccagcgcttggccgcgcgccttgaggctctcaaggagaacggcggcgccagactggccgagtaccacgccaaggccaccgagcatctgagcacgctcagcgagaaggccaagcccgcgctcgaggacctccgccaaggcctgctgcccgtgctggagagcttcaaggtcagcttcctgagcgctctcgaggagtacactaagaagctcaacacccagtgaggcgcccgccgccgccccccttcccggtgctcagaataaacgtttccaaagtgggaagcagcttctttcttttgggagaatagaggggggtgcggggacatccgggggagcccgggtggggcctttggccctggagcagggacttcctgccggatctcaacaactccgtgcccagactggacgtcttagggccaagatcgacgttggaggacctgctggacgcctggctgcttacgagtgagggagtagagtctgccttagcaaggctcaagtagaaaggaagtcacagcggaccaggcaaagccacagacaatccaaggccaggtgccctgaaaggggctcaaacaaggcctgcagccctgtctgaggcgggccaggaaacagggttgctttagctgggagcagtgggttccccgtccccagaggtgtgtccgtatagagccttctccagcccagccgctgtcagcggggcgggacggagcggggcggcctcagggagccagccactgggattggggtttggtcccgggtgcaagtgaagcgcttggagtttgcgcctgtcctcctttactaattcaaaaacctctcaaacagacacttcccttttcttctcacaaggccagtatccccctcccactactcccatcccgcccagaaacagccgcggcttcctcaggcacagcagtggaagccagtcctccaccccctgcggctccatgccatgccaccccctctttctgccagccctggcagaagctggcctgagtaagaaaattcaccaccacctcttgcaggtacatttttatttccaagatgctctcatatctgtgctctcactgcatcctcccttccccacatcctggctagattgccatcagacgcagagcatggatgaggacactgaagcctggacctgtgacgtcgcttgcccagtgaacagcaggatgggctaggccgcgctttttagaccctgcacccctggccatccatgattattgaaaagagtgcgcgggtcgggtgcggtggctcaagcctgtaatcccagcactttgggaggctgaggtgggcgtatcacttcaggccaggagtttgagaccagcctggccaatatggtgaaaccctgtctctactaaaaatacaaaaaaaatcagctgggcatggtggcttgcacccgtaatcccagctactaggaaggctgaggcaggagaatcgcttgaacctgggaggcagaggtcacagtgagccgaaatcatgccactgcactccagcctgggcgacggagcaagactccagctaaaaaaaaaaaaaaaaaaaaaagagtgtgtggcctggcactcaagttcacatgggtgtgcaggcatgcctgtgtattctcacatgacctccctgctcacggtccctccttgcactcatgtctgaatgtccccgcgtgcacgcacatggcttcacagatctgggcagtgccttccctaccctctctctgcagggccttttgccccctcatgcaggcccctggataatcggccccatccccatgtccccatctccagtgtatcttagctaccctaggtaaaggagtgggctttttagttcctaaccttccagagctacaacagcagtcatccagccaggtctgggtgggaacattttctagatacgggtgctgagatctctcagcccagagagaagcc

SEQ ID NO: 1884306 - DNA, 4001 bp, Homo sapiens; identical to SEQ ID NO: 914330

SEQ ID NO: 1884307 - DNA, 4001 bp, Homo sapiens; identical to SEQ ID NO: 914334

SEQ ID NO: 1884308 - DNA, 4001 bp, Homo sapiens; identical to SEQ ID NO: 914345

SEQ ID NO: 1884309 - DNA, 4001 bp, Homo sapiens; identical to SEQ ID NO: 914347

SEQ ID NO: 1884310 - DNA, 4001 bp, Homo sapiens
cactttgggtatgatttgtttagaagcaggaagatgaaaagggtagcctgtagaagaccttgccaccccaagaaatcactgatcttattgcttggtccttgggggactcactctccttctgtgccaggacacgggtacctgcctctttttttccctagatcattggaggtatcgaccactcgctgtacacaggcagtctctggtatacacccatccggcgggagtggtattatgaggtgatcattgtgcgggtggagatcaatggacaggatctgaaaatggactgcaaggaggtaagaaaaccaagggagagcctgggaacataagggggtaggcagtacaatgtgaaggaagactctggttatcatgttgggaggatgaggcagaggtaataggacctgcagaaagggttggaagttgagcctagaacagtcaggggcttaatggtcacacagcaggatctgcggtttggggcctagggactggtagtgaaaaaaaaaacatggaactagttctgatgtctggactctagtcactgccttgcttcgtagccttgggcaagtcttttgtgagacagggtgatagaatgaagagtcttgtctttggagtcaggaagacccagatctgaatctagctctgatttgtactagctatgtacccttaggccagttactattctgtgtctcagtttccttatctgcaaaacaggtaaaaacaactttctcagaatatcagagataatgtgtaaagtgtttatctctgtggttggcagtactcaataaaaggtaactaaatcatttatgtcttccttccctagattcttatgtatgttaaattagaatagatataaatgtactaagaaaagttaaaagcggccgggcgtggctgtaatcccagcactctgggaggccaaggcgggggcagatcatttgaggtcagaaattcgagaccagcctggtcaacatggtgaaaccccatctctactaaaaatagccaggcgtggtggcaggcacctgtagtcccagctacttgggaggctgaggcaaaagaatggtttgaatccaggaggcagaggttagagtgagccgagatcacgccactgtactccagcctgggtgacagagctaatactccatctcaaaaaaaaaaaaaaaaaaaaaaaaaagaaaagaaaagttaaaagcactaaacaaggtatttttattttcaagtttggagactacctgcccacccaagattaacaagaataaacatttaccaagtgccttctctctgctgggcacgattctaagtgctttacattgctgatttatttaatccttacaataaccctttgaggtaggtgctatttttatcctcactttagagatgaaggaactgaggcacagaggttaacttgtccaagcaggtacacttaggaggtgccaaagccaagatgccaacccagctggggccccagcagtaaccccctactgcccagagcccagcatcaaaaaccttttgactcttttaactctctcttttccctcttagtacaactatgacaagagcattgtggacagtggcaccaccaaccttcgtttgcccaagaaagtgtttgaagctgcagtcaaatccatcaaggcagcctcctccgtgagtggactaaggatgggggtaaaagagatggtacagtgtcagagggaggcggtgagagtcacattcttcagcaacagccaagatgtctgcacttagacccttctactcagagctcttaaaacactcttcccctagccaggcgtggtggctcacgcctgtaatcccagcactttgggaggccaaggtgggcagatcactaggtcaggagttcaagaccagcctgaccaacagggtgaaatcccatctctactaaaagtacaaaaattagctgggtgtggtggcgcacgcctgtaatcctagctactcagggggctgagacaggagaatcactttaactcaggacggtggaggttgcggtgagccatgattgcgccactgcactccagcctgggcaacagagtgagacactgtttcaaaaaaaaaaaaaaaactcttcccctttatggctgtcactttgctcatcacacaatcccccggtacaaaagtttgacatcacactccctctctcttcctgtaatcctctggttggtttacccctccccactttagatatttcactggaaaagcaaatgaagggcccagttaatgtatctgaacatgggaggggcgagatgataaagaggcttttcctcattgttatccccttcttgccaacacagacggagaagttccctgatggtttctggctaggagagcagctggtgtgctggcaagcaggcaccaccccttggaacattttcccagtcatctcactctacctaatgggtgaggttaccaaccagtccttccgcatcaccatccttccgcaggtatgtcccagcctgagtcagggggatctctcttaaaagtacacactgggagacagtgagcaggtatggcttgccagaacttggaagacaaaacagatgagtagtgtccagcagtaaaggggtctcagaaaacccgttagagctcagggatggtaaagggaagggcatagatgcctacaaggcagagatggggtgaaggagagtgaggaagacactcaccctgtgattgcttacccctagcaatacctgcggccagtggaagatgtggccacgtcccaagacgactgttacaagtttgccatctcacagtcatccacgggcactgttatgggagctgttatcatggagggcttctacgttgtctttgatcgggcccgaaaacgaattggctttgctgtcagcgcttgccatggtgagagtgccagggctgagggtttggggtcagtctctccatattttccttgtcaaacaacagttagtatacctgggtccctgtcagtttaggggagggtagtaacagttgcctcaaacccaagtcaacagttgtgcaaaagctagtgtcaatgctcgtcctttttttgtactgcctgccataatgaccactgcctggattggtaacctctgttggaaacccagagcagcaagagttacctgggtaccttgggaagctcttgatgcaagggtagcagactgagtctatagtgaccctgtcagctgccacatggtgaggctgaatgctacttcagaaaggtggcagggttttgcagttggatttcagcagcagaaagttaagtttactagatttggcttttggtcaagggggtggcttttggtcaactcagaactactgacttttagttatcactcctaccagctgggtatacaaggaagggctgctgctcccagtgacttgggaagggagacaggcctctacctggtgctggcttcccagcctgctcctaaatatctcctgggaaggagattagataacttctgcatgggctaatttcaaggcctcactatcaggaagttctttttgttaactcctctatgacaatgagagctgtccattcacatttgccctctccccagtgcacgatgagttcaggacggcagcggtggaaggcccttttgtcaccttggacatggaagactgtggctacaacattccacagacagatgagtcaaccctcatgaccatagcctatgtcatggctgccatctgcgccctcttcatgctgccactctgcctcatggtgtgtcagtggcgctgcctccgctgcctgcgccagcagcatgatgactttgctgatgacatctccctgctgaagtgaggaggcccatgggcagaagatagagattcccctggaccacacctccgtggttcactttggtcacaagtaggagacacagatggcacctgtggccagagcacctcaggaccctccccacccaccaaatgcctctgccttgatggagaaggaaaaggctggcaaggtgggttccagggactgtacctgtaggaaacagaaaagagaagaaagaagcactctg

SEQ ID NO: 1884311 - DNA, 4001 bp, Homo sapiens
taaccctctacctgcaggcagctctgcctcccccttgtcttgtgaccaaggccaccaacactgtcactgaggcacaaaattggctggaggcaggaaatgagttcctaagcactaagtctttgcaacctgatctttagtaataatttattactacattatactagtttaattagtaataactaattattaatactaattaaattactggtttattcagcaataaataaataaacacttattgagcacaatatgccagacactcttctaaactctttatgttaacttttttaatcttcacaaacacattttgaagtaggtactgttcataaccccattttacaaagaaaaaactgaattttagggagtttaattgctgaaccaaggccacagaattggtgagttgcaggtaaaatttgaacccatttctgcagatgtcaagttgtgtttttttgtctttccatcatgctactgacacccaaaccaaatgaaactggcagcccggattctttcagagagatgttgtaaaagagttcccccagcaacctcacctgttaaacccccaaattaagtctgaagagcaaagcaggagtctgactgctcttcaaagggagagatgtcaggaagcatgatgtagtgaagcctctctctgctaggtgctagaagtgtactcctagacctgtcagcggccctctttggtattcaggatcttcatctgtaaaaggagaagataaaagtaatttggcttcgacaagattccttccaaccctgacattccataatcctatgaaacagctaccatttattatttcctctgtgccagatactgtgctgagtatttcacataatcgcaaaatcatcacagccaacaaatagctgtgatggagctgcaaatgatggagcactgcttatttgccaggctctgctgtaagtacttgcccctgtattatctcatttaatcctcagaacaacactaagaggaaggtattattatccccaccaccctcaaggatctaaggctcagaagaatgatacaaagctactcaaagtctcccaatcattaagtgctgctcttggggtttgaacccagatttttctgactccataacccatgcttttaatcactgtactacttcaagtgccccctcaacgtcaggcaagggcagacaccaggaataggctgtgttggtttttggttgccccactgactatccatctgcagttgtttttcttccattctgatcatcaatcatagtgtgacttaaatgggtcaggataaggagtccccagctgccatgcacagccacagcagccactgcccacagtcctttctgtgggctttctgggcagcattagtggaaagtcctatctgtgaagtaaactaacaagattgggggaggggtccccttatttatttaatcatcactccccaaggctaaactggtggcctggcaacagtgagtattttctctgagctcagaagccaactccaagtgttcagggtgaacaggttgggaaacttgagaaccacacagacatcaggaaaaattccgtgagtggttgtctgtggtgaaatgatgatatggccctgagtttgctctccccaggagaacttggaagctgcccccttttccacctcccacctcacttggaactaagtaaaccaagaaattctaggaagcagcccaacctgaaagagctggcttctccaggaaaagagaggggagggtgaagagacccagggtctgtccgtcccaaggggatggtcagtcacagaagtcactgaccagcactccaggccagatctcactggtccggccacagatttttctaatcctgtgagttgaactgcacccaaatgactgcagatgggatcagagatggaggtctcaccagtcagaggaaaagcatccaagtatcaggagagatgcatagttctaagaggagccatctaaaagcaggcagagtttgaaagaaacttccaattaaaaaaaaaaaatgcctttctgtgaggtcactccctgtgaggcaggagaatagggtctggaggcagggaacataaagccgattcatgctgacttcctagaactaaatcaaatggaaacacttcagctatgacaggaaataccctctccatttacacagggcatacactgagtaaatgactttgtaacttctttgtaactttgcttcttcctcttcatctacatagggtgtaaccaagtaaccaatggaaacctctagtgcatatttaaaccccagaaaattctgtaacaggggtcttgagcccctgtgcttggcccgctcccaccctgtggagcgtgctttcattttcaataaatctctgctttggttcctttattctttccttgctttgtgtgttttgtccaattctttgtccaagatgccaagaacctggacaccctccactggtaataactacaaccaaggtcaccacatcacactacctgtactttgctccccaaaaacagttgctagcatttattcagaaccttctctgttctatcagttaaaaaaaaaaaaaccctagtaatttctggaacaaaatcacaaatatactcactttcacaaacagtgtagacatgtcaagaatcctatttcttacccacaagaggaccagtcttgtccctttactgtgtgtttttgattgcactggtcactaagttttttctcagcgaaacagcaccttatcaatacatcattggtataggtttgttggctttcaatcatagtggtatcattttattcctgggccccaagggaatttggggccacaaggatctgatttcaaacttcagctcagccattttatttcttcaagaccctaaacaaataacctatgctttctcagccttagttttcccatctacaaaaatggagctagtcctagcactacctacctcaagaaattgttacaggaggagccaagatggccgaataggaacagctccggtctacagctcccagcgtgagcgacgcagaagacgggtgatttctgcatttccatctgaggtaccgggttcatctcactaaggagtgccagacagtgggtgcaggtcagcgggtgcgcgcaccgtgcgcgagccgaagcagggcgaggcattgcctcacttgggaagcgcaaggggtcagggagttccctttctgagtcaaagaaaggggtgacgggcggcacctggaaaatcgggtcactcccacccgaacactgcgcttttctgaagggcttaaaaagcgtcgcaccacgagattatatcccgcacctggctcggagggtcctacgcccacggagtctcgctgattgctagcacagcagtctgagatcaaactgcaaggcggcagcgaggctgggggaggggcgcccgccattgcccaggcttgattaggtaaacaaagcagcggggaagctcgaactgggtggagcccaccacaactcaaggaggcctgcctgcctctgtaggctccacctctgggggcagggcacagccaaacaaaaagacagcagtaacctctgcagacttaaatgtccctgtctgacagctttaaagagagcagtggttctcccagcacgcagctggagatctgagaacgggcagactgcctcctcaagtgggtccctgacccctgacccccaagcagcctaactgggaggcaccccccagcaggtgcacactgacacctcgcacggcagggtactccaacagacctgcagctgagagtcctctctgttagaaggaaaactaacaaacagaaaggacatccacaccaaaaacccatcagtacatcaccatcatcaaagaccaaaagtagataaaaccacaaagatggcgaaaaaacagaacagaaaaactggaaactctaaaaagcagagcgcctctcctcctccaaaggaacgcagttcctcaccagcaacggaacaaagctggatggagaatgactttgacgagctgagagaagatggcttcagatgatcaaattactctgag

SEQ ID NO: 1884312 - DNA, 4001 bp, Homo sapiens
agcattagtggaaagtcctatctgtgaagtaaactaacaagattgggggaggggtccccttatttatttaatcatcactccccaaggctaaactggtggcctggcaacagtgagtattttctctgagctcagaagccaactccaagtgttcagggtgaacaggttgggaaacttgagaaccacacagacatcaggaaaaattccgtgagtggttgtctgtggtgaaatgatgatatggccctgagtttgctctccccaggagaacttggaagctgcccccttttccacctcccacctcacttggaactaagtaaaccaagaaattctaggaagcagcccaacctgaaagagctggcttctccaggaaaagagaggggagggtgaagagacccagggtctgtccgtcccaaggggatggtcagtcacagaagtcactgaccagcactccaggccagatctcactggtccggccacagatttttctaatcctgtgagttgaactgcacccaaatgactgcagatgggatcagagatggaggtctcaccagtcagaggaaaagcatccaagtatcaggagagatgcatagttctaagaggagccatctaaaagcaggcagagtttgaaagaaacttccaattaaaaaaaaaaaatgcctttctgtgaggtcactccctgtgaggcaggagaatagggtctggaggcagggaacataaagccgattcatgctgacttcctagaactaaatcaaatggaaacacttcagctatgacaggaaataccctctccatttacacagggcatacactgagtaaatgactttgtaacttctttgtaactttgcttcttcctcttcatctacatagggtgtaaccaagtaaccaatggaaacctctagtgcatatttaaaccccagaaaattctgtaacaggggtcttgagcccctgtgcttggcccgctcccaccctgtggagcgtgctttcattttcaataaatctctgctttggttcctttattctttccttgctttgtgtgttttgtccaattctttgtccaagatgccaagaacctggacaccctccactggtaataactacaaccaaggtcaccacatcacactacctgtactttgctccccaaaaacagttgctagcatttattcagaaccttctctgttctatcagttaaaaaaaaaaaaaccctagtaatttctggaacaaaatcacaaatatactcactttcacaaacagtgtagacatgtcaagaatcctatttcttacccacaagaggaccagtcttgtccctttactgtgtgtttttgattgcactggtcactaagttttttctcagcgaaacagcaccttatcaatacatcattggtataggtttgttggctttcaatcatagtggtatcattttattcctgggccccaagggaatttggggccacaaggatctgatttcaaacttcagctcagccattttatttcttcaagaccctaaacaaataacctatgctttctcagccttagttttcccatctacaaaaatggagctagtcctagcactacctacctcaagaaattgttacaggaggagccaagatggccgaataggaacagctccggtctacagctcccagcgtgagcgacgcagaagacgggtgatttctgcatttccatctgaggtaccgggttcatctcactaaggagtgccagacagtgggtgcaggtcagcgggtgcgcgcaccgtgcgcgagccgaagcagggcgaggcattgcctcacttgggaagcgcaaggggtcagggagttccctttctgagtcaaagaaaggggtgacgggcggcacctggaaaatcgggtcactcccacccgaacactgcgcttttctgaagggcttaaaaagcgtcgcaccacgagattatatcccgcacctggctcggagggtcctacgcccacggagtctcgctgattgctagcacagcagtctgagatcaaactgcaaggcggcagcgaggctgggggaggggcgcccgccattgcccaggcttgattaggtaaacaaagcagcggggaagctcgaactgggtggagcccaccacaactcaaggaggcctgcctgcctctgtaggctccacctctgggggcagggcacagccaaacaaaaagacagcagtaacctctgcagacttaaatgtccctgtctgacagctttaaagagagcagtggttctcccagcacgcagctggagatctgagaacgggcagactgcctcctcaagtgggtccctgacccctgacccccaagcagcctaactgggaggcaccccccagcaggtgcacactgacacctcgcacggcagggtactccaacagacctgcagctgagagtcctctctgttagaaggaaaactaacaaacagaaaggacatccacaccaaaaacccatcagtacatcaccatcatcaaagaccaaaagtagataaaaccacaaagatggcgaaaaaacagaacagaaaaactggaaactctaaaaagcagagcgcctctcctcctccaaaggaacgcagttcctcaccagcaacggaacaaagctggatggagaatgactttgacgagctgagagaagatggcttcagatgatcaaattactctgagctacgggaggacattcaaaccaaaggcaaagaagttgaaaactttgaaaaaaatttagaagaatgtataactagaataaccaatacagagaagtgcttaaaggagctgatggagctgaaaaccaaggctcgagaactacgtgaagaatgcagaagcctcaggagccaatgcgatcaactggaagtaagggtatcagcaatggaagatgaaatgaatgaaatgaagcgagaagggaagtttagagaaaaaagaataaaaagaaataagcaaagcctccaagaaatatgggactatgtgaaaagaccaaatctacatctgattggtgtaactgaaagtgatggggagaatggaaccaagttggaaaacactctgcaggatattatccaggagaacttccccaatctagcaaggcaggccaacgttcagattcaggaaatacagagaacgccacaaagatactcctcgagaagagcaactccaagacatataattgtcagattcaccaaagttgaaatgaaggaaaaaatgttaagggtagccagagagaaaggttgggttaccctcaaagggaagcccatcagactaacagcggatctctcggcagaaaccctacaagccagaagagagtgggggcaaatattcaacattcttaaagaaaagaattttcaacccagaatttcatatccagccaaactaagcttcaaaagtgaaggagaaataaaatactttacagacaagcaaatgctgagagattttgtcaccaccaggcctgccttacaagagctcctgaaggaagcactaaacatggaaaggaacaaccggtaccagccgctgcaaaatcatgccaaaatgtaaagaccatcaagactaggaagaaactgcatcaaccaacgagcaaaataaccagctaacatcataatgacgggatcaaattcacacataacaatattaactttaaatgtaaatgggctaaatgctccaattaaaagacacagactggcaaattggataaagagtcaagacccatcagtgtgctgtattcaggaaacccatctcacgtgcagagacacacataggctcaaaataaaaggatggaggaagatctaccaagccaatggaaaacaaaaaaaggcaggggttgcaatcctagtctctgataaaacagactttaaaccaacaaagatcaaaagagacaaagaaggccattacataatggtaaagggatcaattcaacaagaagagctaactatcctaaatatatacgcacccaatacaggagcaccaagattcataaagcaagtcctgagagacctacaaagagacttagactcccacacattaataa

SEQ ID NO: 1884313 - DNA, 4001 bp, Homo sapiens
gttaagacataaaagatgtaagacacacacccacacccaaatcaaactggtagaggcaacaactacaatgttttatatgaagaatgaactggacaggatttcaatattagatattgaaaaaagattaatgaatatgaaaacatagcaattatccaaaaggaaacataaagaaaatcttgaaaaaaaaatgaacagagcgtcactgagctgtgagacaatgccagttagttcaatatacatgtatattatgtacatgcacatgactccaatagtcacaccaaaggagaggagcaagagaatggaaagaaaaaatatttgaagaaataagggcaatgtttgcatttgtcttgctctacctggtattcctatcaaggcacctggtatatattaggtgtttaataaacatttcttgaacacatttgcagcaaaaaaaaatgacaacgagtaagagataagcacctgagtgttactgcaacgtatttaggccatcagaggacaaaaaaggggaataatatggagaaaaggcttggtagaagtggcatgccttcagcagggacccacgaaatgggttcaactgagtgtgtacaaagtttggagactaggaagggatgaagaagggcattccacacaagaacaacacaaatgaagatttggagcctggcacagtggcccacgcctgtaatcccagcacttcgggaggccaaagcaggaggactgcttgagctcaggagtttgagaccagcctgggcaacatagcaagacccccatctctactaaaaatttaaaaatttgccaggcatggtggtgcttgcctgtagtcctcgctactggcaagactgagacaggaggctctcttgagctgtgattgcaccactgcactccagtctggacaacagagagaaactctgtctctaaaacaaacaaaaagacttggaatcaggaataaatatggttgaaactatactatctggactgaagtggtggttgcacttagtggtaatgagaaatgaagttagttggatgagttagggtcagagtatgcaaggctttagaaataggaaacaggagagaaaccattgaaagtttctgaacagaacttgtgatgatgaaatcagaattcaaggggagaaaaaggagcatagtggtggcatccatgatggatttggagaagaaaatactaaaggtgaatggaaagggtggaccaggggcaaacaggttattaaaacagtcccatcatgaagtgttgaaatgctggatgtaaacacacctaccacagtatcagtacagactaagggcttggataaatgttagtcaaatccaagtactaaaattcttcttggttcgcgaaaatttcagaagtggctcaaaaatctgtaatgcattaagaatattatttgcttcacaatatttcatttacttaagattttataagaatcagctgcttataaaattgttactttgtggtgcaccaaagcaccttgttctctccctcacccagatatgtttcatgctctttgtactttccaccccttaacagatttggagggaagattcaagccgtggatttttaaatttaaagcaatgctgtcacaaattgagaactgacaacatgtcattacacatttaattgccaccgaatcccagagtttaaaaattgtaaggacctaagagataggacctctcgttgtacagatgcggaaactgaggctgagagagggtaagtgaacagtcccaggtcacagagctgctaatgggcaaggtgggactagaatccaggcttgactcctctacgctgagccaagggttcgaagcgattgggataagggaagcctgaggcagggaacgagagtcaggaaagcagctcttcccaaccctaggaggccgggggacctcgtcaccgcggaaggagcggagccaggccgacctaaaaagccgcaagtccaggtacccttaccctgatggccgcggcgacacactcggccaccttcctgatctcgcgatactagccggtactcacttttccggcttcccctaggccccgcccccccacctcagcccttctgtcgtcatttcctgtgggtctgtaggttaagggagaagatggcggcgctaggggaacccgtgcggctggagagaggtgagtgcagccgaggctcggcggaggtgggcggaagggttgggggagtgctgtgtcgctggaggggaggaggagtgacccaggctctgagatccgggccacgctgtcccttgtgccggcgccagaggccgccgttgtctctgtgcctggctctaggaagggcgcttacggtattttgtctgttaaccgtaagccctcctctgttcacacggactgttccaaggcacagcacaactaaacacaacctgcccgcttcgcagacacacgccgcacacgcgctcccttggtgagcacagcagaagcagcattcggagacccgtacacccgaaaagcaaacgtcacacacccggttcgcacagactacactcattgcctgtacagcacgagaacggacacacggtacaattcaacagaacctcctttccccgctgtttgcacacaaactccttcattactttctccacaacctcgcttgtattcgggttggggtatttgctagcttttgtgcccctcctagaaatggagaggttgctttaaaaacaatcctactgacttggtcttgggaaggaggttacgtaagtaagccgaatagtggtagatgctaaaacacttgcaggtgcagtgtttttcatttcttacaaaccctacaattgcaaactggttggctgattgcttcctagagcagactgtcaaggaaaataaaaccacctctgctgagtaattagagatagagaagcctacgaaaataactggctatgcgcctaccatgatttccagcattccagcgtttccagtccttttacagatttccagcattccactctgtccctaagtcctttatttcaaacaatttcaagcatgcttttcatacaccagcattagaaatcattgataggaattgagaagtacaaataaacattttgagtactggtggtaaaaaaaaatgtatatgtaggatggagactgaaattatattgcacatattaacatttgcaattagtctaaatattactattgttccctaagaaaacacatttttagaattactgtacttagaaaaacctctttcctaatgccttcccacaaacaaatgtgcacttaatgttgctgatttgctctttaccgtgttcaccatttggaagcctcactgtaaatgagattgtttccgttaagcctattaaagcatcattttagaggactagctactctgggaagacttgccgagttaggcctaagtctctgacatcttcctcttgagcacagtggcactgtgttttatagatgggagcaaatctgtttggtgttaacaggagtaagttttttctttgaaagctagttaagattctaacgtattggtcttttgtgtttttgttgttgctgtttggagacgtagtcttgctctgtcgcccaggctggagtgcagtggcgcgatctcggctcactgcaacctctgcctcccgggttcaagcaattctcctgcctcagcctcccgagtagctgggactgcaggcgaacgccgccaaacccggctgttttttgtattttagtagagacggggtttcaccgtgttgcccaggctggtctcgaactcttgagcttaggaagtccgcccgcctcggcttcccaaagtgctaggattacaggcgtgagccactgcacccggccggtctttgtatttttaaatgcaacacaaaatgtggaacttctgtggcatttagttttgatagtcttggctttgttttttgctgttacagatttcttttctgttcttcagtagaagactccacctcttagtaggatgaattacagtcagccctccatatccatgggttccatatttcaaccaactgcagattgaaaatac

SEQ ID NO: 1884314 - DNA, 4001 bp, Homo sapiens
agatctgggagtttcctggtgatcacagatgagccagaagcatgcctgcattgctgcttcatgtgtggctttttacttctcctctctggcccccagccctttgcctctcccagtgaaatgaatctattgaccagccctttgcctccctcagtaaaatgaatctattggtcaagggtgggttgtgactccaggggtggggtttgggcaaggaagttttgcaagatggacattcgagtttctgatagaatccaggtggccttctcaggggaactttgctgttcaggcttaatttgaaactttacttccttcccctccattttcctacactacccccaccatccagtgtgcagtttatttctcaaggacttcgccagcagccgctaataacctgaatgctgacaaataggaataagttacaactgaaaaggataagaattacgaatatcttagccatcaattcctggatcaggagttgtgacaatgtaacaacgtgttatcctgttattcatccaggctttatgtggaagaagccacagcctttcttggttttcaattctcttgagactacattgaatacacaatttcatcagtttttttttctttctttctttctttttcttttttttttttttttttttgagatggagtctcgctttgtcacccaggctggagtgtgcagtggcgcgatctctgctcaccgcaagctctgcctcccaggttcacgccattctcctgcctcagcctcccgagtagctgggactacaggcacccgccactgtctctggctaattttttgtatttttagtagagatggggtttcaccatgttagccaggatggtcttgatctcctgacctcgtgatccgcccacctcagcctcccaaagtgctgggattacaggtgtgagccaccgcgcccggccaatttcatcactttttagaatagaaataaacacctctatccagcatcaacttggaagaaagcagaataagaaacaaactagggaagtaaggggaaaactgggttttattactgtgttttttaatccatttagtagtcagtgtacttatctgaacaaaggagatttcctctgaatcattgaacaatagtccatgtcaaatcctacatatctacaaaattatgccagaacatctaatagtgttgggggagaagtgtgctgctctgttcaagcaagaggataggagattccgtggcccgtgctgggcattaggtcatttgtgtctggcacaggcttgatctatagtctaatgctgtgtttaacttgtctttatatctaatcaggcaaagacattcttcactgacaatattccacaggctgctgcacgtgtctcatgtgctgcacgtctcatgcgtctcaaacaagcaatttcaggaatagacagggcacacttccaccggcagagagaagaacagtttattttatattcttaaggcttactgtcctcatacttagaggttcaggatgctggtttgtgtgttacccctgagataaatccttacaagaaataaagtttaggaaatcacccccatgtgtatttcaaggagactctaaatttcaaagagttaaacccaatatattaaagctgaatttctgatattagagacacaatattttagtctacttgatatagttgagaggcagttacctgttttacttaggaacatggggaaagtttgtagtgacaaacagtttgaggcaaaaccaagattatctttaagagcagagatcgatgatatgaagaaaaagaagtggcaactttgactatatgcaggaaacacatttatattgagttgtggggactggcctcagaggaaacttcaggtcatgtcctttaatggccctaaaactcattcccaaaagaatttctgttcattgccatacctcatatccttaggtacatacatctaaaaccctgcgtaccagtgaacagctgccccatctttccatcagccaaccaggaattcagcagttactgctaacttccacttttctctcacccgctccaggaaaagtgacctgcagtcactttcctggaagtattgattctttcttgtttgtggctgttccccatttccaattgttttccatgattattgcttctactgtgatctatagactcttatatcatcaataccaggttatcattgcagttgtcaacttctctctgttgcatcttatgcattaattcaacaaatacatattagattccatatgtcatccatgaagtttcattcatatgccatccatttttcttaattctgagaatcttacatgaactagacagacagattctctggctaatggtgccctcactatagtgagcagaggagaccagcatacatactaaaagaaatgaattaataagagatttcagatggtattatatgacttgaagaaactgcatattgtacctacaaccatctggtcttttagaaacctgacaaaagcaagcaatggggaaaggattttcaatttaataaatgatgggggagaactggctagccatatgctgaaaaatgaaactggactccttccttataccttatccaaaattaactccagatggattagagacttaaatgaaaaaccccaaactataaaaagcctagaaaaaaatcaaggcaatactattcatgatataaacacgggcacagatttcatgatgaaagcgtgaaaagcaattgcagcaaaagcaaaaattgaccaatggaatctaattaaactaaagagctcctgctcagcaaaagaaactaccatcagagcgaaagacaatctacagaatgggaaaaagattttccaatctattcttctgacaaaggcctaatatccagagtaaacaagaaacttaaacaactttacaagaaaaaaaaaacccattaaaaccatggcacacttttacctataaaacaaacctgcatatcctgtacgtgtacccctgaatttaaggtaacagtaaattaaattaaaagaaaaatgccatggcaatgtcagaaagttaccctatatggcctaaaaagagaaggcataaataatccaaaacttgtttaacatatcatcaagaaataaccataaaaggaacaaccagcggccctcggggctgctctgcctatgcagtagtcattcgtttatttctttactctctcaagaaatttgctttgacttaaaaaaaacaaaaaacaaaaaagaaagaaagtgcatattctgaaacggtagtgactgcatttgaagtgggacctttatgatatgatggagccaggcagagatgttggagaagttcctgaaagaaggaagggcatgtgccaaattctgaggctgaggagaaaaaagaaagaaagaaaaaaagaataaagaactttacatttcactgtatgtaaagacattacaaggctagagtaaagcatgttgaagtaaaaataggagaaatcaaagttagagagaagggcgcaggcttattatttgggtcttatagatgagagtagtagagtaggtattttatactgaaacataggggacgaggggagctttgcaaacctgagataaacatggtctgtagtccactcaaaacccaagcttatttttttctccttcttcatctgccttactcagtgcaaggtgctataacaaaatacaaaagactgggtggcttcaacaacagagttttttctcacatttctgaaggctgactcgtggtcagggttctcttcctggattgcagatggcggacttctcactgtgtcctcaccgggaggaaagagaaatggcttgtctctctgcttctgataaggaaaataattttatgatggggatctgctcttatgagctcatctaaacctaattacttttcaaaagcctcccccacagataaggtcagttgggagttggggattcagcatgtgaattttgaggagacacaaacattaggtccgtaacaccatcatattaaactcttacttatagagatgcactaacatccaactata

SEQ ID NO: 1884315 - DNA, 4001 bp, Homo sapiens; identical to SEQ ID NO: 914379

SEQ ID NO: 1884316 - DNA, 4001 bp, Homo sapiens
cagctaggctcccccactggccaggcagttggtatgctccaggatctgagcagctccttctagcatccttcatccttcaggtaccagccatccagacagtgcttgagctgcagaaactgagaccagacctctggcctggccctccccaggggcctcctttcgtatagtcactgcttctgcatcagatactttcagctgcaactccctactgggtggggcacccatttcaggcagaaggttttggtaccctccactgaccctacacccagggctgctactgccgcttgtggcttcaggtaagtaatggcctgtttttctcctgttggggctcactggagcagacaggggtgatgtgccctcctcatcagggttggttgaggtcttcagagctgggaacacacatggtttgaagggctgaaaagccttaaatcatttgtgtaaggtttaatgatctgtggcccaggccatgagggagtttggggagcacctcatcccaccctatttttttccatgaggaatacagggatgagacagtccactggaggaggaggaggaggataggaggggaacaaaatattggggtatgaccacagccttgtaaaggttggtgtggagtgagcatggaggggggcctccagctgagactgtgctctgagaggtccctcttttttccaggatgaaaggtgagaccccggtgaacagcactatgagtattgggcaagcacgcaagatggtggaacagcttaagattgaagccagcttgtgtcggataaaggtaggtgggaccctggctggctcccattagttggccaggctgtgctgtgctgcaggttcccaaagctcaagataagagatgcgttctttccttcactccctgaggtcaggggaggagtctggggctctgtagagagagctgtccccaggcctctgggggggatgagggagaagacaagtcgtaaggagccctggagatggcaaaagagaacccatttggggagggaggctgcagtccccttcagaggtcctggctaacaatacccttcctggctgtgtcccaggtgtccaaggcagcagcagacctgatgacttactgtgatgcccacgcctgtgaggatcccctcatcacccctgtgcccacttcggagaaccccttccgggagaagaagttcttctgtgctctcctctgagctcccctgtcccttctcacaactcctcccttttccctctcctgggcccttccttaggtcagtaattgttgtgagccccttaggctccttgcatcccatccctaacccttgcctgaccatgtgaggttatctgaagcacaaggcccaccctcacctatctgtcgaccccatttcctaccacctttgtggccgaccccaagcaccccagagatatgaggcaccctttgctccacccacagcagggccccgtcagactctgccagcgcgtcctgcccgcttccctcggtgacctgctcagacaatggagagggatgggccaggttcttgctctcagtctcacctggagctactgggagggtaaagccatttgaagaataaagtcatccagagcctcaggacagctcctgtgttagaattcttggggggagaggatcatcaagcaatagatctgccatacccagggaaaagggccaatcaatgcaggctagacatcgtcaaggatcggagatcagaggggtcgggggatggcgggcgcgagagagcgtccacagtgtaagaattaagtacaaaagacgctcaagaggctgcgaagagcaaacacacacacacaaacgtgcaacgaagccaagttaaaaggtaaacaggccgaagaggggggatttaggggagggtgcgggagtgcagtcgtacagcagaggaactcttaggagggtaggggcggagcttggcttcagttaccgcgactggagccgattttatacctaagatggctgcgcccacagccactcccattccaagatggccgtaccaacatggcagcccccacgtcacggagtttaccgtacagggcttctcttaaaatggcggcccccaggcaaccggcgttctcaatatggtcccttccgccctcttctggtctcaaaatggctgcccctgccctaaccaagccggggcccgcgccctgcaaccccgaaatctggatttcggtgtcctcccgattgagtcgaaggcacacgggcggccataacgaagaatcactaaacaaggggaccccaggaagtacagcgtggccgacgctggtcgcgtggatcttgcgagggaatctaggtttctacattttgccaagaaaggagaggctccctttggagcggaaatattagcggcagggggttaacccccgaccctgtccgtctcggtgcaccgctcctcagttgcttcctggtcttcccaggagctggataagcctgaagttgctcagtttgggtttcctagtagaactggggcttgtttttgctttcattttcccctcaggccgattcagccacagcagccagaaagcagtggccgcacccctaatgtgccttgcaaaagtccagcatgctgtctgggcagggaccaaacttaaggcttaacatgtcatggtcatctccaggactcaaacatggcggaggtttacgaacaccagaatgcctcctagaatcttttccttccaagggtgcacagaggcgagatgggaccagggacaagacaaagaacgtaacaatcccagtacgtgtgctcctgctagaggtcccctaaactcagggacgcatcctccccaggaaaagcctaggctggctcctgttttgtgcctggatatacttcgggaagggaggctgctttgaaatagtagggacagctcattacctccagcttccaggtatctttgcacagaagacagcaaagtggataaaggaaaccaaaggaagaaaggttgttatcaccagcaactgaacttagcctcctaaggatatcttcatgaattccagggacacccagtgaacttgggtcaccttaaggtgtcccaagcaactttttactgttgatggaacttctgagctctaagaagtcctggagatcttctaattaattccctcatcctagagatgaagaaacgggagaagtttgccctcctggagtgggaccctacccccattctgttgcggaggagcctcagttccttcttggcacggtgaaaattccaggaaggatcaatcaggtcaggtccgttttaatccctgtatcctgataatggcacatatcaggcacccaaatacccaatgaatagattgtactgtacatgcttaaatggcaaatgtggcatggcagggaccaagcaccttgcctccctcacccccactgtatcacggtgttgggcaagttccaggggagtaagtgaaattttccacaacagctcagacatggttaaataaaaaaaaaaaaaattagagtgtttaataaatgtaaccttgatttttaagaaagcctctttttggccggccgggcgtggtggctcatgcctgtaatcccagcactttgggaggccgaggcgggcggatcatctgaggtcaggagttcgagaccagcctggccaacccggtgaaaactgtctctactaaaaatacaaaaattagccggtgtggtggcgggtacctgtaatcccagctacttgggaggctgaggtaggagaatcacttgaacccgggaggcagaggttgcggtgagccgagattgtgccactgcactccagcctgggcaacaagagcgaaactccgtctcaaaacaaaacgaaacaaaacaaagcgcctctcttcaatttttctgcacactcaatgttcctacccatcagattataactgcgtggctacagcgctaggtgggaaaatggggtttaagcagtaactagagaccaggcatgagctatgattaaccactttaaaaaatgattaattagctctaacagcaacttaaatgtcctaaagaatagatggctac

SEQ ID NO: 1884317 - DNA, 4001 bp, Homo sapiens; identical to SEQ ID NO: 914392

SEQ ID NO: 1884318 - DNA, 4001 bp, Homo sapiens
tcgccgaggctgaaacatcacttactttctctttagcatgaggcagggtagatttctaaaagagctgggggctggtttgtcattgtagtcactgtaccttttcttggtcagtcaagaaaggcgttttgaagttccaggctagttttggctttctactgctcttaaatataattgctttcccctaagagtagagtgaaaatgctcttttttttccccctgtgagttgccaacaatccactgatataattgactgatggctctgtcccacacgtatttgttattttctttgcgagagagagaaacgtaaaacattctatttaacagtctataaatccagactggaaacataaaactcaattcaataaaaatattgaacatactcagtcttatcttaagtccaattaaaggagattaacagaatgaagtgggggctgggttaacagaaaggggaaaaagacaaaaaccatttcaacttcaacactatgtctaaggtctcagaggaaatgctctcacaaacacgagagaaatctataggcttcggaaatctttgaaagagacaaaaatactagaacttgtttttgaaagtgtataattctatttctatcatttgaatacacagatgttctttaaatcttctttctcttgcttttaacaaagagggaggataaaagaaaactcaaaacccagcttccccctctaaattaggaaaagtgtcaccatatgttgaaaatcacaaagcatcttttttcatgatgccatgtccccgtcctgtggtctttcatttcctccgaagacactgtgactcatgtcacattttcacggctgcagacacacctgggaattcttcttggtatttgtcctgcataatggggaaaattaagctgccacgtatctggctcctagcccgagcaagggctttacaccacccccaccctgctttgaaagggaagaaaatctgaaaccaggaagcactcctagaaactgcccaacatggtaataagaaggtgggttctcagccacgtggcttcctgcagtccctctgccacagccaaggcctgtggatcaaggttgatggagtcactgatttagcgggaacattcgtgtgtttttgagcgtgttcacagaagaagggctgcaacataatcgcttcttggtcttgaggtcctcccttttctgcatagtgtaggcattgcatggatgaaaagagacggccttccctcctggctccctgtggacctcagaacttgccttgtcagcttggggcggggaacgctgaggggcccagcttattgtgatggatgaaggcagtccctcagaatttcccattaataaggaggtaatagagtatatgttaattttacaagaacatgttccacagagcatataagtacatgggatatatttgaatagttttaatatgctatgattctcagaaccatgggaatgaaattctatttgcacctacctaataaacaacacattccccagcactactgggccctggtggaataagaggacaaaggtgtagtgtttacaggcacccctcccccaacacacaaacactggcacgtgctcacacacacattcatattcctacatgcatactcacagagctgtgattttgcctttgaaaggtgacaaggagcaaagacatttttcagaaccagatctggcctctcagtgttgtttcccaagatatatgtgtcctgtttcatcaccctcatcgctcaccaaacgcctggccccgtcgctgtgtttaacttcacagcttggctgccgaatgcgccaggctcttcatttgcttggaatccatcgatctgaccatctccctagcgccagtgccccaggttggcacgttaatcatcttgggtccagcattgatctctctcactccattcctctctctgcctctggtcctgaggccttccttgaccgctctgtctgtctgcagcacgggccaggccactgagagggtttctgcttctcagctctggttctctagctttgagggagcagcagtgagtgcgagggggactgtgtgcaccgcttctagcagagatggaaacaaagaactctgtggtcttcaacagcaagtcacgcccttggcagccctggcaaagccggctgtgaggaatgctggggttcccactctctctttggacaaggatgtttttgttaccttttttttcttttttagctaaggcttaccaagtgtcagacgtcttactaaacaatacacacacacacacagagatttcttattttcaaagtaattctatgatactggttttatcatcctcttcttacaaacaagaaaatccaggcttaaagcgatgagataatttgcccaaggtcacatgaccttgaagcttgaattagagcttgtgtctatctgactacagtatttgtgcacttaactgctttgggatgaaaattctatcccaaaagagcagaaggtgacaggaaaggaaagtctttggaccaccctgggctcgctcccctctagctgtgcagagcaaccaaattcttgactgctaggcctctctggacagggctccagtgcagccagcacagggaggtgacaaagagctgggcccagatttagaagaacccagtttgaggcctgcatctgttaccaatttgctgtgtgcccttgggcaatttattaagttctctggacctctcaacatgggacagaagcatggtagtgtaatactgcataagcttaaccagagaccaagtacctataaaaggatgctctgacaatatttaataattatcattacttgaaaaatcccctctcatcatagccttccaaatttctgaatctagttcttgatttttctaatgaggtctagaatttttgccaatacaaggaacagtttttggcagctttctgcatcttcacttcctttcaataccaagcctagtggagagcaaaattagcctgccaatcactcagaggcgtatgggccccaggaaattaaattccccctctctccagctgtctatccccagtgccaggtaccaaatgaacacgcgccatacgttgcggttcccgtgtcttcttcctatatgttaatttgataattttagtaaaataaaccaagtagatttgagatgtagttcattatccccaaagtcaagagattatagaatgccgtgagtcagaagggggccactgctctcttccattgttttttttttttttttttttttttttagattttaatatttcctttttctggcaacatttaaaagccactcttttacatctgttgccatcctttaatgacagacagaataaagggatgattgttactcagagaagctaaacaaagggactaggatcacttggcacatcctcgtgtgtggctgactttgaactcctggagcccatatcctccgcgcttctgctgggcaccagaggcagaacccgcggaactgcttcctgcagccacggatgggtacccaccaagccttagggagaaccgtgctctaaatgccatctgtgtttgccagtggcattcacgcgtcccctcctgtcctgcagggaaattaagaagggatctcctctcaaggctgacacctggagacagcggcttcctcttacacatccttcccacgcctcatctctggagtgagttatcttaatcctgacatttgcccagccattcagaatgtaaacctttttgtactacagggtaacaaatattttgggtaaacagtgattgcattgatgtggaaagccaagtagagatccctggcaagtgaaggataaagagctttgtccatactgtttggtcactgttatgagctgaacagggtctttccaaaatttacatgttgaagtcctgacctccagtaattcagaaggtgactgtattgggagatacttaaagaggtgattagggcaaaaagaggtcatatggctaggaccgaatccaatatgacgaatgtccttatagaaagcgattgggacacagcacacagggaggaga

SEQ ID NO: 1884319 - DNA, 4001 bp, Homo sapiens
tcaccctgctcactggacgccttcctcaccagggccttcctgactcttcctcgcccaccccagacaagccaaattcaggactgcaccctggcctctctctcactctctactgcactgattttttttgcctgtgtactccccaccagaccaggaactccttgcggacagagaacgcatcaagggtcgtcaatctcattacctgttggagtcacctggggccagattctgggactaggcatcagcacgttgtccagctcccagctgatggcagcgtgcgtccagggcggagaggtcgtgctactcaggtgtgcactgaggaccagccgcgtcaacatcactgcggcttcttagcaaaaccgcggactctggaaaccccagacctacagaatcagaacccgcattttagccagatccccaggaagggaaagcacaggaacgaatgccagtgaagtgtgagtcgacctccttctatccccagagctcaacataattcaaacacccagtgggtgttgagtgggggttcgctgactaattgactgagtgagtgaagccctgtgtcagcttccactgggatttcacacctactccatcatgtgctatgaaacaaacaggctcaaaaagcaaacccgtaaaacgttcagaaattcaaaaatagacacagacctaagttgatagaacaaatagctgcaaaatggtgcggtttttaaatgaaatacctgacgggtttttaaagatttattaccaccgggctctgtgccattaaacctccgagtacactagaggataattttgttttgttttaaggttggtaattgtgaaaagctgggaaaccaggactggcccctgggaggatcctgtccaccggtgtggcttgggcacagtctctgggtggctggggccgctggcccgcccttcctccaggaagagagacccgctggcggggagtccccggcactgccaacggcctccccacgcccgttccctggggacagggcctctgtctcccctccgcaggcccctcctggctctcaccctcccaccccgcatcccccagccccgcctcctccgcagccgcagagctgcagctggccagggggccacacccaggcgtcgagcaccgccttatccagccgcactgggggcttcgtcccctgcggggtgaggggtctcccctgtgtcaccctccgaggccacgctagacgttgtggcgctcagggctcccggttcctgccgcgctggggctcccccgtcccagcctccctccccacctctcccaggctcccctcccctgtcgcagccaccctcccccgtcccaacctcctccccttctctcgcacgatccggccaagagatggcggggtggcgggaggggcgctctggcgaccccggaagcgagaagcaggcctctgcagggccagggatgaaggtgcaagggaaagccctgggacctggaccttaggcgtgggagggacgaaagggaaaggtcttagaaaattcctcaggcgtggcttctgggggggcggggcggggggaggaaaggggcacgggttcccggtctcgtagacgctgcagcggagcagagcctctaggcatgccctcatctagagcagctgctgcggaatccggggagcctgcagcactagccgtgcgattccgggcgaggtttttaaactctcacctgttttccccttttgtaaactgaagataatgcctctctcccgggagtgggagcacgatgctgacacaccgtaggaactcgggacttgctgattctccttccttatcctcaaggcgtttgaagcactcctgcccctcacccccacccctccagcccctttcccagccctgccccctggtggaaaatcctaagagctacctctcaggagggctcctgtaaaccaggcactgtacacacacctttcatttcatcttcgcagcagctctttttggtgagtactgttatccccattttgcaaataaagcaacggaagcttagagaagtaacttttccaaatgtgcctcagctccaggcaaaataggaacctaggtcatctgatgccagagtcagccttcctaactgtttatgatccgacttccctttctgtactggattttctatttctgccataacagatgaccacagacatagtggctggaaacagcacccacttatcagctcacagttctgtaggtcagaagtccaggcttgatgcgactgtgtcctctgctctgttcccacaaggccaaaaccagggtgtcagcgaggccagcattctcatgtggaactcagggcccccttcaagctcctgtggttctggcagaattcaggtctttgtggttgtaggactgaggtcctcacttttttgctggctatcatctgggggctgctctcagctcccagaggtcacccacattccttgccgtgtggccccctccatctttaaaaccagcaaaggagaagccccctctgtctaattcctctaataatttgaatctcttacttcgggaaaagcccaatcccttcaaagggcttgtgattgggtcaagctcaccccagatgaactttctttcttcagttcagctctgccatatgacatgccccagtcatgggagtgaggatttcctggggttcctcagggggtgtataccagggggcaggaatcacgagggtgtgttggaattctgcctacttacaagtgccttctctgtccccagcatgtattctggtgttacattcaagtgtaacacctcgaatgcttcctgctaaccctaaagggccttgaggggactggggcagcctgttcaccaaccagtttggagcattttcctatgagtacagtcatatatattcccacagaagagtatacaaatatctccatatgagacataagcacgccctcctccattcctcttcctccaacttcatcccgtgtttcaaagctcagagagtggtacattttgatccagcatatcttagaaagtaggaaattgataaagatgcttgtgatcacagatagggagactgagtctgtgaaaagactcccaagccagtggtctctccaggaagccctgctgacccccaagcaaggctcttaccaagttgttagggccctgactcctgacattctagaccacgccatgacaccaagttttcctccctgtgggtgcgtgatgtttgacattcttcattcagaggtccatctaaatggatgtcacattcactaacgcatcatctgaaatacaacttcctttgattttgcctcttttgagtctttctccacttgtgttttcctatcaaagggattaaaccactttgctggacttgaagctctgtcttttccaaaagctttcatcatgtctcaacacagcttcccattcacagacacaggagaggatggaagaagagaagtatcaggcttgatgaggcttaataggatttgctcaagtcagtgcctttccctgcgtcctgcagagagtagctaggatgctcagcttacctaggccagccacagcattcctccctgtctgtcctctacagacagttctgcaaaaaccctagcttcaaagaggaaatgctagaatatcaactatgggagggctggctctgcgtttatcttcttcactgctttatgtccagctcctagcacaggggtttggctatagtagttcctcaattaatgtgtgcttaatgagtgcataattaatagaacggatctcgaaaacctgattaaagaatttcatctccattgtccctgaaaatccttttgacttgataggcacacaacactggaagccagggtttcaaggatggggattttacttacccttaaaagaaatctaaacagtagaggctgcatgctggtcagctcaatgcttgccctgcaaattgcccactgggcctttagctatttgtcttagataatctctacctctctttcttcatctttaaaatggggttaatgggatattgcattaaatttcaatttgaggagagattatga

SEQ ID NO: 1884320 - DNA, 4001 bp, Homo sapiens; identical to SEQ ID NO: 914401

SEQ ID NO: 1884321 - DNA, 4001 bp, Homo sapiens; identical to SEQ ID NO: 914405

SEQ ID NO: 1884322 - DNA, 4001 bp, Homo sapiens; identical to SEQ ID NO: 914412

SEQ ID NO: 1884323 - DNA, 4001 bp, Homo sapiens
gaaaggttattcaaaacacatcacctaagctctcaccctccagcttaaagataaaggggccaggcacagtggctcatgcctgtaatcccagcactttgggaggtcgaggcagtcagctggcttgagctcaggagttcaagaccagccagggcaacatggcaaaatccgatctctacaaaaactacaaaaattagccaggggtggtggcatgcgcctttggtcccagctactcgggaggctaagaccagataatcacttgaacccaggatgtcaaggctgcagcaagccgaggtcccgccactgcactacagcctggatgacagagcatgaccctgtctcaaaaataaataaaagaatctcaggtaattaaaacaggtaagcaatccagaagtaattaggcaatcctccttattcacaaatcctgtatctgaattcacctactcactaaaactcacttgtaatcccaaatcaatgcttgctgcatttctgcagtcattcatggacatactcatatgaacagtagtaaaaaatgtgagttgtaggcctggcacagtggctcatgcctgtaatcccagcactttgggaggccaaggcgggttgatcacctgaggtcaggagttccagatcagcctggccaacatggcgaaacgtagtatctactaaaaatataaaaattagctgggcatgggggcacatgcctgtagtctcagctactcaggaggctgaggcatgagaattgcttgaacctggaggcggaggttgcgatgagcagagatcacaccattgcactccagcctggctgacagagtaagactccgtctcaaaaaaaaaaaaaaaaaaaaaagtgagttgtgcaactcacacactggcagctgaggtagaacatgccatcttgtttcagtcctcgtaatatgaaaaagtgtccttttcacagtctcatctatttaaagcatttttgtgatttttgttggtgatcgtgctgtttaaaatgaccaagttcaagtgctggctagtcttcctaagtgcaagaaggctatgacatgccttacagagaaaatatgtgtgttaggtaagttttccctctataatatcctatctaccgatacaaataaacttaggaaaaatatactgctatgtaatttcaactatctattagttataaagtagtatcaactggctgccctaaattaagtctcaagatacaaaggcagtgttcctaaagtcaaattctgattccctcttcagaagtattctgacccactttaaaatcctccagctttagtataaagaataaaacaaaggaataacacaaaccaaatggcctgtattagtattaaattcaatttcaccagtctttggcatgcatataacctaaaaagcatgggaaattattatttatgagtcttgaaataaccaccaggcaaaataaatatttcttaagtgtcaactttgtataggtactgaacagtctgcaaatctgtatcatcacactctaatttttgacattaagaaaaggtgtatctctttaagaaaaaaaatcttaagaaataaaaactgggttcataagtttagataagtagatttttcttataacagagtcgtgtagttaagttttgagatgccactaggtctatttgtccttcactttgatgtgtcctaatactccataattaaaggaccaagtatccccaatatatagaggcaggtattaccataactaaatttccttccaaattagttgacaacgtgagagatacatggattccaaataggctttttattctttaagaaacacaattttaatgtcattcattaataacactcactcgtctgagtcacacaatcattccaggtttgtcctttttccctattaagagcagggcaaaattatctcaccaggattatgaattaccaccatcaccacaggggtctcccagtcattcaagagacaaactttatgaggctagtcatctccaacttatctttctggcttcttagaactgtatatgtacagaatacaatacattatcaaaacttgatgggaaaaaaagacaattcagcaaagggactgcaacattttaaaaagccaggagaaaaaagaaggaaaaatacttctaggggaaaggaatcaggcctgaaaattgatgtctgtgtggtttctaaggaaacaaacaagattcaccttccagattattcctaaagaattccaggtgctgttctcatttactctaacaatttggcaaggtaagttatctattttgacccataaggaaacacactactcgcatccttctctggttatctcagatacggctcacacgttaagtttcagccaacttccaattaaattaagcttatttttactcgggttcttccaaagggacccaaaagatatacattccctgagcaccttaatctttgaaaaacagtttgctatagaccaaattcaatcccaaattcacctctacctcaagttaataaagaaggtatttatactggcgattgaacttagttctgtaactgcaaaatgtcaaagataaagaccatctcacgagttatgaggattaagttcaaagtgccaaataagcgccacacataaggctgagtgaccaaaggcgtgcattgcacttagcccagtacttggtacaaaatgcacacttaataaatgccaacttatactgtgactactattcgaaagaatctgaatagagctgggcaaaggagagcacccagcttcccacgctccatcctcacatacccacccaaaatataataagtgggcttccccgcatccctagcgcctgcgcaccctccctgccgtagggcttcgccctcggtatcctgaccccttcctgatatcacccggtcccatcctcaccagcctccccgccaccaagcagccaaacatggcgacggcagctccgttcagccggcagtgacctgaagccggcgactaggagtcctggggctactgccctagtcgagactaagaaccttccagaatttgcgggagggtgtctgcccctccactacatagtgactgggccagcggcaagaatgcctctgcccccgcgaactctgaccttctcttcctaagcagcccactgctcaggcaacaagtacttccggggcttacacccggttttccccactaaggaagaaaggcgggccagcgccagtacaagactacaagtcccagaacaagtcccagagggcaccgcgccagtttccgggaaggtaagcctggaggctttgcacactgggatcggtagtccgggtgttttatagccacaaaatctgtggatccttcatttccatgtacaatcctgggaagagatgcttctaacgtttctgtgacatctgagagattaacggtgcacttttacaataatcacgtcactagatctttacaaaaaccctatgaggtaagtattataatccaaattttataggagtgatcagcctcaaatctttacacagcagtaaatgttggaggctgaattcaagtcctaatccaaatccgggtttctttctgctacacagtgtctcagaagtattaatctttaaccaattgttttgtacttgtctacaatttatagtagttctttccagcttcacttagttctcccattcatttgctgtacaattgtggacgagttgtagatgtctttgtgcttcagtgcccctcctttgcaaaagacaaataatgagcctattgcctagggttgctgtgaggattaaatgagctaatatgtataaaacacttaaaacagtgcttggctgtgcttaattagtgggagttttattgtaaaaatgtctattttttttctatgtggatctgcagaaaagtttcataggaaatacaaaacaatagccaaaaaaaaaaaaaaaaatactggcattaagtaccgattgccaccaatacttattctccctttcacagctccaattccttttcttcttgaataggatagtaaagggtctctgtccaatttgaaata

SEQ ID NO: 1884324 - DNA, 4001 bp, Homo sapiens; identical to SEQ ID NO: 914413

SEQ ID NO: 1884325 - DNA, 4001 bp, Homo sapiens; identical to SEQ ID NO: 914426

SEQ ID NO: 1884326 - DNA, 4001 bp, Homo sapiens; identical to SEQ ID NO: 914436

SEQ ID NO: 1884327 - DNA, 4001 bp, Homo sapiens
atttaaaactcagttcatttatttattttgcactcattgagcttactgcttgaagcagctctccttccctattctaccagccctcatgtaaatctttcagaaccacaggtgtgaatcacctatacaagctatccctgttttagaggacatttggggacatttggctggagaatctaaacgttaaaattatcccactttactccatatgcctttagaggatcaaaatagcctgtagcatttgggtacaaatccaggctccaccgcttattattcactgtgtaaccttggctgagttactttatgtctctgaggttgtttccttatcaataaacagataacacctacttcacaaggctgttgtaagaattaaatgagataaggtgtataaagtggcaaagagaatatctgacaccaagcaagtgctaaaaaaggaatctgtttccattcctccccatcactccccttcacccttggctgttcagccaaggtgttggcttttcaagaaattgcctgataccccgtgtttgattacaaatgtatggtatcattcccacagcaagcaacagtagctaaagataaaagctgtgactactcctcagctgtggacaggtcgaatcagctcacaaatgactcatcactgttgataaacaatgtgttcttggcatcaatagtccctatcctgataagcttcagcacctcaaagagaagagcccggggtttgatggtgacctttggttaatcctgaactcataccaaactggtcttaggagggtctctgtctcctcgcacatgtctccagtcacaggattctcagcgggaaggactccagctgagcagctgcctcttttgtcttagggctgaaccatctccttcacttgccttggattccctcaagtcataagacttcctcagcacaaggctagacgcctgttccctgctcacaaccgcccgaagcttgtgcccaacctgcctttggcagctttgtttgctggctgacgctgtgccaaggtgaggtttggctggagtgctttgtggctacaggacaaccttggctcaaggaaaggagtaatcttgcgccactgtctgcgaggcttaagtgtttgctgctctctgcagtttctgtagccccttcagaccacccagaacccactcactggcacagaaattccatgacaggaatcttgagtcactctttcattcatacatgcctggtaccttctcagtgcctggcacagagttcccacaaagtgaatctttttctgaaaggcccttgaggacaagaatggtctgtagctgcatttctaacctcctcaattctggcacacctcacacaattattaagatcaaacaggacaataaactatatgagattggcattgtcaacagccaggtgcccaaactgaggttttgtatggtcttaaggaaattctatgtactcgagtttactttcttctaaattgaaactgctttggaatgaggtatctctggaccccagagtagggcccctctctctcagtgggtatgcagtcctcttctgcaagaaactaaacatcctagcccctcggaggggaccctgtaatgtgcaaaagccccagaaggccgtaggctaccctggaaacatttccattctccaaactcaccttcaggttttcttcaccagggaggtttctgagatcacctacaagcactgacattaaggccagggaagctttttggaagggacaagtagctggtctccatcttgggtcttcaggatattggatgagacaaacagggcaccctgaaatcaaaatcaggggtccctctctttactcttcccttatgtcctaactgttcctatgtcccctgcctttctagtcactcaaggggggcttagtgtccgtctatcgccggaactggggtcaaccttctcagaagataaggcatataaagaaagcaaggaggaaggaaggagagagagagaggaaggctggagaaaagtgaagaaaaaaatgaaaaaaggcttgggaaggaggaaggaagaggtgagcggctaggggaggcggaacaatgaaggtctcaggccgtcggaggctcacggttccgccggcacgtccgtcctgcccgcctccagccggcagctgcacgcagcgcagcgtgtgggcgctgagtcactgtcccagaacagggagccgcggtgcaggtctggggggtgtaggaggacggccctggttggcatctgcaaactgtttctttctctctttttttttttctttctttcctctttcattaaggctgtgtgctgactcccacgtaggagaacttattaaaccgcacgtactgcttggcggcgctgggcctgtctcagctgcctgcagggggcgctacagcctcgcccatgagccagcggcccgcgggcgctcaggcccgggcagacccggggttactaggggttactgggttttccggaggtgtccccacgcattgctagggcggcttggaactttaacaaccgcggcaggcagggggaacgcctctcttagaaggcctcagagaccaccccaactcttcgaagctcgctttcgcgccgggttctgtgagcaaccctataaatctaggactccgttgcgcaacccgagagtccaggctcgccaacccactagggctccccctacccaccccccgccggccgccacgccaggcggtgacctcgggcgtctccgcgaagccctgattcgcacccaggacacgtgttctgcgcgccccacacagagaacagagctcgtgacagctcagcccgctcagagtagggccagcacctgcacgcgccgctgtcccaccttcccaagcccggcggcgggaccccaaggctcctgggcgggccgggaccagggcaccctcccttcctagacgtgagagccgagccgagagaatgaatcagcattgagacagtttattggtttgctgttcgcatatcacccattttatgtaaatagattatacagagactcggtgtttccttcttccacacaggaggtaatcagtctttctctttcatgcacacaaacacactcacattccacgcggcgaacaactttacacctcgctgagacattcacgtcttaaaataggggaggacaatataattgcttttaaaatgcccttaatacaatatataacgtacaaaaatatctctatatttgaagttacaaaaaaaatcttgacagcaacaaacttaaatattgatagttacctctgtatgtacaacacgcattgcacttttcctctttaggttttggaaagttcaagtaatagtgaggcttgcgccctggtggggtgacacgccgtgagaaatcagtttgtgggcgagcacggctgtggctcagacccctgctccgggggtctcagcattcatttctcagtttctcctctccttaagcctggcaaacactcggattcttctgcaccccgccccctggggcacttgcacctgagcaaggctaaggaagcgaagcccccagaaggaggggcccttgcaaagccagagctcgccgccggacggtgcctcccggactcagggtctccgcagggctgtcagagcccggtccccacaccgctcgggaagtccttcgtcccgggaggcaccagcgggatgcttgcgcgactattccttgtaccatgggcgcctaaatcctaaagaaagtggggagcacttccactcgggggggctggagccccgtgtgcttgtggcttagaagacaccagagtccgacccgggccggcctcgggcagggagcgccggcgccggcggccgtagccctgggggctgatcttgctcctgggggcgacgttgtccttgtccttatctgtgaactggtagatctggtgtgccagcttctgcaccgtgcacgtcccgaagcggcagccaaagctccggaggccctggaagttgttcatgctctggcggtagcgcttgactcggatgcgggcggcatccggactgctgcgggcggggggagggg

SEQ ID NO: 1884328 - DNA, 4001 bp, Homo sapiens; identical to SEQ ID NO: 914440

SEQ ID NO: 1884329 - DNA, 4001 bp, Homo sapiens; identical to SEQ ID NO: 914447

SEQ ID NO: 1884330 - DNA, 4001 bp, Homo sapiens
agctgggcgtggtggcgggcatctgtaatcccagctacttgggaggctgaggcaggagaattgcttgaacccaggaggtggaggttgcagtgaactgagatcgcgccattgcactccagcctgggtgacaagggcgaaactctgtctcaacaacaacaaaaaactcaaaaaaccagaaattgacttctcacagtgtagaggctgggaagtccaagatcaaggtgccagcaccattcagtgtctggtgaaggcctgcttcctggttcatagatgttgatcttctcactgtatcctcacttggtggaaggggattctcaggcctcttttataaaggggactaatcccatttccaccctcatgacctaatcacctcccacaggccccacctcctaataccatcgctttgggatttaggtttcaacatgtcactccggaggagacacaaacattcagtccatagcaggagtgatttgattgcaatgtggttattcagctgggcttctgaagatgaagccacgctctgtgagtgtgagagtagggacggaccattggttggtgaggttattcaaggtgctagtcatctggacgtgaagcctgtctctcagaacagaaatgagcttcttcacctcttgactttggggattgtcaggatgtctaggaaagaaatccggtagcaagtccaccttttggaatcagagtatagatatctgcagatggccagtggaatggtgcagggtcccgggccctgcatttatacattgcatgtgataactctttattttcctgaatctttcctctaaaattaatgaagctagtccttcctagctgcagtagaggatcacagggattgtgctaatgggaatgttaaacacagaatgttaaagggaaaccattgctgcttggggtaaaatgtggtggcagtgggaatggaaactaaagggaaagggtgggtcttaggagcacattggttctagctagcagaattttttttccagagttttactctggagataatggaccatgttttagcctgggaagtggtttctctttataactctccatctctgctgcaacaagggatctttccttccaggttttattctctgaggacatacattcccaggtccctgttccccgttttgccatggtaagcccttggtcctaggtcctggttttgggtttcttcattgcttgcttgcttactgcagagtagccagacccctagttccaggaccactggccacacatcttcacagtctgaagcttccagccttctaaggttacaatttcctttaaaatccagatagactatctctagtctgtcacctttcatctggggaagtctagtatgctcactgacatgcccagggattcttgggaaggggcatgccctcctggtctcctctgcatgtgcattcctgctcctaacttctcagtctccaacaagctgccagggttgccgtcctcccactacactttatcccacaaagtgtcccactgtggacagtgccccaccttctgcattccctaagcatcattcataggaggtggtggtatatacataccagactttttctgaaagtttcgaggtaatagagcagcaccaaggagcaggaaccaacttaaaatagaacattagacatctccattcctcgagttccttggccatccgtcagaatttctcaccagttactttccttcttagagtccagctttctaccatttcaccttctttttactcaagcttttctcctgtatcctctcttctcccagttccaatcttacccctacaactcatcatttagctacaagaagacaactcctgaattcctatcgctcctctgtgcagagcagctcatctctgcagatgaactgggacccttcctgccataaccaaagggccatgaatcagctttcaaggaaaaagaaccagttcctcggagatgaattctgcctgcctggttatctacggtgtaaaacaacaaccgtttcacagtgttcacagattctctgggtcaggtcagggcggagcaaggatgacttgtctctcctttgtgatgtatagggctcagctggaaggctcaagcagttggggatgacttaaagggctaggggctgtaatcatctgaaggcttcttcagtcctatgtctggtgcctggctgtggggacttgaaggctgggctcagctgggactgtcaattgaagcacccacatatgacctttccttgtagcttgggctttctcacagcatggcagcatcacagtagtcagacttctaacatgtcagcccaggggtccagtgaacaggggatgttgaagggcctttcattacttaacctcagaagttacatagcatccagattaaaggggaggtaacatagaacttgtttctcaacgagaggaatggaaagattttgtggccatgctttcatattgccaaacgtcctcctcctacagattgctgacgcaccgctcctggcattgataaggctcaaaaggtcctacctctacagcttcgttgggcttctccatctgcttagcccagagttctcctaaggatgtctggggtgtagcttctctacagctttcagccttggttcaggacacctggccttgggcttcttgtttgtacttctagagggtatcaggattcggaagcgggggctataagagccaatagcaggtttactggcttttgtagctacagtggcctcaccaaggcaggctgcagggggctggcagccagtgcctaaatgtcagcctcaggaggcctctgtgactgctggttctgagccagcatggattgggatggggtagccagtcctttggagaagggacatccttaggacttgtcttatgacatatggatcaggagcagtagcctctggtcctgcagtttctgtgggggaccccacaaactcccacacattctccagagggggaagctcacctctgacccctacccctaaacaatgaaataactgtgttcaaacagttgcaacaagttgattctggagttccaatccactactgctgaggtcatgggtatgccaagagcctcactatcaagatgtggttcaggaatactggctttttgggggagtcagtccttgcacaccagtctgtaaactccacgagagacagtaacagtgtctacctggtacataaagcattttgctcagtacctggcccttggtaaatattggttaatgatgcgtttgggtagctctatgagcaagttgggtacttcagtggttatagagatggctgtattgcacagaaatggtaaacttaaaagctataaggaccaagcaagtcatgtaagagaaaagctggccagctagggccagaggcttatagaacaacatattccctgctcccggtgcagaggacagccactactgcgctctatgcctgccatgctgaagacaggcccagcactggcagacattcttagttttcaagagaggataaaaagctagatctattaaatctcccaatttttaagtgttgtccatttattcagtgaaaagcattttttccctgtgattgtgggctggatgcaacaggtgcactgccagttgcaacctctgtaacccatagggttagctctagttcacaggagttgtcaggatccttggattagcgtagcgcaaaccctacctccccctcctcgcgctccagcctcctggcacctccaccccaccctgaccctggcgtgaagttagccagccaccccacagcaactgcccgaaaggtccttcttaggctcttgtgacctctgcaagaagattatacctgtaaatccctaaagccatcagcctaagatgggggatgggaagggactgggggcccggggcagacaagaaggcgcgagctggctctccctgccccacccctccccaccccgccccacccaggcgggctttctcgccatagccttccctgggtcactgtcagacaagctcttccctggctgagccaagacacttggactttt

SEQ ID NO: 1884331 - DNA, 4001 bp, Homo sapiens; identical to SEQ ID NO: 914449

SEQ ID NO: 1884332 - DNA, 4001 bp, Homo sapiens; identical to SEQ ID NO: 914452

SEQ ID NO: 1884333 - DNA, 4001 bp, Homo sapiens; identical to SEQ ID NO: 914465

SEQ ID NO: 1884334 - DNA, 4001 bp, Homo sapiens; identical to SEQ ID NO: 914485

SEQ ID NO: 1884335 - DNA, 4001 bp, Homo sapiens
caggcataaactactagtgcttgcagttcttacgcaggcatgaagccaaaaccagtttacaaattaaccaccaagaaaaccggtagagcacagatgatgacgatagagctgttttgtccaatgtgagcgctactggccacccagggccatgtgaatttaaattacgatgaaacacaatgaaaaatttggttccttgtggccacatttccagtacccagtagtcatctgtgccagggggttatccaggtacagaacattcccatcgttgcagaaggttctatcagctagcactgggttggacgacacttgccaagacgagctggctagaggatggttctccggacctggtcccacgtggttcccaggtaagcccccgcccaggatgcagccccgttgtccatcagttttcttggagagggcatgggaaaccttcgtcagtgtgtcatctcctgcaaaggccttcgctccttcctctggggagaaagcacccttcactctctgaatcattagcccaaagcagtaagtgcagcaggcctggccccacaccttccggaagagccacggtgtgaggctggcatccctggggcacgacacaaccaggatgtagacgaaatagatgcaatatctggaggttctcctataggtgtctctggcctcctggacacttcacactgttctgggagctgccctctcaggccccagtgaccttttcagatgcagactcccacagcatgggtcagcaattctccccttccgtgagacagggattggttacctgtactaggaccttgaggccaacactgactagggggcctcatgcctgcccaggttccagccccggagagcaatgtgagcaaagcttgctgtctttgcaaagccaaccactgtggcatcaactccttcaggaagccctcccggattgtccaaggtgctcacctcctttggggagccctcccagattgtccaaggtgcttgagggagggaggaatgggttgttctcccggcaccggggctgcactcctgggcagacgctgcatgcctgtcctcaggcgcggccctgctgccacccccttgggggctcggagcgcgacagcagcttggggacgcctcccgcgcccagcacggtgcacctgggccctgaggtcctggccgaaacgcgccaagttgggggtaggtgcagcgaccccatacccctcggctgcgcgccctggcggcaggaggcggggccgggggcggggcgtgagctggccggggcggggcctatggaggggcgggaccgcggcgccctataagtactgcggagcgaggcgcgcgcccggccagagagcgagcgcgcaacggcggcgacggcggcgaccccaccgcgcatcctgccaggcctccggcgcccagcgccccacgcgcccccgcgcccccgcgcccccgcgcccctttcttcgcgcccccgcccctcggcccgccaggcccccttgccggccacccgccaggccccgcgccggcccgcccgccgcccaggaccggcccgcgccccgcaggccgcccgccgcccgcgccgccatgggagtggagggctgcaccaagtgcatcaagtacctgctcttcgtcttcaatttcgtcttctgggtaagggctgcgccgggggccggggcgggagggggcaggcacacactccacgttgggcaggtcccgcggcagcgtgctaggccccgcgggcgcagcgcgggccgcgaagttgtggggccacctgtgggctccaggagcggggtggggggtcgcccggggccaccgcgccccccgacattggggctgagggctgcgagccgagtttcggggcctctgtgctcgggggcccacctctgcggccgggccggggcttctgggggccgccgggcagttcccgctgtggtggtgatgggtgcggtggtcgcgggtcgggacccgagtacccggccgcccctcagctaaggaggggcctgcgcgggtccctggccgcggattccggactgctgcttcgcggggacgaggggggggctcgcgggcgggactcctggcgccccgcccccatgagctcatcaagagccgccgcccctggatggtggggcgggggcgcacactttgccggaggttgggggcgatccgcctcactctttccccagcccagctcactctccaatctgcggtcaccacccgagaccttcctgggggtcgcgcctaaaaggagcgcagactcccgccgggatggcccagaagctggggtgcgcgcaccctggccgtccctgcctgggagccgatctccctctcctcacccagacacgttccagcggaggcctcctcccagaagggctctggaggcctcgcaggagtggggatcccgcggttctgagttggcacaaggaagagagtggcaccaggggcctggagtggatggcagggtccgggagtggggccgctgctttgcaagaggggcccccacgctgggcatctttgggtgccagcgtgggtggaggagggtcttttgctgagaatggctttctcctgaccgcagtctttgctgctgggaagtgactgatgggctttcgccttttgtttccatttcctgtcggtgttagaattggggagggggtggaaatcccttcttggcctggaaggactggagtgggtgtccatggccgcggcctccccgtggccacgcccctgggcatagactgcaagcccctccccgtgccccccaggctgtcacccccttctcgtggaagactcggctgatgtcccagtggaccgagtgtttctcaagttgaggcagggagggcaaactttttaaatggcccctggagccagtgtgtgggaccagagacatctgtttcccatctggacggctgaggatcccagtgcggatgattatttggagggggaaggacggaggctgaactgaactctcagctgggagatgagtggggcagtcacatcccaccttccccaagccgggctgttctgcacagcctgcttgggacgctggtgggagtcactgtggccttcggcactgccctggcagtgggggcagctaggccatttgggaggggctcgccttccccaggcccggccctgggacctcagccgttgcttagtggtggcctgcttcagcccaggcatgtgggagaggcaccagacacaggatgtccctctgccagcccctgaagccccgtcccctgacgaggcgagtgtggacctgggggtgggggctgagggagactgtggacctgggggtgggggctgagggagggtgtggacctgggggcaggggccgagggagggtgtaggcctgggggtagtaggggctgagggagagtgtggacctgggagtaggggctgagggagggtgtaggcctgggggtgggggctgagggagagtgtggacctgggggtaggggctgagggagagtgtggacctgggggtgggggttgagggagggtgtggacctgggggcaggggctgagggagagtgtggacctaggggcagaggctgaaggggagtcacgggaggggacttctccggaggtggatttttgctctctggacggtgtgtcagcactgggtgagcccctcctgcctgcccaggctgagaggtctccctggcagccccctgggagtgtcgccagggcgggcctggaagtttcccaggcagctggggtggagacctgacacatcccaagggtgcttgttattaaggctcaaggaaatgtctctgaggcctcaccgctcctctccccagggcctgctccctgcaaagcattgagaactgagtccgtccacagtcactgtggacccacccatccactggggctcagtggtagccagcaatgccaggctgggtgaggtggggttggtgggcaccaccctggtggacccccctccaccctggtgtcgcagggtgtgtggctgagagcacagtgccatgggcttgggcctccttggtggagtccccaacacactgctctggtcc

SEQ ID NO: 1884336 - DNA, 4001 bp, Homo sapiens; identical to SEQ ID NO: 914493

SEQ ID NO: 1884337 - DNA, 4001 bp, Homo sapiens; identical to SEQ ID NO: 914507

SEQ ID NO: 1884338 - DNA, 4001 bp, Homo sapiens
agcatgctattttagatctgtaaatgtataaaatgtatacaatgatttcatgtaactagaatgtctacaaagaaaaaattgtgtaggcaatacattgcatttaggatacactgcatttatgatgtaccataaaacttgtttgtcactcttaaattctgtaagacaccaatcttaaatcaaaatcacttatataacttgggaaagaagttttctttcattgactctatatatgcttttatgttattaacaccaggtggaaaaattttttaaagataatgtattccaatttcacagttgcatgagcaattttgaaaggacaacgaccaaatagcatgcccaagatttaaaaaacaaatttaaaaacttgtttaaaataattatcttaaatttcttccatacctattctgtcaaaaagctctcctccactacagtactccagaaataaatattggatattgccttctctcctgtgaccatagaattttactacattttcatgatttagcattttattgatacagatctctttcttaatattttctggacagtctacggcacgcttcatatctacaatcttcactgcgactgcttcttcagttactctattcacagcaagttgaactctaaaaaggaaaagagttttaacattacagaattccatttcttctaaaacttccaaagattaaacatgactcatccaaaacgattttacctctattactttttccacaaaggagaaaccaaggaagtggtttctgctatgttctcaacacacactactcttttctaaaatgtgaaatacaatagctaaccctccaaagacgtcattatgctgtcacacaagtcatttaataaacgcttcataaaatagattgagataattctaagccacatcacatatatacatgttctactcatatacttttaagagcattaatcccatactatatgtgcttgtgtaactgactgtcctaagctcctatggggtagatgcgattattgccaccctaaaggtagtgaaggagaggtacacaatgacattaagaagcttgcctaagatcacaaaacaatgaccagtatgtgatagagcaaggatctgaaaccaggcaggcaatctccagagtctgctcatttgctcattaaccgcaatgcttaaaccctgagaagcaatttgtgggcatggaaacaataacttcgtgtcccttccagctctctacaaagaaaacttttttttttaaagggaaggaaaaaatttttaatcctagcaaaaggctgtgtaacttcagttgccaaaacccttggatctcaaacatctactttctaaatcaccagagtgtgagactccaaaacaatgaatatgcactcagaaaacgaaggcaagcttaaaagaactcactctccataggcaccttctcccagggtttgcaccaagtcccagtcttccacaaagggcactgccatgactccaccgagcacctcggctgtaaaaggcaggaatccagaaaagatgtagagtgtaagatcaccagtgaagccactgagccccgcctctccccaggattgcccacgaaaattaacagctcttgccttccccttctatctcatccacatttatccaagtctttcaaccacgaacaactattctaaacctgaccattttgtcgtgtaaatcacaatcgccactcccaagcacaccgaaggttgaaattctgccctcctcaggccccagaggaaattaattgttgttatgaagaggtgggagacaaatgctttccggcgaacgactggggaaggaggagggagaggtgggggtctggggaagagaggaagaggatatagggagcggtatggggcagaaaacgcctgcggcagcgcctcctcccaattgctcaattccaattcccatccccatccacagccccacccgtcccaaaggccggggcggggccaaactgcccccagaggcgaaaggaagggctgggactcttccttggggttcttagctagcagcgggttagtccctcctgcccccgcccccacaacgggaacctcctggtaccattcctccaccctccgaaaccgcccctccgcaggagtctctccaatcccctgcgctagtcaatgctaactttctcccaccatgccctccctcactaatctagaccccgaactccttctttagaaaccttccctactctaccggccgcccttcctcaccggactgtcctttgcccaccactgcaggaatccaaatgcagcgcttttcccgccaaaacttgagggcgtcacgctgccgcaaactcgcgcacccgcgccgtaaagcaagacagcgcgcgttcccgtgtcctgcccctctgaatgtcggcggctccaaaagggtgacgtggagatgttgccgctcccgcccagggctgctttgcagtcggggagagatcctggctgaagagatttaaggacggcggaccgcatcggcgcgaattgagctctgggcccaaatatgaagtggcatccggtgtgaggctcgactgggcggtgctcgagcgctgctgggggaagcccaggcctccaagcctcaggggcgcgcgaccgaccgcgctgcgcttccaggcggggctgcgggcttcgctcctggccgctctgggcctgaaaggctgcaccgccacctgcgtgaggccaccggacaggactgtgaggatcacagtcggtgaagcagagtgctttgtaaacctcagagtgcggtactcgtggtgctggagccgagaaaccagcagcagctgctgagagccgactgtgaagaaatgggaggaactccgtgttgggagcgagaggcttcgaaagaactggccacgcagtcaagtgtgtgtggcggggcaagtttcccggagaaagcgagcagtttatgttggagcttgaagtcaggataaccagttttgccttttttctgtgaaccagctccaaaacaatgctttacttcagcccggtctttttgcaggaagaccatctgcttagcttagttctacaaactttttcatttttaatgtgcaaagaacaggcggggagagccaaaataaatcttacaacgcaaatttaaaagctgcgtacgtcatttaagtggaaaagtaaattctgaggaaagagactcaagaacaaaataggaaaaatggaaataagtattctctgacagtaaactagactggaactcagggataggcaggatcatctccattacattctccagcactggccgggcgcagtggctcctgcctgtaattccagcactttgggaaggcgaggcaggagaatggcttgaggccaggagttcaggaccagcctggggaacatagggagaccccatctctacaaataaaaaaatttaggaattagtcgggcttggtggtgtgtccctgtagccctagctacttgggaggcctaagcagaacaatcgtttgagtccaggagttagaggttagtgagcactactgcactccagcctgggcaacagcatgattccgtaggaaaaaaacatatttttttatatgtatatattttatatatatacatatatattttcttagtccttaagactgggccacatacaaacactaagcataactggctattatgataatagtaaagtgaaacaagtataaaatgttactcaaggccggggcctggtggctcacacgtgtaatcccaacactttgggaagctgaggcgtatggatcacctgaggtcagcagttcaagaccagcctggccaacatggtgaaacccccgtctctactaaaaatacaaaaattagccgggcacgatggcgagtgcctgtaatcccagctacccaggaggcagaggctgcagtgagcagagattgtgccactgcactccagcctgggcaacagagcaagactccgtctcaaaaacaaacaaccaacaacaaaaacacacatttcttttaaagaagcaaagtcaggaacaaaaatcaaggaaaaaactcttaaaatg

SEQ ID NO: 1884339 - DNA, 4001 bp, Homo sapiens; identical to SEQ ID NO: 914527

SEQ ID NO: 1884340 - DNA, 4001 bp, Homo sapiens
tcgggcccaggaagagcgggatgaaagggggagggaagcccgctggtagccaggcggagccagaaaaataggaggtgcagagcgaaggcctctgctaggccgctggcctgccacctgggcccagagcgacttcttgctgtgccacacccactagctgccatgttcattcctcaaaacctgagatttcccctcaaaacacagatgggggatgcgggaatcagtctggccagccagtctggctccggtgttcatggccagggcagcctaagtcactcatggcttcttagctgccctgaaggctgaaatacagagcatctttgaggacatctgctctatctgtgggaaggaggacaaaatgctcaaactataataaaagcaagggccaggacccaaaggggtctcactccctgtttctctggactctctgtggggtgcctgtgtgcaggatttctgcagaagatagtccattttgttaagcctttgaatattcaaattgaaagtatcgcgcaatcattgattgtcaaatcatgggtttctagaggttttaaatacttggcatgagggggaaaaaactcaaacctatacccgaaggtataaaacattaattctgtttgtctcctgttccagggacctgggtgcagccggatgctttgtgaaattttaaaaatgttgcatctctgcttctctccctgccccaggagccctcccaggcgctgagtccctgctgctgcagcatccagccaccgacccagctcctgctgaccacgatgtcgggtaactcggctgcttctcctagggtcgggtcaggcgggccaggggcatttcaatccgggtgtgtttccacggcttttcctgcatagaacagagaggcacaaagtcaaggcatgcgagtaagggccggggatccggagaggacgcgagccacgctgtggccgctcccactcagcgcctgtcccggagggcagaggcccagaggccgagttggccgctccggacgtccgcgtaccccaggcccccgcccgccctcccacgtatccactgttgtgtcctgagacacgcggtgcggaccctgcgcgcccagaagctgctacggggggagctagaggctcacagtgagcctgggacgggggcagagcgcaccgactgcactgagccgagctgtggcggtccctgcgcggaccccgaggggcgcccgctgcccgcggagtccggagccgatcggggaacggggtggtggggctgcggtaggctggagcgcggagagggcgcggcgcctgggccctgcgggcggggcacgggattccctgggtccgggctaggaagagcgcaatctcctttcctggggagaccctaactcctggaacccggcttgagggggatccctgctgtccagctgcggtccccgcagtgaccaggcgaggcgctggcatcctggcactatctccaggcgtccaggctgaacgcgcggtcaccctcggccgccgcacccagcgcacttcccggcgcgattcctggacgcacactgcagggtagtggtcagggccggagccgccccggactcctgcggccacctccaccttgaaagctcgcccggctcggcttggcctaacagccagtccccaacctactcactgcggcttttcggggcccggggctgaggctgcccctgctcccagcgctcaggggtccctcccagcgaacccctcttgagcgcgcccgccacctcccgcgagccggggcagtccgaccgggccccgccagccccggggcggcccctaccgaagggcggcctcccggcggagtgcagggtcatcgggagccccggacggctttccccagctcgcgctgcgcggactcgccccggagcctcagtgcgcctcggagaaacgcctgccccagaaagggagggggtagggagagaggggaagaaggggagagtaggagcgggggcgaaggagggaggagggcaagatggagcgcggaaaaggcggagaaaagggacgagggagagcgggcagaaggcaaagacagaagggagcgagggagggagttcctcgggcctggcccctttactaggtcagtctggcaggtacctcgccggcccaggacggggctggccaaacctcaccgcttgctcccgggctggcttccagaccaagggcacgcagaggtcggagcctgcccagaagccacacctggccaggcggagaaggaagggactcgggacttccatgctagtgggaacatcacagtggggtgggctacgtcagccgccataatcagagaaagccccctgccccaggcctggcccctccccaggtccataataccctctctctcggctgtctgggtctgaaagccaaggttcccccgacctaatcagagtggtgggctccgctgcactggtctccatattccagagcagaaaaacccgtttgctattggcctaggactgaggcccagccaggggtggatggccccacaaatttccacggattcttttcctactggggctctgaaacctgctcagctactcttcattctttcaagtttgaaatgtttgggtttttaccatcctttgacattttttgtgtgtgttctccgaacttagaaacttggctttgggtgccatagcctataaaaggggcccccactctgcaccctggcacccagaccttggactcgaccactgactcagttgcctttctccagaaaaaccgaaggtgtatcaaggtgtccgagtgaagatcacagtgaaggagctgctgcagcaaagacgggcacaccaggcggcctccgggggaaccgtaagcataagcccttccctcattccccagcccatgccaggcctctttcaaagctgtgtctgcaaggtgtggaggccactcaaggccccacgcactcaccattcccagacctggccttcctctgctgttcctatgacttctgtacccagctgcatcccaatcgggaagctacagaggacagctggggcatgttgtggggctcaggatttgggggagcccatccatcccccatgggtgaaagtaaagtataaaaagtgcgttggtcctctgcagggggaggagcggccagcaggtaagtatacatcgttttgttaggaagacagtggatatatgtacagcccttgcagacccatagaaaatctctcccagaaattcacctcattttaggggccccttccaggatagcatctgtgtggaacatcctcccttccctcctcattcttctggaactcaccctctgagatcatttatctgtaaatcatcagttacctaaagtatctagcagaaaagggccctgtctctgcagaagagacagctggagtacaggaccacttccctaaaatgtatcaacaccttaagcagtttcaggttattacaaaattgaactgagcagtcataagggtataccctgacactttatacaccttcctacggtaagtactgccaaaggcactcagggcagcaacagaaccaaataaactaggtggggttattgcccaagagagggcagctcatccctaaaaagcctcaatcatacaattgcttgggggttggtttgggtgtgaacataggatctgacagctggggctcatattgcctctgttaggattggtccttctccagcccattggcatctgccccacaacagtttttgtgcctgatgctgttcatgtgcaatgtgtgacttcatgaaataggcctttgacagcgggacttcttgaaatgggagggggcaaatgatgtaggggaggtaaacacaggttccagaaccagatggactgggctcagatctcagttcctccatggtgtgtatcctcaagcaaattacccaattcctcttgcctctgtttattcgtcttcaaattggggatgataggattttgtgagggttaatcgagttattgcatacaaagccgttagaagaatgctttccacatagtgagtgctcaataaatgttagttgtcattatttga

SEQ ID NO: 1884341 - DNA, 4001 bp, Homo sapiens; identical to SEQ ID NO: 914552

SEQ ID NO: 1884342 - DNA, 4001 bp, Homo sapiens
gaggcaggagagtggagtgaacccaggaggcggagcttgggagcttgcagtgagccgagattgtgccactgcactccagcctgggcgacagagcgagactccgtctcaaaaaaaaaaaaagaaaaagaaaaaatacaaaaattagccgggcgtggtggcgcacgcctgtaatcccagctactcaggaggctgaggcaggagaatcgcttgaacctgggaggtgtagggtgcagtgagccgagatcgcaccactgcactccggcctgggcgacagagcaagactctgcctcaagagaaaaaaaaaaaaaaacctaaatgttccaaaactcaaaacgctccaaaatctaactttttaagcactgacatgactctcaaaggaaatgctcattggagtatttcagattttggattttcagattaggatgctaaagtggtaagtatatatacgtaaaacactttcatattctgcttttcttcatttaatacggtggttgcctttctgtcagtcatcgtacattagcatcagtttgctgtgtgatattccattgcagagataaatcttgtgatatttttaaccagtcctccattgctggatggtgcaatgaacatctgttaatacatatcttttgctcatgtgtctgattattttaagggtaagatttcagcctgtggaaagggagtaagtgtaagtttgagcagaggaaaggagacctaaaagaataaggcgagtctgggaacagttcactaggttattttagggcattggacccccgtaggcgagaaatgcttgcagacatctaacgatgacgcttaaatggaagagcagtttgagaagatttagtatcatttaattttttattttttattttttttgagacggagtctcgctctgtagtccaggctggaatctcggctcactgcaacctccgcctcgcgggttcaagcgattctcctgcttaagcttcccgagtaactgggactacaggcgcaaaccaccacgcccggctactttttttgtatttttggtagagacgagatttcaccaagttggccaggttggtcctgaattcctgactttatttatttattttctgagacggagtctcgctctgccgcccaggctggagtgcagtggcgcgatctcggctcactgcaagctccgcctcccaggttcacgccagtctcctgcctcagcatccggagtagctgggactacaggcgcccgccaccacgcccggctaatttttttttgtgtgtgtgtgtatttttagtagagacggggttttaccgtattagccaggatggtctcatctcctgaccttgtgatccgcccgcctcagcctcccaaagtgctgcgattacaggcgtgagccaccgcacctggcctagaactcctgactttaaatgatccatccgttttggcctcccaaactgctgggattacaggcgtgggccaccgcgcccagtcaatctcatttaatcttaatgccaggtactgttctaacacttttctatgtataatttatttcacttgcaggtactattattattcccatctataggccagaaagctgaggtacgaagtttaattaccagagttacttatcttcgttaaaatccaagcagtctgggctacaaacaattatacctactttgcagtcaaggaaccaagctgagatgttgagctgaaaacccaggtctcagacttcaaagctttctacacaagagtcgacggtggcagtaaaaattaatgggggcttgatctatccctcccacccccaagaaaagtaaaaagcaggagctgggaccagagaaaacctccacggagtccttatcccctaaatataagaggcatttaacgtttagcattgctgacctgcaatcaggcttcaactgtgagtagccaggctctaaagcttgataactgaattccaaaaagcgcgcgagcctccaggcgaaacagcttcccgccttccagccggttggagccggctcagcaacagcctctccaagccagggtagtgacgtcagcccaggaattgggcccgccccgggatctcgctgctttctgcacgctcggaataaccagagtcgcgaaattagccccgcccactgccccggaagttaatgcggaagccacacacctcctcctcggccggcaggggcgcagccattttaattcatatttgagtgggcggtggcgattggtgttggcggtctggctcagctgggcagggggtaactttactgatttgggggtggtttttagtttaatttttcttttctagcttcccatcgacggtcagtgcgcacgttgtaatcagctgaggccatgtcaggagacggagccacggagcaggtgaggaaggagagtggtggggcctcgtggcgacctcttctccacgtctgttcctccgactgctccagacatgttcggctgaggaaggaattgggtctagtgaacccgggggacagggtatatagaagagtggtgggaatggggagcaagatctaagatttaatttttttttttttacttctctctcttaggcatgaatacgagtaaatacttgatttagacaatagcggtaggctgcttcgtcctatttagattcatgggactactccagatgggatgctttcctttgatatcgttttggtattagagtggataggaattattttaacgtgcacccgacgttttagaaaaacttgacagtgtttcttttaccccgccaaatatactgtacccagaaataggttactagtttgagaaatatttgagacaaagctaatctggagaattaagacttaatgagagcgagtgaagaaagaagcaagttatgctgaggttttgggaattttgtggctttctttcgttttcttttcttttagccacatttcgttttcatttttccagctacataaacattgcaggtataagttgaaaatgagaagtctgttttggccactgtaaataaaagcatctgttttaatagtaaatatgagtgacaactaaatattttaaaattcacacttttaggttagatcagtgtgatttgtttcttttgctctttgtattcagaattttgtaggatagtatttaccttttagtgtgaaagaggaagctaaatagttatgaaaaatgccattaaatgtgtttttcgatctaagtcctggtgtgtttagataaatacagtttctaaaatggaggctaggtagcctgcagtctcaatttcctgaaatttcccattgccatagcaacgacatgcacttaggttttcgtttttcaggttccctagcttataacgtggaagatgttattggaggttggcagagatgaggcaaaataggagcgttctattgcatagtctgtaagactgtagatttcattatgtcggcagtttgattaaattgttttgtgtttgcccgaggactggtttcagtccagaaatcttcgcactatttacattttacatagtgttagcatgcccaagcatgcaaagtcttaaaattactgtatcaaaactgtttaccccttttctgatctagtatttgttatctgaaagtgaaggactaatgaactgaggtttcattgaaagttttcgaaattcattgttaattcttagaatttatctaaaattacaaagacacggaaatgttaccatgacctcttgaatgttttagaactgtggtgtttcagtgggacagatggtggtgaaaatttatagaaaaataatttctcccaaaggttttattgtgcaaagtttagaacatagagaaaagttgaaagaaaagtgcagtgaacacctgtaggacaactcttcgcctggaatcaacagctgaaagccttgccatatttgctttatctccccatgctgatagattgagaacagagtctttgtcactcacactagagtgctgtgacgccatcacagctcaccatagcttcgacctccctgcgctctgtgatcctgccacctcagcctcctccgtagctg

SEQ ID NO: 1884343 - DNA, 4001 bp, Homo sapiens; identical to SEQ ID NO: 914578

SEQ ID NO: 1884344 - DNA, 4001 bp, Homo sapiens
ctactagggtgccaagaacacataatgggtatagtttattaagaaagaaaaaattggtgtttggaaaactggttatccacatgcaaaaaaaaaaaattaaattgaacccctatcacgcacgtacaaaaaccaatctataatgaattagagacttaaacaacatgcaactgtaaaactcctagaagaaaacatagggaaaaagctttttgacagtggtcttggcaatatgtttttggatatggcaacaaaagcaaaaatagatatccagtattacatgaaattaaaaagttctgcacagcaaaggaagcaatcacctaaatcaaaaggcaactgatggaattggaaaaagcatttgcaaaccattcacctaataagaagttaatacccaaaatatataaagaacttatacaactcagtaccaaaagtataaataactgaattaaaaattcggcaaagtacttaaataaacacgtatcaaaagaagaaattcagatggtgaacaggcatatgaaaaagtactcaacatctctaatcatcagggaaatgcaaatcaaaccaccataaaatatcaccttacacctttaggatgactattattaaaaagacaaaagataacaaacgttgatgaggctgtggagaaaagagaatgtttttcccctgtcttttcaaagggactttctcatagaaacagttcatgattactaacgccccctctttgcgtctcaacacagcaatcaggttcccaccctgccatgctactgaagctgttctggcagaggtcacatccagtctaattgccaaatccagtcaatagttcttagttcttgtttcggttcttaattgtgcagcatttgacaataaattatccattccgaaaagtctttcaattcttgtcttacatgacctcattctctagattcttatttagcttcctggccatactttttcagtcttacttgctgtgtcctccacctccctcttcctgagttactgttaagtgaattgcagttcaaaaacaggatgcacattatggcactatttatgatgtattatgtatacataaatatgttactggatagagttgtccaggttcttgccctgttgaacaaagaattgaacaaaatgcagaaacaaagtgacaaaagaacagagcaaggaaagacaaagcaaccggagaatgcagcaaggaaagcacagatttattgacaacaattcacagagtgggagccggctgtagcaagcagatcaagagcctctccaattagggtttttataaagccaaaataacttggcaacacccctaggtgccctttagtggcctccagttggttataccctatgaaagatgggcctgcaacccaacagaggctgaaatggaaacttctgtcttgtaatcacaggagtgaagacgtggcctgtatgctgcctaatcttgcctagaactggctgcacctgctattcctttgcttagaactggctgcacctgctattcctttgcctagaactggctgcacctgctattcctttgcctagaacgggctgcacctgctattctttgcttacttatgcctcaacccttgtctatcctaattccctatttttctgcctcagatatattatacatagatatttagagtgtacacataaaagttgtgtttatgtgtaagataagtgtgagatatcaatatgtatattatatatgtgtatgtgtatatatgatacatgtgtgtcaaaatgttaggcaatggaaataatctgtgtgaacttcactttaatcatttctgtagctcttgaatatgtttgtaattattatttataactctaagaatcaatgttattactccgttttcagactgctgtaaagaaatacccgagactgggtaatttatgaagaaaagagatgtaattaactcacagttctgcaggcaaaacaggaagcatgactgggaggcctcaggaaaaatattcgtggtggaaagcgaaggggaaataagcacttctttaccatggcaggacaggaaagagaccgggagatggaggaagtgctacacgctttcaaacaaccagatctcgtgagaactcactaactctcacaagtacagcaagagagaagtccgccacatgattgaatcacctcccatcaggcccctcccccaacacgtggtaattataattccagatgagatttgggtgggaacataagagccaaaccatataagtcaataataaattacccactaatgcttatagctctttaattgtacttatatgctgatgatttctaaactgccctctcaagcccaggtattttccctgagttccagacctggatgatccatagtcgaatttacccttaagccttatcgttttgtgccttcacagtccccaaaccattctctaggtaattgctttcttgcagctatatctttacaactttataatattcaaaatggaaagcttcgtgaattatttgtgtttctattgctagtgcccatgatacatacatagtgccttgtaaagagaacatggttactgatactggttgagtgaataaactaagtggattattcttttttttttttttttttttttttgagacggagtcttgctctgttgcccaggctggagtgcagtggtgcgagatcagctcactgcaagctctgcctcccgggttcacgccattctcctgcctcagcctcccgagtagctgggactacaggcgcccgccaccaggcccggctaattttttgtttttgtatttttagtagaggcggggtttcaccgtgttagccaggatggtctgatctctgcccgcctccgcctcccaaagtgctgggattacaggcgtgagccaccgcgcccgtccggattattctttattccttgtggtttaaggaattatcaaagtatttttagttagggagtaacatgttcagatttctaatttaagattaatctggatgtatattaaaaaatgaaataaggccgggcgcggtggcctgtaatcccagcactttgagaggccgaggcaggtggaccacttgaggtcaggaactcgagaccaacttggccaacatggtgaaacgccgtctgtactaaaaatacaaaaattagccaggagtagtggcgcgggccccaactactcaggaggctgaggcaggaaaatcgcttgaacccgggaggcagaggttgcaatgagccgagatcccgccactgcactccagcctgggcgggagagagactgctgcatcacaggaaaaaaaaaaaaaaaaaagtggagagtttagaagggagaagggagaaggcaagtataaaaagtcgcagaaactctatgcaccaatgatagaacctttctgatgaagttttacctctaaggaacaaccacaaaaaaaaattgcatttcttacacattagctttttaagatacacattatttggtttaatgacaggttgtttactgattctaaaataaatcttttctgccatcttgtggacagaaacaatatttatttatctttttataccaatgtttaaacttggtagtatttactgagcctataattatccataatgttatttattattttaaaagaaacttcaacttaacccttaaaaatcaaaaagcatttcttcttctgctttcatgccaacttacttttaactctacatggactttttatgtgtatatatttagtcatactgttttgttaattgtaagataaatatttctaaacttactgaaatttgcttttgttcaattttgctccaaattctataggctaaagaaaaacctcagtgatgatttcattgtgaatatacctattgagctcctttcctattattgagttcttatatattaatttattcgatttaacaagtatctactgagtacctaccttatgtcagtcattgctctaaacacggaggatataatcgttttaaaaagagacaaaaatttcttccttccaggagttcacattttagttagatatatggagtgg

SEQ ID NO: 1884345 - DNA, 4001 bp, Homo sapiens
acctcagctctgaagaagctcactgcccagccctgggaaggagagacatgttagagtatgaatggccgagcctggaaggggtgcctgctggccctagattctaggggcacatgaggctcgagtgagcaaccagtgtcccccagaaagcaggtgggtgtgcagggagccttggaggatggagggaagtcgccttccagcaggtgctggaaagaccacttggagtttagtgggcctctgcccggcctctggagccccaccagggctggaggagggaggcctgggatttcgccccttctgaagctgatgggtggctggactggtgacttccttctctggcctcattcccctcccagggtaagtaagtgggttggaccagagcaggggcttccaatgtgattttttaaccatcaaacaaactcatagtctcctgataggacagatacagtggataatgggggctgggctcctcacagcccctgaagcaccaggatactggtttgaaagccacccttcccggctgtgggatgggtaaggggaggggaatggcgctggctgaggctcagagagaagggagttggccagagttagccagagtggacacctagcccccagctccctactctgccaccagtaccttggggttgagggggctacctgtcagggaccaacatctctgcctccagagggcaggaggaggtcccaggtagagactacctgatgatttggaagagaggactcccacctggacaggaatccgggggctgagctgggcttcgtgatgggggtggcactgtggcccgtgtcagcctgtctctgtctgtccctggtgcacccagggagtaagtagatgggaggggtggccaggcacagggtttcctgagcccaggcaggggaggaaatggtagtagggggtctgactcatccccatgtccccagcacccagtgcagggcaggggtggggggtgggcaggaagtgctctccgggtcaatggtgacaacaatgggtatgtgaacagaggcggcgggggtgggggacgcaccccagaaagcacctctctggagggcctggggtcagtgcaggggtgagaaacaggcagttaccaaccctttggcctcagggactctcctgagactggaaggctggacagagtgctccttggggtcttaagtagagccaaggagggcatttgagggcagaatggccttttccctgggggcctgactccccaattaccaactcccaaggggttacagactggagggccctggcagcagaggctgctgggtaacagcccagcagagctgctcattggctgccacccttggactttgccctccctgataaggaactgggagcagaaattattaactgaatcattaactgggtggccccgccctacccaggcagcctgccttaccttcccaccttcctcttcacggacctagcaccttcctgggcctcagtttctctcattgccttgggtgctggagtatgtggggcctcctctcctatctccaggccttcagccccggctgccacggggtgtgggtacctcttggttgggtctcggggtaggatgatgtaatggttctgtgcattcgccagcgagggcagctggggtctgttcctagctctcctgcttacccacagtgcttctcttggccgtatcagggcaccgctgtgcctccgctttctcatctgtaaaacgggagtgcagttgtaatggcagggcctccgtcccagggtttctggggtgattaggtaagattgtgcctggcctggtgaacactccattggtccatggcaggtgttctgcgccctaccttgaagattactggtccccagggtaggtcagtgcccctaagcttagggggcttgttgagcatgttctgtggttctgtgtgcaaggcctgaaccatgacagctctggcccagcgtggcctggtcctggtccctggcacatccagtggggcccgccccacctccccctctgagatttgggttctgttcttgctgccagcaaggaggaggggcttggctgtattgtgacttcatctgctgcacccaggctctttgcacgttgtcttcctggagtcctggggtgcagtggaagcgtgggtgacggcctcccatttctgagggggactgtgaggcaggacaggaaggcgatgatgtgtcaggctccctcaaggtggccacaacagagctgggactggagcctgggtcccagctctgtgccagcctgggatgggcagggaaggggcctctcctcctgacatgctgaggggtggctccagcacgggtggccacgccaggtgatgtccgtgcagcctccttgacctctctagacctcagagccctcactcacatggtcaaggttgggtgatgttagcagttagatcccacgagtgccaaggcctggagtgagggggggaggggcaaagcccctgggtggggagtacagttgggtccggagccccctgccggcctagagtatggagggggctcccggacattctgtcctccctgtgccccaggtcgcatcagtgagggaagttctccctccagctgaccggggtccgtgcagccaccggagtgcacaaccacagcctctgtctctcctttgtggagtttgaggatcctatctccctccggcctccctcactcccctctcttctccctctatggctggggcaaggggatccccatcccctgccctgctagcttggaggagggaagttgtgcctgtgacactgagttcactcagtggggcctggctccagccggagctgcttagggagggtctgacagcaggcggggagggggcttggagggaagaagaggaggtgggagctcttcctgggtggccactaacctaacccatgcatgtgacgctgtgcctgtgggcctgggcctgtcgtcgggtcagtgagtgtttgtgtacatgcgtgtcctggcatatacacctgtgaagtgtgctgaggtgtgaacatgcacaggcatgctcgtacctcagggcttttgcaccggctgtccccgccatctggaaccttctagaatgctaggcattttgctgctctcgtcatctgactctgctccctagaatgtcagctccatgtgggcaaggcttttgtcccttttgctcactgctgtagccccaaagctgggcactatgcttgcctggcacataacaggtgctcagtaaataactgctgaatgaatgaaggcacacggatgaacgctggtgtgcgcatgtgtgtgggtatatgtgtggggcatgccactgtgtgtcagtactgtgtatgtgtgagtagggggcaggtggtacgtgatcatgcgcatgtcagtggatacctgactgcagggtgtgcccttacatatatgtgtgtgtgttggcagtgtgcctgcgtggggccacgccggtgtgtaggcacagatgggcacaggtgaccctggtggagacctgtgtccaccccaagctgcagggtctctacctggcacctggtggcctgcctgccctggtccctgtgggagagagtaggaacaggtcgcagctgctggcctcggtgctgttggacctggctttggagcatcttggggctgtgagttcagccttatgttgacctgaggacagggcggcagcttcatggggacttggagtggatgtagccatagcccaagggtggctaaagattctgggtctcctagaagagagggttctccggctgggccagtggctcatgcctgtaatcccagcactttgggaggccgaggcaggtggatcacctgaggtcaggagttcgagaccagcctggccaacatagtgaaatcccgtctctacaaaaaatacaacaattagccaggcgtggtggcaggcgcctgtagtcccagctccttgggaggctgaggtgggagaatcacttgaactcaggaggcggaagttgcagtgagccaagattgtgccactgcactccagcctgggcaacagagtgaaactttg

SEQ ID NO: 1884346 - DNA, 4001 bp, Homo sapiens
cccagcaggcctggagagacctttggcctaggccctgaaaaaggggtcgcatgtcctcttcccggagcccccgtctgtgcccagctagtgacttgcgggctcgagggccaggttgagggtactcatcgagcctcgaactcctcctaaaaatgattcctgccaaaagcgcctctccatcccggcgcggccttcgggtctctccgatgaagggactcccttggggatcggaggaggggacagggtgattacccagagaggtagctggccagcctaagggcagagatcttggggccctagtgcccgaaggtgcggaggagcgcactcggcaagactagtttcctggggatcgactctacgccatacaggacggcggcccaggctggaccgggccgggctagagcagtcacaggccgggccaaggaaggccaaagcaggggttggagccggccggaccctgggtggggagaagcaggctcccgcccggccggaaaactagtcggcgcagagctgtgcccaactctagccgccatgacgtcacgcgggccgggcagccaatgaggacggcgctggcgtggatattaaggaaagttagcgcctgcctgagcaccctcttttcttatcattgacatttaaactctggggcaggtcctcgcgtagaacgcggctgtcagatctgccacttcccctgccgagcggcggtgagaagtgtgggaaccggcgctgccaggctcacctgcctccccgccctccgctcccaggtaaccgcccgggctccggccccggcccggctcggggcccgcggggcctctccgctgccagcgactgctgtccccaaatcaaagcccgccccaagtggccccggggcttgatttttgcttttaaaaggaggcatacaaagatggaagcgagttactgagggagggataggaaggggggtggaggagggacttgtctttgccgagtgtgctcttctgcaaaagtagcaaaatgttccactcctaagagtggacttccagtccggccctgagctgggagtagggggcgggagtctgctgctgctgtctgctaaagccactcgcgaccgcgaaaaatgcaggaggtggggacgcactttgcatccagacctcctctgcatcgcagttcacgacatccacgcttgggaaagtccgtacccgcgcctggagcgcttaaagacaccctgccgcgggtcgggcgaggtgcagcagaagtttcccgcggttgcaaagtgcagatggctggaccgcaacaaagtctagagatggggttcgtttctcagaaagacgcggagtacgaaagaatgcggccgacagagctgggcagcgcgtaaagctcccagcgtgtgatttgagcttcacttcggaagacctaataattagcgattctcactgagctagaacgcgggctccggttactgcgggcgctgcgctggctgcctcggcgggaagcgcgcgggcgccatgggagccgggccgccaagcccgggaaagagaagcgcccaccaccctgcggcccttggagggccagagccggggcccggaagtgtccccttagtgagtcagggaagggacgacccaaacttagactaacttgtggttcagccgggcgaaagtcctgggagcccggccctaaaagcagctggagacgcccaggccggcttaggcggggcacccaagaaccccgcccgggagtttggggcggcctctgggccaggccccggctagcccccaacccccactcccactcgcgctcctgcgccccctttctaggtcttctgggagcaccttcggagctcagtcacctgtgacaggtgttgggacctccgcccgactccgagcggtggcgccccctgctcacctcacctggaaacgggggacgagcgcagtggcagtccggccgcacgccttacctgggccgggatcctctcctccgcgggttcctctccctggagctgggcggcgagcaggtcgcctgcttcgcagtgggaagtggaccttctcctccagtcataaatcaaacccagccatcctcgggcctcctccctcattagagatgtttattggagatcgtgtttattcggctgtcacggcgagaaaacgcggtgacataattacctctgaccagagtcctcgctccgcgcccagggcgagccgaggacctcctctgtcgccttctcatgcccgtgcccttcgtgatcggagggcgcccgtgataggcttgtctttttttcctcagaccctctcatagaatttggatgactggaattactattcagatttccccagggcccggagtttatttatttattttagaattggaaaggaaaaccgaagggaacccaacgcccctccggggcagaagggggcagcgcgcgcgaggcggaaggacagtcactctcgctgcacaaactttcccgcgggccgcgccgcgcgtgcaggggctggacgccacccggcgccagagccgggcctgaggagcggggtctggccgggaacgagggctgccagcctgggtggtgtcatttgttgcttcatttttcattccctttcctctcgtgaggaatcagaggcatcgggccgcgcgggctgagaattcttaaattctccccggccgcattcggctgagccaacccgcagttcctgtcagcccctctgtcccccgggcagcggttttccccgctagccaggtttggaagtcaccctctgtgagactgggttaggaagtgacgaaaagcgccgaattgttttcaaattgaaaatacttttttttttttttttggagatagcgctgacaaatatatgggatcccggcttttgatccctggctgccgcctctgttctcctgtcgctaataaaactcgcattgagccccttagtgccttgattaacaggcagattaactcttactggggttgggaacagcttgtcctaatcaatgtcattttaaaagcccgtcaggatgcgcttagcttcggttccctggatgcttgagcgagccagccatgacatttgctccctccccctccccagcctcaaatcccccagtaaagcccccagttcccgcctgcctgttcccaggtctacaacgggacaaatcgcaggaccgggtcgttggcctttagaataggcagcggtttagagaggggatatccagggagaagggactgaggtggccttgacttgcttgcttttcctttgaagctgaactcttgcctcttgggggcagaggttacagggaaaagagagatggggggatcgtcacagggtgatgaaatggaaagcaaacttttctaggaaccctatttgcaaaaatcggagagtgccgctgatttcagttgtcctacatgtcaggagttttaaacctaactcctatctggacaacagcatggagggactgggaggcaaagccttgggagtctgacccgctgggctgctaggaatccctttgctgggagactccactggacaatgttattttaaaggtattttgggggtgggcagggagaagacagagagagaaagagagagagagagagagagagagagagagagagagagacaggctggcctcccagagcgaacggaagaggactgaggactgaacccagggagcccctagcactggccatttggcaggaggcgaggaagggcgagggcaccgcggcttccccccaagccgagcagtggccacagcctgaaggtgccacggggcggctctgggatcttcttggcttttctaggctctgggctcggcgaggctgccgggttagcgggaaccggcaggttgctggagaaaggagagggacaaaggcctggaagtgggggaggcaccagggactgggcggccgggatgggagcctttgcctttagggctcactggacccgtttgccagctccgcggacaagggatcccaccttcccagggtctgcaaaaagagagacgtttggggcactacaaagtgacgcaggtgtctgccaagactt

SEQ ID NO: 1884347 - DNA, 4001 bp, Homo sapiens
cctccaaaaaggtccctgtgtaagtatgaggtgggtggctgagatttctgaaatccgtatctgagatgactaggtggagtcatacatttccacccttctggggttaaggacacagccttaaccatttagggtgaccatttagggtgaagtcactgtttatgggagtctaaactgtgactttggcaaggtgcaatataaaaatgctaatacatgtttatgcactaagctggaaataatgccaagcccctcagttaaaaaaaaacctgtcaagaattgcagtttccttgagtcggaggaactaagtgagctgttaaatgaggactgtaaacctgccacatggcgacgttgctttggttattaaatagaaatacctgctttctatatgcatgcactgttgtttacatgcctctgaatttctaatttctgcaggagattctggtgactggtgtgccattttctcaatgttcacagttattataactttaaatattttacccatatcctgtaacaatgtcatccaagtgttctttaagtggtggtgctgaaaaacgcacctgaaaatcgataacattggaaaggaagtgagatgtgataaaacgttatgaagaaggccaaaccaccggcaggaaatgctgcactgttaatttagcagagagtgcgttatgaaatattagcgataatgccagggaaataaaaagcagcattaaggcaaaaatatgccacaattggagtaatgtatgcaacctatcctttctactttgcattcatttctctggcaaaattagtcagaaattatgcacgctttgaattatgcaagtttttcaggaccacatgctttgcataaaactctactgccctgaggttctcagtgggtggaagaatgagtgaccatattctagggttatcttaggccaggccgttgtaccctcctgtcctaggtggggatgaagtgacctcatgtgtaaaatgggaccgttggactggcttgtctttctttccttattagactatgtcgagacaggcaccattatatttctgccccaaaggtgtctttttctggacggatcccacagctgataccaaacttgtctttattaactgtgaggctggccattcaaacaccaggtgccagagagggtccctcactcatcggaatccgggtgggatgaatcctcggaggcaaggtccctccaccttcaccctagagtcacacagagacttgccctggcggctggtgacaggtgggcgggagaagaaaaggcccctggggagcaggagaaagccaggtgccatggggacccagcgccgctggagggcagcaccagcacacagctgaggccgcctctcccggagcccggagggagctgggttccggtcgccagcggtgcccgggtgagcagttcaccctcacgtccctgctctgacgaagtttccattcttctggagaagacaaaataaacgtgaacaaatgaacaagtgtgcattgtcaggcagcaagtgttggtacaaacaagatagtggtgggggtggggacaccgttaaataggggccagggaggcctaacccgggaggggatagctgagatgccacttgagtggagaaaacagtccgagatctgaaggtgttcatggagaggggaaggggcccctagaggagtcgggaaagcctgggtcagggaagacgagaaaactgaggaacagagaagccaggtaacttacccagggtcatagagccggtgagctggggacagcgcctgtcaacgccccagagccttccacggcactggtttctccgaccttcctctctaaacaggaccgtgacagtgacagtttctgccccactccccatttctgaccgcagtccccataaggaaacagggcagggatcactggctgtgagcccagcaagtcccctcccgtggctttctcagttattaaatggaagggtgggtccccccataactccgaagctcccctctctaagcgtccgcgggccgggaacgcctgaattctggctcccgagcaccttcttgtggacagttttggaatcacacgctcagcgagaaagggtcgtgggaaaatggtctgtgctaatttcggagaggccagtggattggaaggttatcactgagggtgggtgcacgtgtgtgtgtgtgtgcgcgcacgtgcatgcgtgcatgcatctgtgtgcctgtgtgtgttggtctgtgtgtgaatgtacctctgtgcgtatctgtgtgtatggttgtgtgtgagcacatactgcccgagcctgtgtgtgtgtgagtgtgtgtgtgcactaatgtttgtttatatgggcacaggcacacacatgtccatgtccatgtgtgtgtacctgcatctgtattttttcgtctggtgtatgggcttgtttttgtgtgcctgcatgcatgtgcccatgtgcgtgtgtgttttgggaactgggacacagaggatgatatgagaagtccccagtctttctcacaaaggcctaaccactctccctgaagccagctttctcccctacttgcttctgtctgcaccatcacctgagttctcccacctgaacttttcaccgacatttttgatgatttttctgttttgtgtccgttgaggctcatttgaatgttacagatcatagctcaagaaatgattctcaggccgggcatggtggctcatgcctgtaatcccagcactttgggaggctgaggcaggtggatcgtctgaggtcaagagttcaagaccagcctggctaacatggtgaaaccccgtttctactaataataacaaattagccaggtgtggtggcgtgtgcctgtaatcccagctactcggggggctgaggcaggagaatcactggaaccggtgaggcagaggttgcagtgagctgagatccctgggtgacacagcgagactccgtctaaaaaaaaagaaagaaagaagtgattctcctctagtctactcacccaaatcatgagtttcacttctcaggtgggctgatcacccactgtcctgttgagacctggggacttgtacaaagtcgtaccctggagggttgagcagaaaaccaggcacatagtaactaagacaatggcgcgttagcaaagcactccacacatcccgttcacatgtgtgtcttacttgactcacaaactgatctttcatccttttttttttccttttttgtggtgaacagggtcttgctatattgcccaggcaggtctcaaactaccggctgatctttcaagcctaggcaaggtgaggctaattattcccattttacagatgaagacactgaggctcagagagggaaataatgaaaatagtactgcaggaaccatctaaccaatatgcaaactctctcatccagttttcataacatcatcaattcccttctttaaaagacaaggagatggaggctttaaaaatgtaaggcgagtgcttaatgccatatagccaatcagtagttgaggcaggatttgaatctcgctccagagattaaagcccaagtcctaaacacaatggcaggcgtgagggccctgggcacacactgactcaagctctttcagccacacactgtccctttgccatgcctctggggtcctaagaacatcctcctctgagcccacagggaggtcattccccatcctgggtgcccctgctcctctcccagatgcggggcaggtgaatcttgtaacctgtgtcactctcagaggctgagatggggactgagcattaattatgcaataacctcgctgtggtgtgcctaattgtctgataaccataattgaatcttatggattacaccaacattattgcagggagcagcttaaggcagttaacagaagctgcactcactttgtgatatcttcctcctgtctccttgctggctgggctgtgagtcctttcctgggggctgagggaggcctcgaggtgcagggggcaggcaggaggtgagtgacagcacaaatgtcgcatcaccttatccccccgagggcacca

SEQ ID NO: 1884348 - DNA, 4001 bp, Homo sapiens
agcctccgtgctctgggcaggaaagctcaacctggccccaaagaaatcgggggcaacgacttcatttccaatacagccacttgcccagtgccatggaagtggccctatgggtcagctgtaccctccagggcctgaccaaaggcgaggcttgctgaccacatgaccagtcagatacgtctgtcatggaggggaagcgaactggctgacatgccagtagctccctaagtggcctcccatccagtgtgtgtagccacccctgtaggcaagcggctctgagaggatgttcacttcccaaggagaagcagatctcttcaaaaccccaccctcttcaccccctatttccctggggaccagatgctgagtgtcgtttgtcacactctgggccctggtgcttctgaacaggctcagggaggaagcccggggaggatgcactgctctcacccgcagggtaggtttccatttgcggaaagccccaccaccttgctcacaggcggttctcaggaatgcggaagtgctctgtgggcacccaccatgctccgggcgctgttgtgcttgggatctggggcggagggtacacggggctggcgctgggtgaagtggcctgtccatgccaccttggtgggcttcagccacttgggcttagctaatcgacagctgcagcaacttgtggctccaccagggggcggggcacccggcactttggggaggagctggtagagggccccgctctcagcctcccagctgcctcccccaccgaccacaggggttctaactaggtctttggtctctagtggcgtcaaacccctgccagtcaccctcactgcctccggacaagggcctgtctaggacagcctgccccaggagtggcccccacactcccctcaggccagaccccagccagggagccccacccatctgtcctctcttccacctcgcccagcctcccatctcgggccgtggacaaatgccgccagtttcagcctctgcctcaaggcaggtctctgcccagctgcgcccccagggactctgcttgtcccagtgccccacagctcctctgggctgccctggcaagggagtcaccctcactttgtcacctggctgtcccctgtgacaatgagggctcacagggcctatgagagctggcctcaggttcctccaagtcccctacgcccctgccaccaggcctgccccctcatctctgctcagcccagttgtcctacccacctcatagagggacatgccacaggctgtgtccaggctcttgggcctcttggcctgaaagggcagagagcccggtcatcctggccagatgctgcccagatccccctccctgttcctcccctccagctccccccatcacaggttcctggcctctgcagtcccacctgtgctccagccccactcaccagcctccgcttctccagacagatgtcaaagctcctggctcggtttggcaccagcttcctcaggggcacccgcagctcccccagggaaggtgcctgccactgtcgctgtaccatgggtcctcgcacacacacagcctggtggccgcccaggtcagacctggccaggccagccccatccctctgctccacccccaggtggcccaggccagatcctcacctaagggtcttgcactcagcatcctggcgggtgaagccgtgataggtgagtgtctcctcccagacaggtaccctcgtgccccgaacggtgtgtgtccgaagctggctggcctagggcccaagccgggtgggtcagggcctcctagggctaagaccgtcctgtaacccccaaccctacctccctggtaggaccccccactatttgcacatcccagcaactgagacctaggccttgcaggatggggaggagccaagcagagccaagtgggtgccccaggctgggtgttccaccagagggcagcagtgggggcctggggcttgccctcaccttgctggcccctggcagcagattggctttgacataggcatccgcggagcctgaggccaatggcttgaggccctgggaacagacagtgggtatgagacaggcccgtgccccagccctctgtcccaggaacacccacccccatcctcaccttggcacgatgagccgtgcaatgcagggcactgttgtccgcttcaaaaagaagtgtgaactccagggtgcccagggcagctagaggcaggtggaaggcagcgtcacctcctacctcagctcagtctgcccccacccatggcacgtgcttcctgccttgcccctccatggccagatggtagggacaccccactccccctcctggctgggctgagctcagggtgtccccctcttcccgcccctactcactgctgtcgtctgagtctccttctggctctgggtcgggctgcagctggggtgcagagcggacggcggacgccgctgcggggcgcaggttcggagggtgcagggcaggctccgcaaaagggtaaaagtgcgggaagtagtgggaaatgaggcggatgggccggatggggcccgggctcacatcgatggccatgtgctcctgcatgctaacccggggaggctgcccacctgctgccgcagtgcccgccatggggacccagacggggggcggtgggcggagactcagagaaatgcctgaggactggggctggcgggaacgcacccggcctcggaaatggggtgaagaagcatcgctgataccatgcagggacctgaggacagagcgcagggttgagggaggggctgggggagtcctcagcctggagggttgtggcaggctttggaggggactgggtgtgttgggagtcagtccagctcccggcccttaccgctctgggagctacttcacccagtgtgagttgctgctgctggcagtgggtacgcactcatgagggcagagcccgtgactgctgtgtccccagtgagtgagggtgacccagagctcagaaccctctcagagctccttcctagcgctggggctcagcttccctcctccctctgcccccttcacactttgtcaaagggagttatttttgccaccatcatgtggccctgctcccaggtgaggaggctggtgggccggaggtgacagagggctgtggaggtgataagtggtttgtgggaaggagggagcgcataggaggaggggagggggtgcatgggaaggtgggaggggagggaggtctggggaggagaggaggggagccacaggagggggctcctgtgatggagccctgtgggggtggccagtttacactctgaaacatgaaccagatcatcccgcctccacccctgcttggaataaaatctgaatcctttggtgaggcacggccccttttcacctcaccaaggagtgtccccttggcatctcacagtaacggcctgctcccctcccaaactgggccaccctccctgccctttgacctgaccactcctactcacctttggtttctgggtcaccccctgcaggggatcttggctggttttaaccatccagcattccctctcctctcttctccccagttattcttttaatttttaatcaacataaccgtaggtgtgtatggggtacaatatggtgttctgatgtgatatgtgtagaaatgcaatttctacaatatgcattgtagaaagagtcagtcaggctaatgaaaaaaagaacacttaaaatgtgctcttcaggcaactgtgaaatacacaaggcgctattgttagggatgtttgtcatgctgtgcaacagggccttcagcttactcttcctgactggaactttgtaccctaagagcaatgtctcccctctccccatccctagtcccccactctccagcccctggtgaccaccattctctctgcttctaggagttcaactttttcagattccccataaaaatcagaccgtatagtatttgtctttctgtgcctagcttatttcacttagcatatcgtcctccaggttcatccatgttgtcacaaatgatagaatgtccatctttgttaag

SEQ ID NO: 1884349 - DNA, 4001 bp, Homo sapiens; identical to SEQ ID NO: 914639

SEQ ID NO: 1884350 - DNA, 4001 bp, Homo sapiens; identical to SEQ ID NO: 914645

SEQ ID NO: 1884351 - DNA, 4001 bp, Homo sapiens
cttgtcagccaggattgcactggttaccagggcagccatggcaccaaggtttgatgggcttgccatctgagtttaagtggaaatgcagaatgttcccataccagcctgggttacattgtcctcttacaggggcctcaagcccagcagcgaactttggctcccgaattaggtagactgtctcggctggtatgtgacacagggcaaggcacttcattgcttcagagctccttccatgccgtaaaaggtcctacaagacctggtcctaatccctctctctggcctgttctccctcgcccctggcccaccctgctcactccactccagccacactggctgccttgctgttgttcctcaacaacagctggcttgtttccaccacaggacgtttgcatatcctgttccccaagcccttcccatggctggctgcttcaccactcaggccccatttcaaatgccacctctttggggaaggcttccctgattccccgactttggtgactcttctccccagttgctccattcaccatttccctgttttattggctttaaagccactctcatctggtcttttcttgtttcttcatttatttgtttattctctggctctcccatgcaagcagagcctcatctgtcataggtactgctgatccatggtgcctggctcacggaaggcatttattaaacattttgagactgaataaaaacactagctaacaccaacatgcatttaccatgagccaggcactgatccacaggcttttgtactcaaccctgacaacaaccctaagaggtaggtatcattatatcccccattttattaataagaaaacaacagcacagagagatgcacttgcccaaggtcacacagggccaggggttgggccaggattcgaagcaggcaggctgtctcctgggtctgaactctcaactactgcacctaatcaaacaatccctctggtcaaatgtgagtgatgataatagtacccacctcgtgggtgttgagggtgagcccaagttagctttcagcgtggcatgtgaacaattatagtcaatattgaatggagacctatgatgcttttatgaaggtttctattttgggttaaaaatgcacaaatttctcctgaccagaaatgatctctgagtgctaaatatttcatgtcaatggaatagcgcaaatgattaagcaacaccccataaaatggggcagacccagggaggaatatatatccaaactgactcatcccagtgagctcaccgcacatggattacaaatggggccgggtgcattaagcccctctactggcagaagggaggctgctgcctgccatgcgcctgtgctgagaatggcaggtccccagggagacgagaggccacccccttctctgtctcttccatcacaggcgtgagagcctcagagcatgagccaattctgtgcagtgctcgacatacagatgagaacactgaggcacgagggacagcctgtgacctggtcaccacgctcaggaggacgtggttacccgcggtcctgagggcgctgactttttagaatgggcgagggcagctctgtcccagtgaccagaacggttactgcctttaaaaagtcgtgaaaatgatagtgaactgtaccccacaacgagtgcgcctctgccccccaagatggtggagaggcccccagcttacgccgccagcacgcggggcaggaggggtgcgagcgactctggccaggccccagggacgggaaacgggtcgcgcggacctgaccggcgggagcccaggcactcacgtggcgtgagcgccgggggcttcagcacagagacccatcccatctgcccctggactcccgcgagccccgcgggcctctccgctcgccccgccgcccacctgccaggggaaggagcgcagtgcacgcgccgccaggaagcggcgctccaaactctgcagcaagagttcggtccccgcgttctcctcgggcgccatgacgtgggcggggccgcagcgttgcccggagaccgggcggaagccaggcctggactgaagagggggcgggcccagggcagtgggcgggggcagagagggggcggggcctgggggtagggtgaggaggagagtcgtgggggcggctctagggcggggccaggatgagcgttatgaggcgggacctggggtggggccaggatgagcgtcatgagggcgaggcctggggtagggccaggataagcgtcgttggggcaggtcctggggagagttctggttggcgggtcctggggcggggccaggacagggcgatcctggaagcggggcttcggaagcgtccaggttggaggcgtcctggagtcggggccttgcgtgggggcaggataagggtcctggaggcggggcgttagggtgggggtaaacgatgattgggttcaggaggcgagactcggagcagagcccaggagacaggtcttagggcggggctaagggcagacccggagaagggctcaggaggcggggccagggcggggcgttgactatgtcgtagcacgtggccaggcgctgctcggactctgggaggcggagcttaggacgggccgacatggggaggggcccagggtccgggaggcggggcagagtccgggctgcgggctgcgctcaggaggcgggccctgggaggcggagcttagggaggggcaggtgtcggtagggaccaagggactgggaggcgggtcggggctgggctcaggggccgagagggagctgggcttggggtggggccgagacggagcgaggggtccagggtgtgagaaacggggaggggtttgaggaggggtttggagtgtggctcaagttcgggaggcgttacctgcggagggtttgaggcaggcccaggagcgagcccacggtctgccgaagcggggccaggggcgggccccaggatccggagctttgggcggggccgagtccgggttaggggcccgggaggcggggccggttagggcgagggtccccgggatcgtcgggtcaggccttgggccaacgtaggcactctcgcagttcctccgccttcaggaaggtctttttggcaggggccttaggggtgcgcgcttctgtcctggaggcgttatcctagcctcctctccatcagcgccacacatctggagcccgataggaaggagctttccctctgtcccccagcctttggactgtcaccaaacaagccatccgttcaccaaatacttatgaagctcctaccatgtgtctggcaagggagatgtaacagtgagaaaaactaggtgtggtccaggccctccaggggctcagggggtcgtggaagaagtggacattgaagtacttatcacacaaatgagtataaaagtacaatagcgatatctgccacgaaggcgagcagacagagctagcggggcttccaggaggagttttaatcttgcagggacaggaaggaggagttagctcctggggggcggaattgggggtggtggtgatatagacgtggggacagagtggaaaacaacaaaaatataattattttagttcaaagttattgtgtcttgagttgaacgtgtctttagttcaaagttattgtgtgttgagatttcagtactgcccctgaaatctgaactgtgttcaaagtctaaaacgtttaccttagcaaatccctcataaaactccatttggaagagtcccgagagctaatttgttcagtatacttgcagaaggtagatgaggagacagattaaatcttattacctctttcagatgagaggcacttgagtcctgctcagctgtgagaataagagagggggattaattctaattgaatacacgtgttctctcacagctgttgttccccaccagaaccaaatgagcgcaagatctgacaaagaaaaaaaaaaggttcatcttttattcccccaaacactttcatttaaatcaagagggtgggatgtggttattgctgtgtttttagacagaatcaacagtttctgggtctgagatat

SEQ ID NO: 1884352 - DNA, 4001 bp, Homo sapiens
aacagccacagtgacctgacccacactgtccagacgatggggccacataggattcccacagtgggagatgctgacctggacaagagagggcaagggacagaagctcccaagacccaaggtagggccctgcgggcaaaatggccaagagccgccttgcaccgcaaatgggccctgaggtccagggctgcaggagcagggtggggagcccggccagatggaggggcagacaccggcacccgctgcctacgtcaccgccctcagtgccgcccacaagcgggtgccccactgggtcccgccaccccaaatcccagtaccagagccgggcccggctctgccacccctgccaccctgtgtggcacccaggccctgctggcacaaggccacggctaatctgctctcagaggaagctgaggaggcagccctgccctcggtgtttcccaagcccccttatcccagcagattcttctcggggaagataagctcccagcttagccagggcgggtgggaagtcagagctgcttccttaattggcattttccagttgagagcacattctctacctttttcacttggatcagctaattgccaaatgttttcatttttgagaagaagtaaaattgcagagatttgggatttagggaaggaatgcaaggatcaattttgcctaattacgaaatgtctcggcggtcactgtgacgggtcccagagtcggccgtgtggaccccggggcctcccgggcggtggggggccgggggctctgatgcagatgtttacctgatgtcgtgggcctgaatctggtttacattggaaatcagactgtttacaggccagcacatctgcctcttcctctggctctccttcattctgctgtaatgttctgcaggtctcgctggggtctctgtgggaatatctgtgacacggagtgagccaggccagcccggggcggccccatccggggacagcagctcacggcctggccccgcgtgcgcagccggggcctgggttggcggtggagatggggagggtctggggcccctgggtgggtggtgggggtaccgtcagcccggctgcagggttccagcggaggacagggagccttctccatccctgaaaaccatcgcggggacagtggactcatcaggatgccgggaccctctagtgtgttctggaagcagaggctgggtgtgggcacgggaacctgtgattgtccccagacaccgagaggtccacaggacccccagtgcccagaccccggctgcagatcggggggtccagtcatgtgtcggggaaggaggagaggagcaggggccacagacagggggtccaggagggcagggggtcctggagggcagggggtctaggagggcagagggtccaggaggacagggggtccaggagggcagggggtccaggagggcagagccacagcaggctgggtgctgctgctacagggggcttcaccccagcagccccctgcactgcccctctgacagcctccacctttgaccccccagaacaacgggctgctgtggcggctctggaggctgcggccccagtcatggggcctgcggctgccatgggctgagaccctgctgctcttcgtggagacactgatgtccttaccagatctcccgggcccgccctcagcctccaggctgaccaggcttcctgggcctcctaggacacagccctgggtctcctcctctaggatactggatgggaatctgcggcttccaacatccacctgccggcctttccctctgccctgtccccttgctgccatggccgcctttgtcctccctggagattcagagagcagccccgttctcagttacctggccttctgggtccttgggaggttctgacctcttcccagcaggggccctgggggctgcgtcctgcctggtccaggccttctcaccctcacctccctctgggctcagggagctggggccacacagcccaaagaggctggtctgcccgggacaggccaccctcctcctaccagtgccctccctcctccggcagccacgctacctgcccttcctccccacctgcaaagcctcctgccaagcctgacacctggggattctgtctcccacactccaggggcctcctccacatgtcagtgacctctgaccgctgtttcagacccacagctcttgggtgcactcagccttgggtcccgatggcaccagagtgttccacgcctggggcagcacactcactgcagatctggcctgagactcagcagccgggcaccccatgagatctactttctgaatggcgtcgtcacctgactgggcatacaggccacggaccccatggtcatttgggcactgacccctctcacaccccccaaatcccacctgagagcagcccatcaggcaggccccatatattggatgcctctaagtatcagccttgatgtccctctaattccagccctggtgtcttctccctgggacaccctgctgctccctctagctgtgccctccacggtgactccagacatgcggattcagcctcttcgctccaggaccaaactcctcagcagctcccactactcccagcatgccatccagctcctcagcccagcagcaaagacaggcacagaatggctcccgaacccatcgctccggtctggagaaggagccctccaccctccacgctccattcgctgtccccttgcgggcccctgtgaggaaccccggccagaggcaccaatggccgccactgactttcaccctgtcttgaatcacaggaccaaggaggctgccccgacaagggtcgcttccagactcactccctgtcagccactgccacatgcctgccgtgggcagcattggaggacagggggtactctgtcagtcagcctaacaggctggtccgtccttccttccttcttccctccctccatccctctctcccttcctccctccctcacttccttccttcttccctccctgcctcctccctcctccctcccccttcccttccttccttccttctctgctacctccctccctcctccctcccccctcccttccttccttcctctctggtcaaatgcgggtacatgagagttcccaccatccccatggtaagtgcacagttccgtggcattgggaacctgcacgtggctgtgccactgtcgccaccatgcagctccagcaccttttcatcgcgcgaaactggagctccgtcctgactaatcactcactcccatcggcctctgtcactggccctgctgactgccattctgccatcttcctcttgaatctgactcctctgggggccttccatctgtggggtcacagcattggtcctattgtgactggctggcttcactcggcacgaggctgtgaaggttggtggcgttgctgcaggcgtcagagcacactccttttccaggctccgtaagaccccgatgtgtttgtctaccccatttcagatcccctcacctgctgggttgtttccacctttgggctattgtgactgcacggctgtgagcatgggtgtctgagtccattctgtgtagccataaaagaacctctgtgatggggtaattcatcaagctcacagttctgctggctgagaagttcaatggcatggccctggcttctgctggaggaggtcaaaggggaagcagacacgggaagagagataaagctcagggatgtcttggcttcagaacaagccccactcatgggaacaaatccattcccatgggaactcaccctgtatcacaagaggagaatcactcccagcaccacggactccccagggagtcactcccacgacccacacgtctccctcccctcaggccccacctccctacgctgccacactgggggtcccgtttcaacaagagttttgctgggaacagatgcactgactacatccaggtcgtggcaagggctgtgcaagtatttgagtccctgctttgatttcttttggggatagacctaggaatggaatggcggcttcgcagggtaatt

SEQ ID NO: 1884353 - DNA, 4001 bp, Homo sapiens
cagccacagtgacctgacccacactgtccagacgatggggccacataggattcccacagtgggagatgctgacctggacaagagagggcaagggacagaagctcccaagacccaaggtagggccctgcgggcaaaatggccaagagccgccttgcaccgcaaatgggccctgaggtccagggctgcaggagcagggtggggagcccggccagatggaggggcagacaccggcacccgctgcctacgtcaccgccctcagtgccgcccacaagcgggtgccccactgggtcccgccaccccaaatcccagtaccagagccgggcccggctctgccacccctgccaccctgtgtggcacccaggccctgctggcacaaggccacggctaatctgctctcagaggaagctgaggaggcagccctgccctcggtgtttcccaagcccccttatcccagcagattcttctcggggaagataagctcccagcttagccagggcgggtgggaagtcagagctgcttccttaattggcattttccagttgagagcacattctctacctttttcacttggatcagctaattgccaaatgttttcatttttgagaagaagtaaaattgcagagatttgggatttagggaaggaatgcaaggatcaattttgcctaattacgaaatgtctcggcggtcactgtgacgggtcccagagtcggccgtgtggaccccggggcctcccgggcggtggggggccgggggctctgatgcagatgtttacctgatgtcgtgggcctgaatctggtttacattggaaatcagactgtttacaggccagcacatctgcctcttcctctggctctccttcattctgctgtaatgttctgcaggtctcgctggggtctctgtgggaatatctgtgacacggagtgagccaggccagcccggggcggccccatccggggacagcagctcacggcctggccccgcgtgcgcagccggggcctgggttggcggtggagatggggagggtctggggcccctgggtgggtggtgggggtaccgtcagcccggctgcagggttccagcggaggacagggagccttctccatccctgaaaaccatcgcggggacagtggactcatcaggatgccgggaccctctagtgtgttctggaagcagaggctgggtgtgggcacgggaacctgtgattgtccccagacaccgagaggtccacaggacccccagtgcccagaccccggctgcagatcggggggtccagtcatgtgtcggggaaggaggagaggagcaggggccacagacagggggtccaggagggcagggggtcctggagggcagggggtctaggagggcagagggtccaggaggacagggggtccaggagggcagggggtccaggagggcagagccacagcaggctgggtgctgctgctacagggggcttcaccccagcagccccctgcactgcccctctgacagcctccacctttgaccccccagaacaacgggctgctgtggcggctctggaggctgcggccccagtcatggggcctgcggctgccatgggctgagaccctgctgctcttcgtggagacactgatgtccttaccagatctcccgggcccgccctcagcctccaggctgaccaggcttcctgggcctcctaggacacagccctgggtctcctcctctaggatactggatgggaatctgcggcttccaacatccacctgccggcctttccctctgccctgtccccttgctgccatggccgcctttgtcctccctggagattcagagagcagccccgttctcagttacctggccttctgggtccttgggaggttctgacctcttcccagcaggggccctgggggctgcgtcctgcctggtccaggccttctcaccctcacctccctctgggctcagggagctggggccacacagcccaaagaggctggtctgcccgggacaggccaccctcctcctaccagtgccctccctcctccggcagccacgctacctgcccttcctccccacctgcaaagcctcctgccaagcctgacacctggggattctgtctcccacactccaggggcctcctccacatgtcagtgacctctgaccgctgtttcagacccacagctcttgggtgcactcagccttgggtcccgatggcaccagagtgttccacgcctggggcagcacactcactgcagatctggcctgagactcagcagccgggcaccccatgagatctactttctgaatggcgtcgtcacctgactgggcatacaggccacggaccccatggtcatttgggcactgacccctctcacaccccccaaatcccacctgagagcagcccatcaggcaggccccatatattggatgcctctaagtatcagccttgatgtccctctaattccagccctggtgtcttctccctgggacaccctgctgctccctctagctgtgccctccacggtgactccagacatgcggattcagcctcttcgctccaggaccaaactcctcagcagctcccactactcccagcatgccatccagctcctcagcccagcagcaaagacaggcacagaatggctcccgaacccatcgctccggtctggagaaggagccctccaccctccacgctccattcgctgtccccttgcgggcccctgtgaggaaccccggccagaggcaccaatggccgccactgactttcaccctgtcttgaatcacaggaccaaggaggctgccccgacaagggtcgcttccagactcactccctgtcagccactgccacatgcctgccgtgggcagcattggaggacagggggtactctgtcagtcagcctaacaggctggtccgtccttccttccttcttccctccctccatccctctctcccttcctccctccctcacttccttccttcttccctccctgcctcctccctcctccctcccccttcccttccttccttccttctctgctacctccctccctcctccctcccccctcccttccttccttcctctctggtcaaatgcgggtacatgagagttcccaccatccccatggtaagtgcacagttccgtggcattgggaacctgcacgtggctgtgccactgtcgccaccatgcagctccagcaccttttcatcgcgcgaaactggagctccgtcctgactaatcactcactcccatcggcctctgtcactggccctgctgactgccattctgccatcttcctcttgaatctgactcctctgggggccttccatctgtggggtcacagcattggtcctattgtgactggctggcttcactcggcacgaggctgtgaaggttggtggcgttgctgcaggcgtcagagcacactccttttccaggctccgtaagaccccgatgtgtttgtctaccccatttcagatcccctcacctgctgggttgtttccacctttgggctattgtgactgcacggctgtgagcatgggtgtctgagtccattctgtgtagccataaaagaacctctgtgatggggtaattcatcaagctcacagttctgctggctgagaagttcaatggcatggccctggcttctgctggaggaggtcaaaggggaagcagacacgggaagagagataaagctcagggatgtcttggcttcagaacaagccccactcatgggaacaaatccattcccatgggaactcaccctgtatcacaagaggagaatcactcccagcaccacggactccccagggagtcactcccacgacccacacgtctccctcccctcaggccccacctccctacgctgccacactgggggtcccgtttcaacaagagttttgctgggaacagatgcactgactacatccaggtcgtggcaagggctgtgcaagtatttgagtccctgctttgatttcttttggggatagacctaggaatggaatggcggcttcgcagggtaatttt

SEQ ID NO: 1884354 - DNA, 4001 bp, Homo sapiens
cagggcgggtgggaagtcagagctgcttccttaattggcattttccagttgagagcacattctctacctttttcacttggatcagctaattgccaaatgttttcatttttgagaagaagtaaaattgcagagatttgggatttagggaaggaatgcaaggatcaattttgcctaattacgaaatgtctcggcggtcactgtgacgggtcccagagtcggccgtgtggaccccggggcctcccgggcggtggggggccgggggctctgatgcagatgtttacctgatgtcgtgggcctgaatctggtttacattggaaatcagactgtttacaggccagcacatctgcctcttcctctggctctccttcattctgctgtaatgttctgcaggtctcgctggggtctctgtgggaatatctgtgacacggagtgagccaggccagcccggggcggccccatccggggacagcagctcacggcctggccccgcgtgcgcagccggggcctgggttggcggtggagatggggagggtctgggggcccctgggtgggtggtgggggtaccgtcagcccggctgcagggttccagcggaggacagggagccttctccatccctgaaaaccatcgcggggacagtggactcatcaggatgccgggaccctctagtgtgttctggaagcagaggctgggtgtgggcacgggaacctgtgattgtccccagacaccgagaggcccacaggacccccagtgcccagaccccggctgcagatcggggggtccagtcatgtgtcggggaaggaggaggggagcaggggccacagacagggggtccaggagggcagggggtccaggagggcagaggacccaggacagcaaagggtccgggagggcagaggatccaggaggacagggggtccaggagggcagggggtccaggagggcccaggagggcagggggtccaggaggacagggggtcctggagggcagggggtccaggagggcagggggtccaggagggcagagggtccaggagggcagagggtccaggagggcccaggagggcagggggtccaggaggacagggggtcctggagggcagggggtccaggagggcagggggtccaggagggcagagggtccaggagggcccaggagggcagggggtccaggaggacagggggtcctggagggcagggggtcccggagggcagagggtcctggagggcagggggtcccggagggcagagggtcctggagggcagggggtccaggagggcagggggtccaggagggcagagggtcctggagggcagggggtccaggagggcagggggtccaggagggcccaggagggaagggggtccaggaggacagggggtccaggagggcagagccacagcaggctgggtgctgctgctacagggggcttcaccccagcagccccctgcactgcccctctgacagcctccacctttgaccccccagaacaatgggctgctgtggcggctctggaggctgcggccccagtcatggggcctgcggctgccatgggctgagaccctgctgctcttcgtggagacactgatgtccttaccagatctcccgggcccgccctcagcctccaggctgaccaggcttcctgggcctcctaggacacagccctgggtctcctcctctaggatactggatgggaatctgcggcttccaacatccacctgcccgccttcccctctgccctgtccccttgctgccatggccgcctttgtcctccctggagattcagagagcagccccgttctcagttacctggccttctgggtccttgggaggttctgacctcttcccagcaggggccctgggggctgcgtcctgcctggtccaggccttctcaccctcacctccctctgggctcagggagctggggccacacagcccagagaggctggtctgcccaggacaggccaccctcctcctgctcccaggagtgcctgcagccctgtcagtttccaagagtgtctccttcaagcagcctcgtcaggtcgagccacccccagtgccctctctcctctggcagccgcgctccctgcccttcctccccacctgctcagtcctgcaaagcctcctgcctagctggacacctgggggttctgtatcccacactccaggggcctccttcacatgtcggtgacctctgacactccaggggcctccttcacatgtcggtgacctctgaccgctgtttcagacccacagctcctgggtgcactcagccttgggtcccgatggcaccagagtgttccacgcctggggcagcgcactcattgcagatctggcctgagactcagcagccgggcaccccatgagatctactttctgaatggcgtcgtcacctgactgggcatacaggccacggaccccatggtcatttgggcactgacccctctcacaccccccaaatcccacctgagagcagcccatcaggcaggccccatatattggatgcctctaagtatcagccttgatgtccctctaattccagccctggtgtcttctccctgggacaccctgctgctccctctagctgtgccctccacggtgactccagacatgcggattcagcctcttcgctccaggaccaaactcctcagcagctcccactactcccagcatgccatccagctcctcagcccagcagcaaagacaggcacagaatggctcccgaacccatcgctccggtccggagaaggagccctccaccctccacgctccattcgctgtccccttgcgggcccctgtgaggaaccccagccagaggcaccaatggccgccactgactttcaccctgtcctgaatcacaggaccaaggaggctgccccgacaagggtcgcttccagactcactccctgtcagccactgccacatgcctgccgtgggcagcattggaggacagggggtactctgtcagtcagcctaacaggctggtccgtccttccttccttccttccttcttccctccctcacttccttccttcttccctccctgcctccctcccttccttctctgctccctccctccctcctccctccccctccttccctgcctccctcctccctccttctctgcctccttcctcccccttcccttccttccttccttctctgctccccccctccctctttccctccctccctctttccctcccttcctcctccctcctcctccctccctcccttccttccttctttctttccttccttccttcctgcttctctcccttcctccctccctcacttccttccttccttcttccctccctgcctccctcccttccttctctgctccctccctccccccttccctgcctccctcttccctccttctttgcctcctccctcccccttcccttccttccttccttctctgctacctccctccctcctccctcccccctcccttccttccttcctctctggtcaaatgcgggtacatgagagttcccaccatccccatggtaagtgcacagttccgtggcattgggaacctgcacgtggctgtgccactgtcgccaccatgcagctccagcaccttttcatcgcgcgaaactggagctccgtcctgactaatcactcactcccatcggcctctgtcactggccctgctgactaccattctgccatcttcctcttgaatctgactcctctgggggccttccatctgtggggtcacagcattggtcctattgtgactggctggcttcactcggcacgaggctgtgaaggttggtggcgttgctgcaggcgtcagagcacactccttttccaggctccgtaagaccccgatgtgtttgtctaccccatttcagatcccctcacctgctgggttgtttccacctttgggctattgtgactgcacggctgtgagcatgggtgtctgagtccattctgtgtagccataaaagaacctctgtgatggggtaattcatcaagctcacagttctg

SEQ ID NO: 1884355 - DNA, 4001 bp, Homo sapiens
gaaattggcttgagcccaggaggcagaagttgtagtgagccgaaagcatgtcactgcactccagcctgggcaacagcagagaaaccccgtttcaaaaaacaaactaacaaaaccataaaaagcatgtatttagtgctgcgcattgttttttctttttgcatcaggctctaatatggcttacatggcactgtgggatcctgtttttgtttaagagtttggtattttgttcactgtgaattttttttgcattaatttttatttttaaaaatattgcattaaaatgttatttatttgattattcagttttttggcacctcttcttaaatttgtgccccaagcaagtagctttcttgcctcaccttagttctggccctgacagtttggtagcttcatactttgtcttctgcattaggtcatagctgcaccaagtccaagtgcaataggacagcagaagcaaatgcagtgtacctgaaactcctaccagcttttggatttaaaacaggtggcccatctgaagtagaaaatggagacaaacataaatcaggatcaaatacctttacaagcatttgtctatgtaaaaaggtatggttcccttgtaaacagaaatgattattctgtcttcattcatccattcaacctgaatttaaactttctagttgttgaataacttgctaagccctgaaattagaaagatgagtcagactgagagtttacagtttgacgagagagacacagaacaagtacttgaaatccaattcaataaatgttcttctaagcatatgcataaacaatttggaagcacagagatgtaggcagagttttttgttgctgttgttctgttttgttggctgggtggcaggggttataactattaagcaaaaccataaatagaaggcattaatggtatgaagaatggaggaaatggatttttttggggcggggcatatcacttccactcttccaaataattgagagaaactttctccaggatatggaaatgtttggagaacttagtgactgatgcatgtataagcttggaaaattaacatttattgagtatctggccaggcactttacataaagcgttatcgccatccttagttcaccagaggaggggtggttttagagatgagggacagtctcagagaacttaggcgtaactacgccagcatttcactagtagtgaaataaatgacgggcgtgtgaagtccaggtctgtctggattccccaaagccccttacaccatactacctttggaaaagcaatggaaaagaagaaatcaggcaagtgatgtatggacccattatacttcccccactctcattttaatatcaccttggcaaagctgaagagcagacatcttcgtgcctccatcagttatgccctctgggagtctcagttcatcccttcacacgcgggatacttaactctgcgggatctaaaccctggccaaaataaattttaaagctggaaaaaatccacactgtaccctttgcattgccctaataggctgaaaatagccatgataaccaaattaagggacagcggctgagactcagactcactccttgtacacattttacttaggaaggcggggaggggcgtgaagttaagccctcaacaattatttccttaatttgggagaagggccttcagctggcgtccctggctgattctcagctctgctcttgctgagtggacaagtctcggagcggccctgctgtgtgcgggggacaagcggggtggggaaggctgagcggggaaaacgaggggttctcgggttggaaaacaaagagaaggaatggatttggggaccaagggcgtggaggagtgtcagattttgagcgaggcttcctgcatactgagtgtaaaatttcgcaggaggagttgggcagaccgaggcagatttggcaacaaaagggtcccgggctgggcaagtttacgaaccgggatgcgagaacagagctggagagatttgacgcggagcgcgaagaaagcgggctgaactcgcactgcgccgctggctcccggctagcgggcggggtctccagggagccgcacctcagcccaccctgagggcggggctggcccggcggttacataacaaacctgtgagagcggctgggggcggttcgggcgctggtgggggcggggcaggggcggggccagggcggggccagacctgcaccgggccaggcaagatggcggccatggagaccgagacggcgccgctgaccctagagtcgctgcccaccgatcccctgctcctcatcttatcctttttggactatcgggatctaatcaagtaatgggacgacacgcatggcaggggtgggggcatggggagaggaggcggtgaggcagggggaaagggggtcggggccgctgacaggacccgagcttccgcgacaccagaaggtgacgccagggccgccctcatcctgcggagccaccggggaccggggcgagacgggggcggaaagggcctcgccctgagtcttcctcctgtcctgggcccaggtatgagaagcgacgagatatctctctcccaggcctcggtgaggcccacttgcaagagaaggaggtagtggccctcgtgccgcaccgccgcgctccgcggacccccgctggccccgcaggtgcccgcccggttggggtcagtccctgctgctgtgtaaaagcccctgtcccggccaggcgctcttctctgctgggtccggggcctgcggagtctggcgccggggtgggcaggtgggtgagcgagaggagaagataggcaaccccttactcccctggcgcgacttccccagcgccagaatcgctgtccgggctcactttcggacttcagtgcgtgagaattgttttgctgtcagcattgctccttacggttcgatgttggattttatgttttggtactgacttccggtgatgccataccggtgactatcttttctcctggacaccttgggtttcccacattactagcatctgttccagaaataaacaccggttgctgataagggtggttcaatgcccagtttcttcagaacttgggactgtctggggtggtggaagaaatggcgctgccagcccgccccccagctgtcaggattgtttacacccttgacagggggtggcatggctgtgagtttcctgtgctaccgtatatatttgcagaggatgcaaagtcgccctcttaggataggtgggcgagatttgttttgtgtttggattaaccattagattctagccatttgatgattgtgccctgtgttattagaggtctttttataaatacagatttcttggagctacagatagttgttggcctagctaagtggtgatagagagatacctcaagtttttggtcactacctgtactggtcgctacctgtacctgctagcaattttatttttctagaaaatacttacaatttaactaacagtctccaacttttgattgctgccagagtaatctttccaagacacatctggttgtcattctccttaaaacctgtgacacccctatgtttatagactataacctaaacttctggggcattgaaagctcttatcatctggcttgtatatctaaggtcctccaggacttatttctccaccactatcacatttgcaccatccattctaaccaaatcagacctctgccagcatacaacacacttgcactttctttttttttttttttcctgtggctcaagctctcgaccttgcctggaatgccttgcctacctcttctcaacttggcaaggtggagaagatgccctctctaccttcttcctgcagaattgatttgccatgtcaggtagatggcgtgcttcttgattgtaagggctgccttgcttatcttcctattcaaagatttttttttccccgagggcttgctatgtgccagtctgttaagtgttgagggtacagtagtgaacaacgcagataaggcaactcttatggagcttacagtccagtgggcaagcgcataatt

SEQ ID NO: 1884356 - DNA, 4001 bp, Homo sapiens; identical to SEQ ID NO: 914691

SEQ ID NO: 1884357 - DNA, 4001 bp, Homo sapiens
caaggttggtcattcaggcacagatgccccctgtatgctgaactgaaacttatctcaggccccatcaccccctttgcctgcatcccctgatactgttggaagccaactctgtcttctatggaggatattgacagtgaattccagcttggtaggacaggggaggaaggagcgtgttggtaaggtctggatctggctacactctcgctgttagtctgggcagagtctaaattgagcagtgggagtgtagccagatcaaaccaggtcaagtccctagaccttgactggaggccgcctcactttcagcagtggtagccggcttgtgtcgctggcgagaaatgcaaacgtttgtgaatttcaaatatgtatatatatatatttgtgctccaaaggcagcacacccgcatatgattctccagacaccgggaggcactcgtctcccctctcacctttgcaatccccaggtgaagaggcagcacctcttggcgtgattctcaagggggtttgtgtttattcagcaatttttggtcttgctcggggatgttctcacttcctatttaaaaatttaaaaaaaaagattctgaaagacttaaacagtgaaaacatttaggccaaaccagagctactgaaacacacacacacacacacacacacacacacacacacacacatatatatatatatataatgtgtatatatatatataatgtatatatatatataaaatgtatatatatatatatatatatatatataatgtgtatatatatatatgcaggaacagaaagccaaataccacatgttctcagttataagagacagctaagcattgagtacacatggacacaaagaggggaacaataaagggtggggcccccttgagggtggaggacgggaggagggtgaggatcaaaaaactacctatcaagtactatgcttattacctggatgatgaaataatctgtaccccaagcccctgcgacatgcaatttacccatgtaaatatatatatacctatatatacatatgtgtatttggaagaaaataccaacctgcttttcattcaccaggtggccgcacacaatgcatggttgggccttccccttaataaacatacctggataaagaaaatctggtgcatatacaccatggaatactatgcagccatgaaaaggaatgagattatgtcctttgcagggacatggatggagctggaagccattatcctcagcaaactaacacaagaacagaaaaccaagcactgcatgttctcacttatcagtgagagctgaacaatgagaacacatggacacaaggaggggagtaacacacactggtgcctgtcagggggtggggtgggggaacggagagcatcaggataaatagctaatgcacgtggggcttaataacaaggtgatgggttgataggtgcaacacatcaccgtggcatacgtttacctatgtgacaaacctgcacgtcctgcacatgtacccaggaacttaaaattaaaatttaaattaaaaaaacacacacacacagccttggtttaaatgtggccttgctggtctgtgtcagacatgttacagaaacccatccctctcctaagagttctgccaggacccctggctccaggactttgcagcctgcttttgagcacatgcccacagaaattactgaattccagtaacatcaagaatcttttctggccagaataaagtctggcacatagtaggtatgcaacagttttgggatgaatgaatggaaaatcaaatcccttttagaatggaacaagatcacagaactaattcggttccattttcacctacaaggaaagcttttttagtagccggaggaagaggtaaaaagtagcatcaagagaacatgtaaaaccactaactttcactcaggagaaacttaaaactcccagagcaacccctatatgattctccagacacagggaggcactggcctcctctctcacctttgcaatccccaggtgaagagatagcacctgtcggcgtgattctcaagggggtttgtgtttattcagcaattgttggtcttgctcggggatgttctcacttcctatttaaaaattaaaaaaaaaaaagattctgaaagacttaaacagtgaaaacatctaggccaaaccagagctactgaaacaaagaactctttgaaaatcacctataatgcaacccacccacaacccttctgctcttttcattagagaatgaatcattccctataactgaataatccggttaacaaaaactaagtagagcaggatgtttttaaatgcaccaagatctctaaagggcattacaaaactgcctgccttcctgagcagggatgctgggtgtcaggtggcctcttctgggtagctcaggccaccatcatgcgcaataatggcaatgtgctgtaacacagccgtgatcttaggggccccgccctgtgtgggcatcagtccctggcagcagcagccccagaatattacctttttgcttttatgctcgtgtttctactttatctatcaccatccttatggttgttttggagtgtgtgaccttccagcgatctgtcctaccaaggacaacagcggccctaagacttttgccgggatggccaagaaactgggaggctgaagagagctcgaagtatggagcatccctgccctcagctgtgagcaggggaggcgtgggaggtatcctggggatactggagaggtagccacatgtgtggagcaggcagaaggagggtccaggtcgtctggctgggacaaggcaagggcagaggaaggtgcagctcacttacatgggcgggacatttacctgggctgaaacgacagcaataggcagctgtagaaggacacggggcagctcagcgtggagacgccgcacatttcaacctgacagttgaggctgtgcaaacagaaggtagtcaggactgctgaagcctgactgagaggcatgatggcactgtctctgccagtcggcaagtgaacgcagagggcctccgtggagtcgttcacgtgaaaacaaatctcagatggaatcttgctgtgttgcccaggccgtacacaaactcctggcctcaagcgattctcctgcctcagcctccccagtagctgggactatgggtgcccgccaccacaccctgctggagtagtggactttaacatcctcacttccatatgtcagggaccagttcctaatgccacctccgtgaacatcacgtgatggccaaccagatgttgactgtcatcactgggactcaactgggaaaccctctttttcctccaaatttgctgctctaggtgctaagggtctgtaggacagagctttgggactgttagaattctatcagaaaaaaacgagacagaaggctataagcatgagtgtgggcagggtgctgtggttcacttctgtaatcccagcactttgggaggccaaggtaggagaatcccttgaagccaggaattcaagaccaccctgggcaatatagcaaaaccatgattctacaaaaaattaaaaagttatctgagtgtggtggcacacacctgtagtccaagctactcaggaggctgaggcgggaggatcccttgagcccaggagtttgaggccaaggctacagtgagccatgatcacaccactgcactccagcctaagcaatggagcaagatcctgcctcgtaaaggaaggaaagagtggccgggtgccatggctcatgcctataatcccagcactttcggaggatgaggcgggcagagtacctgaggtcaggagttcgagaccagcctggccaacatggtgaaactccatctctactaaaaaatacaaaaaaaaaaaaaaatagccgggtgtggtgacatgcacctgtagtcccagctactcgggaggctgaggcaggagaatcatctgaacctgggaggtggaggttgcagtgagccaagatcgtgccattgcattccagcctgggtgacagagaaagactccatctcaaa

SEQ ID NO: 1884358 - DNA, 4001 bp, Homo sapiens; identical to SEQ ID NO: 914715

SEQ ID NO: 1884359 - DNA, 4001 bp, Homo sapiens; identical to SEQ ID NO: 914717

SEQ ID NO: 1884360 - DNA, 4001 bp, Homo sapiens
tattcaactgcactgtcatccccacttgggtcttccaggccttggaccaagaggccctggcacaccccaagtcacggcaccctctgaagcatgtcaccgctaagcggtgccatgcttatcctggatatccatcaccaccaccaaacctacatttatatcctatccataatcaagttctgcgggctccggcttccaagtaactcctcaatctgtcccctttcttcctctgccaccatcatcctaggccaagccactatcatctctcaactggacaaatgcaaaagcatcctaactgttcccactgattccccgcttccatcctaccccctgctgtgaacatgtttacaatatagctagaaatatcttttcaaaacacaaatttaatcacaaaccctcttgcttaaaaccctccaatgagttttccattactctaagaaccaaagtccaaagacttaaacacagcctgtaagatactgcacaatctggcttctgttcatcttatcctcccctacactccaggccctttagttccttgatggcaccttatttcctcccaccacagggaacctacatatgctctctgcttttaaactgtgtccacttccttgcctagttaattccttgcttgggaaagcctttcctgacccccagaccaggtcaaactctacatgatctcttggacacaactgcagtttgtattgttacatactctaaaatccatgaggggggaggctgtgtttaccttcaccactgaatctccagcctatcgcaacacccggcatattctaagtgctcagtaagtatcttaaataaatgaatccttttgccatttcatacctcactcaaactcttctcagcagcactggaatctttctttggtctggccttagcttacctgtccacactacatttcatgctactactcacaccgtctatctagatggcttttgccagttccttgcataagaacaatatttttctcctagtctgcactcagttatttagagactggaacacacacctttcttaagccagtaaacatcctccaaggctgatctcagttcccacctgctccatgtacttctaccgttatactagctagcagtgcaaagcattaagttgagttctagctaatctttttttttttttttttttttttgagacggagtttcgctaagtcgcccaggctggagtgcaatggcatgatctcggctcattgcaaccttcgccttccgggttcaagcgattctcctgcctcagcctcccgagtacctgggattacaggagcccaccaccacacctagctaatttttgtatttttagtagagacggtgtttcaccatgttggtcaggttgctctcgaactcttgagctcaggtgatccacccgcctcgacctcccaaagtgctaggattacaggccccgcgcccggcctctatccagtcttgaactggcctactgtctattgaaattttccctctctaggtacactctagccattttccagaacattcactgaatcccgtcttctcttcactcctttaccgcaacagcactaagtacagcatcctgaacacgggcaggacttaatgcacatctgtgccaccgattatcaatcagtctgactgtaagcttaaatggagaatgatgtgagacctgccacctgaaaagggccgccttgggagccatacacctgcacagcccctacaagctctggtaggtaagctaacccccttccccaagccgacccactgtcctgccagtgtgggccatggtttcgggtcctgaaggacacacagtcggaggttggggacaacccagaaccacaataccctctgtcgtcctcaactttacccagagaaaagcctcctctgcgcgtgcctggcctccgggtcaagaggccccggcccatgccgtgcggcagaaccctccgaatcataacccctctgagcccggaccctctgaaagctgcactgctgcctcgctattatcgcagccgtcactgctccgcgccaaacgccattcagacgagcgcgccaattggccagcggccctcagggctctgccccgcccaatgctctaggtggccgtctccccgtgacctctcctggagccccacccaggcccgctcccacccgccattggctggccttgcgatacgtcagtcctgcgcgcccccgggcggagatggggagggcacccggcgttctgagcggaagtacggttgagccgatttccggggccactggtgtgacgtgtcccgcgcttggcgcagcaggaagcggcggcgaacgcggcctgaattcccggcgccggccccagctcctctgccgctgccgccatgctcgacttcttcaccattttctccaagggcgggcttgtgctctggtgcttccagggcgttagcgactcatgcaccggacccgttaacgcgttgattcgttccgtgctgctgcaggtaccgtccccgtgggatcagaactccaggctcttctttcctgacccgatccatggtccccttcgactctattccgcgcctcctcccaccctccccgcccacctcacactgaccactcacgcgtaacccggactccgcttcgttttctcgtccccttcagactaccccgcaacttaatgacggcccccgcctctggtgtctcaactctagccgaattccggcgcctttgggattctcctccgctccctctatttatccccagcagcttggttttgttgtttcgagcctaggtgaaataacagatgggaaaacacctttacaaaactaaatggtgtatagctgctagtaatctgattgtttacatgactacttcccttttggctcccatgtgtcttgctctctctctcatctttttcccccaacttggttatcttatttctggtggaatgccagagagaagtgccccaacatcctcttgtcctggggacagatttgagtttgggggaaatgtttggctctttcccaaaggttatccaaacccagggcccaaacctgggttttctggggatagtctgaacactgagacatactctttctccaggaacggggaggtaacaactccttcacccatgaggcactcacactcaagtataaactggacaaccagtttgagctggtgtttgtggtaagtggggtgttgtagagggacgattgcattgttaacatagccctgatttttaagagaactctgattaattgcagccagtgtatatgatgacgtaactgaaaaaactagaaaggtagatgggggaaaacagcagctactgggcccaggcagggagcttggctgcctctcaggacagggaaaccggccaggtagctgaacctatctctgaaagccagggttgagttggcgtccctccattctaggctagtatgtaagcagatctgttggctgtttcttcccctaaacaggttggttttcagaagatcctgacactgacatatgtagacaaattgatagatgacgtgcatcggctgtttcgggacaagtaccgcacagagatccaacagcaaagtgctttaagtttattaaatggcacttttgatttccaaaatgacttcctgcggctccttcggtgagagacctgccttctctaaaatcaatttatttccatgatttgatgacctctctgaaggtggttcaaaggtggtaaattgatgtgttcaaagacattcctaatttgctacccagttctcattgtcctcttgggtgtgagagtcctttctctggaccgttatttttccttctgcatggggtagaaagataaaccattctcctttttgtttagtgaagcagaggagagcagtaagatccgtgctcccactaccatgaagaaatttgaagattctgaaaaggccaagaaacctgtgaggtccatgattgagacacggggggaaaagcccaaggaaaaagcaaagaatagcaaaaaaaagggggccaagaaggaaggcaagtttgagttctttggatatactggga

SEQ ID NO: 1884361 - DNA, 4001 bp, Homo sapiens; identical to SEQ ID NO: 914757

SEQ ID NO: 1884362 - DNA, 4001 bp, Homo sapiens
aaatattacaccgaggcttttaaaatgtaagtgaaatctagctaagtttcatggtttcattaaaagcaaatgtctgcctctatctgaaaaacaaatggaaatcttttgaggtgttaataccctttggatcctcatcaaaaggatggcattcacctgaggattcctatcttgacttcttaggtattaaaaacctttcttgatatgctctacattttaaaatttgttttataaaatccttatgttgattttcattttattctcaagtacaatacgtttcactctagaccagttgaagaacatgtttaaactttgttcatggtcaaattcattttctatttttttagtaacatatctcttaaaaagcacactaccttataaaaaacttcatcagaaattaaatttaatgcaagtaaattgccatctgatacttccacatgctatcataatcaactgtaataataaaaatgatttatccaattagaaaaggacaagatatatttttctctgtatttctataacttttgccactccattgaatacattgtatgttggacataagattattagtaatgcattcttgagatcttttattttggaatgatgctaactctgtctctttgccaattctaataccaggttccaagtaataactctacagtacaaagagaactgaatattcattctagggctataggatatgaacttcacaattcatttgggtacattctcattgaatttccttcaaaacaatctgttcctggtgcccagtgataattcagtcgggaccagcatgactaaaaggaaggggatatgctaaggctcagcaaagtgaccctaaatgagagatatgtcccaggatggaaagaagaagacgtggtttaaccaagttatactgactaatctaagcagtccactcatccttccattttgggaaaggagtgggggcagcctaagaagaacatatctggattgggaagaaccgtctttctgggctagggatggggaacagaaagggagtatggaaagaaaaattataagagatttgactgaagcaaggaaaaaaagcaaatccccaaacgtgctaatccttgaaagtaactatctttcccaaactactgctgttaccagcaagtgatcaggaagactaggagctatttctgactgtaaatgaattgtataatagctctgctgcagttctgtgacttccaagccaggaattaaatgctctttttaagaataacaaaaaacaaaagcatttcctatgctagtctcccagtaaaatgtacatgttttggagacttcaaaggtattatgtgagttcacatttagcaacagcttattaataaccctcaagctgtcagaatctctatagttaccatttacaattttatactgtgaaaaaatacagatcagtgaaagcataaagacaagtcagaattcactttgaagagggtctgaggcctgggagagtctctactgtctattgaagaatgaggcatgtataaaatagttggttgaatttcactgatcttcccaatgtgaacaaatatactatgtatattgtgtgtatttctagaaatcaatggcagctgctgatggtgttgtaattagaaatctatatagattatagatgttttagaaagatggtgccaatcctaaaagatttgtgtgggctaaaagtgcttgtacttacttttttctgcacttataactgatttggttttaaaattgtgtgcgtgtatctgttctttctctgttgtggcagcttgtactattaaaataatagagaatgttaaattattttgatgtgaactgcaaatgattttttttcataaagtttaacatttttatcagcattgttttgctttgtacttgtataaatatgttttattttagcacttcaaaatatacttgcctgtttctcagttgtctaaatcatgttgtacttggtgtttgtgaagccagttacttttcaaaaaaattaaaaaacctataatatgattttaagattattcccctcaaatgtttagaatgttgtcttaatagtgttttctgagatgaaaagagccatgatactaattaatcttgaatactggatgatctatacatttgaattatggggtttacaaagtaagcagtggactgtatagatttaaatgaaaatataaaccaaccacaaaccaaccagagatgttgtccccaaacacatctacaaacaactgttacataaagaagtacttaaaaaaatatataggaaatatgcattgtttatgcatctagacatacaaattatagaaatagtttcataattatatgtgttgatagaggtaacatcacacagataaaatagattatttgtgtgtgtatagatgtgtgtttacaaacatacatatttatatagacatttgacttttgagtccatctgcatgtgtctctgtgtatatgtgtgtttgtgtgtagatgtatgtgcatattacataatttttccagaaaaaaaaaaagttttactttgactgattcttgagcaaatatacattccctggacacaaattagtgaaaaactaacagcagaatataaggtagatgcttgatgtatggaagagaaaaacaaggtatatttaaaaatatatttgatttatgcttctgacattgtattaaatgcataatgatatatatacatatgtagatacatatattatacagaatgtgtttgatcttaacaaagaaagccattttatctgttttgtcagactcttcccttcagtatcttttattctaacgtgatatgaatggtaatatgttcacataaaattgaggatgaagtgacatatacaaaccaggtacaggaaattaccttctaaaaatccaaagagccttatcagactccatcaaattatggaaggccatttaaaaccagcggatgcaatagaaatagcattgaattaaaagccaggatctcttacctgtcaccaactgactttggataaatcactctgatttctctacaacttgttcctcttgctttaaatgcagaagtgagttacaataatctgtgaagtttctatcatttcaacattcctgataaatgctcaatagtagctattattagtgtcaatgtagtatttagtatacagttaatattcagcaggaagcttaaatttgttatatcaatgttatttgtggagcttaacaagttcctgtccaacttaaagcatatatcctggaggaaacctattgaggtttgaactcatatgcaaccttggaactgtctatcaaggacaacttagtaaattgatattgaacaccacagagagaatgcttttcctctgttataattgctgctgaatgctggccaagtttttggttatgctgtacatgaatgatcagttttagaacataaacaatttgcaaatatttactttgtatgatagctaggcagaaaggtaggtaagcacatagataggcagaattatattaatgaagttatctccttaagcaaaagcttggtatttacattttctctcacagtattttaaaactcagaatcagttattacatctcactctgtttattacttttaggttattatgttagtaaataagttctatgaagagaatgtttaaactcatcttctccagccactcttagaatcctgaaccaaaagtttccaggaacacttaacctccactagaataaatgttttaaattactgttacaccaggacaaagacatttatttttgccaggacataagtctctttgaggtatgatctatatacaggatacctatgtgatatacatatcagacactttggcttatttatgtatagcttgtatttttattcattgacattaaaaataaaaattttcatactatcagatttctatgatgagatagatgttatattttaaattatacaaattctatgtccgtgaaaaccacataataaattgtggcttttctgaactgctgaatagtaataggtgattcataaaagttct

SEQ ID NO: 1884363 - DNA, 4001 bp, Homo sapiens
ggcccaggcacacggctcagcagggtggtcatctccaagccccccagcaccgccgagtgcatccacagcaccacaactggggccagaggtggcagggtcacctttgcaggcccagttccactgtggcctgccctgaagcccacagttctctagccctggagagctgctcggaactcccgggcacccgctctgctgccaccccacccccatccccactggcctagcaaaggtagaatttccctttaatctgccccccataacaataacagccaaggccaccaaatctgagtttgatctgatgaaaaacatccctttaatggaggatagatttgtattaatatggccctcccggcctgtctgcccaatcattttgaccaacgtcctgccctacccaactccactggccctgacaattgtgaatatgtattgatagttttcttctttctttctttttccgatacagggtcttgctctgttgcccaggctggagtgcagtggtgcaatcatggctcactgcagactcacattcctgggttcaagcaatcctcccacttcggcctctgagagagctgggattacaggtgtgagccacacacttggctgtcgacagctttctctgtgttgtcctaaagaactttctcaaacattttgtcattcaatgttgcaacagcactaagaagcatgttgaccattatctctatttttttagaggagcagttggggagctgctcaggactcataaccaccacagtggtacagctagaatttgaacccaggcaggttggctcccagcttataatccttttttttcttttttaaagaattttttttaaattgagatacatataaaattcattcttttaaaaaatgtacaataaagtggttttagtatattcaccaagttatgtaaccatcaccaccattgaattatagaacgcttttatcaccccagaaataaacccattagcagttgctccccattcctccctccctcaactccagtcaaccatgaatctgctttttgtctctatggatttgcctattctggacatgtcatacaaatgcacataatacatggtactttgtgtgtggcttctttttttttttcttcttctttttttttgacagggtctcactctgtcacccaggctggagtgcagtgacatgaactcagctcactgcaaactccaccctctgggttcaagagattctcctgcctcagcctcctgagtagctgggattacaggcacccgccagcacacctggctaatttttgtattctggttaatttttgtatttttagtagagatggggttttaccacgttggtcaggttagtctcgaactcctgacctcgtgatccacccacccaccccgcccccactccggtcctctcaaaatgctgggattacaggggtgagccaccgtgcctggcctgtgtctggcttctttgacttagagtaatgctttccaggttcgtccttattgcagcatacgtcagtacttcattccttttcgtggctgcataatactcactgtatgatagaccgcattttgcttatcatcatcggcttgtaatcttaaccttggccctgggtggcatccttaaggtctaagtagacacagatacatgcatctctaccttagtaagagaagtagccctgaataataaagctgccaatttcacccccaggccccaggacagaagggagcccttgccaaggtcggggtccacacttgatttcctttgcatcttttccgtcttccccacttgggtcctgaccagcacggcaatcgcagccacaaaagggccaccacttgtttgggatgtggcctgggttctcactgcactccctttttgcagaaaactcaggaaggctgagggtctccttgctggagcctgaagacccctcatcacatggacttcagggcctgcagccctggcttccgctgagcctctggggacccgtactgtgggggccacaagcccaccccctccatgtcttagatagtgcgggaggtcctcaaagagaggcccacgaggactgagtggaaacagaagctgggcctgtgtcccatttgctctgctgggccgacttcccaaacgccctttctcttgagggttggaagcgctgttctgtatttggccacgcgggggagctgctccgcacagctcaggactaagccacctcacgggaaacgccagcgcgggctgcaagctgtgccgctgtgtgaaggcacggtcctgagcctgctatctgcagtggatcagcttcatgccattagtgaagaaaccatagcacagagaggattagtgacttgcctgaggtcacatgggtgcgggatggggtggagggggcggcagtgggactccctgcagtctgactccagagagtgtgcccctcacccctctgcctcctggctcctgagagccagcactgtggctggagctcagtcccccgcagcacgggtggagaaggagtctgagggtctccccacccactgctgccaggctctggccatgcagagccaaactgttgacgttctcccggtcctgctggcatgctacctccacgcctttgcacaagctggagtgccctctgcctggaatgcctttccccgtcagctccactccaaaatcaatttctcatcatcaggccctgtccaatgtcaccccttctgtgaagccctccacatctccaagcagatcagcagctccagcctctgggctcccctgtgccctgcatacacacctgtctcccaccagactcaggctgctcacggctggggcccagccagatcctgcctgtgtccccagagtacagccaaggtcaggcagactgtgccctgcagtaagaaatacattttaccttggtagactcacgagactgactgtatagaacttgagtaccctaaaggacatctctcagaaccacttacccttgctacctgcaatgcggtctcatagttactactgttattcctatctattttagtttattctgctcaattctgttcttctctttttctattccactctctttttttctttttttccttgagacggagtttcgctcttgttgcccaggctggagtgcaatggcgcgatctcagcttaccacaatctccacctcccgggtaagcaattctcttgcctcagcctcctgagtagctgggactagaggcacacacagccacgcccagaggccctgacaaggactttttacccccttttacagaggaggaaactgtggctctgggtgggacagtgacttgtccaaggtctcatcaaatgttaggactgaacttggaccagagcttggcttcctgcctcctagccaaaggcaaaaatcacctctttttactgacacctggaacatcagagctgaaggatccttggagatataaacctctaaatcaattcctctgtgtacagataaggagacaggcacagaaaggagcatgggtagccctcagtcccacaaagctgcagcaggctcccctggcctgaggtcttgctggccatgctcagtatccggagaactctgcagtggatggccagcaggggctcacagagggctgaagatcttagcaggccagcactgggccaaggcaggagctgcttttaatcccagttctgccactgatttatgggacagagtctacaacccgttctgtgcctcagttttcccagctgtacagggagagcttggcttagacatttaggtttccaaagatcattcaggtctgatgttctacatgtttacaaaaatccagagacaggtggtttttgtcccttaggctggccacatctcctctcccaacccttctcccaagagtgtgtgagcctctagtgcctccacctctgggcacaatagactaatgtgccaccctcctggggagagaccatttgtatttttagactcagggagatgggccccaaggattagccacagactgcttgactcatagagccaagctcctcgaattagtcaactccac

SEQ ID NO: 1884364 - DNA, 4001 bp, Homo sapiens
gactttctttgagcttcctccactgtttctggggactcagatttgacctttacttccatgaggttattctgggtttcttttaagatctcaattaattgagaaaattgggaaatattcacctgctcctgctctgaatctgactggaagatccactgcatgatgaagtgagcctgaggaaagtttgtcactctgtagatgtgaggatccagaaggctgcgcaaatgagatttaatacatttagttttataaatggaagactttttgcaaaagttgatggtgtttactagaaaattctgcagactctaatctgtgagacatatattaatccaagtgtcataactttttagtttttgactcaacattttcatgaaatttatcagttttttaagttgctcttcaggatcagatacctcccaagattttacatcctctagaaaaaccctggcctccttcccagcactcagtaactcttccccattctggatctgggcagtgatgctagtcagagcagtgtagctgtctttcaggaagttagccacctgaagaggatccttaaaattgcttctgtggctagagaggataatgtcccaaactggcaccaactgaagcccgcggtcaatgacacaccaggtttgattgctggcaatgaggccagctttccactggacaaggccatctgcttctggtgggccacctgtttgggccacagataattggaccttggtttggaggttttgggaagttttggtctgagtggctgtcttcgaatgagagtctgaaacattcacacctgcagcaactttcactccaaagccactgtagctgtcccttatgaaaatgtccagggcctctgcagactgctgcctcacttctgccaactgctccgtgcaataaccctctgaaatggctttccaccagtagattcctcccaggtgcagagggccttggttaacatgagagccaaacctgtggaagaagtttatgatcctgtgcctcagcaaggagaacctgtctgggtttgttgtctgactcagaagctcttcaatgcatttcaattcctggacagcaggcttggataactggagctgatcaatgggaaagtggcaggaggccagggggatatagctgaacttggttgagcagaaataagaattctcagaacttgattgttgggtttccttggattctggatgtttgctgtgatccaaaccagcttctagactaaacccccaatttccgtccttggctgaagtagttaaacgaaagcccagcttctctaccatctgggtaaacatgaattcagcctgaggagatgtgaattcctttgttttcatttgtgttccttgctgaggacccaaaagtaagaactctttggggacactgagcaactcctctctcttctctgtcaggcccctttggtggctggctttgtaaattccctggagggccagccctccagatgcccatctcaccacatctctatctggaaggttttgcctgtggcacagtgtccacttcatgaggttgagttgtctctgcaggttttccatgagttcccttagaggctcttcaggggatggccagtactcttcagggatgtccattgcttgcctcagctctgcttctcttgtcctcactgcctcttcctgtctctgcttcccttctgtcagcaagtccctcagctcctgcagtgcctgttctgcctgcttctgctttctctttgccctctccacctgagactcctgtaacgctgaaagactttttgagtgtgacagattaagcagctttctcccatggatgttgtgtctgggatttcagcttcttgaggttgtttttgtctaggtgttgtaaggcctgggcacaggtcacacccaggtgttcctgcagcttgggtaaccagtactcaacatccaggcccacttctctcagcatctcttggaggtcttgcctccttttgcctctgagcagagggtcatcaggggtgtgctctcctgtggccatggctgcataaaaaacagacactcagttagctgactgttctgaccttaggaagtgtcagccacatggccaaaagtgtaagtatactagtatgcaagtctacaaggctttctcattcctcatttaattgttttaacaaaaattttttaacacccttttttgtgtgcaagccatcattgtggatattttcaatgtggattgcctttgtggtttgcagggtgggttgcaacttactagacttattttgacaattccttttacatagaatcaattgcatgtaaaacattaagatgagagacggagtttgaaaatatgcttgagtttgagtttggtagcttgattttttttttttttttttaaagagtgatggaaccaacagattatctagtttctgtgaaatctgtgttgcctggtttccttcctgtctctgtgtcacttcttcctagggcatttcatgatatttatttgctttcctgcccttttaaatgtgctactaacctggtttatgcttgtcactcccttcttactcttaattttccctagttaatatcatctttctgttacattaatagctgtctctctgttgatgccaccttcatctgtgtctgtagactcaaatgctcccctgtatttaatgttttattaatgttatgtttttcccctcactaccttcagtatatatccttgaccagcagatgagatgagattttacatgtttcaatttcatacgttattcaatttcccttcctcctgtaattcttgtcctgctgaatggcaccaccttacttccaggccaatgggcgtcttgttcatccttcttcttaacatgaatttagtacataatatcttttccatttgtcctcttaaacctctatttaatttcacttctttttgacactctatccgttctcccttagatgttgccttcatcatgtctatcggattgctataatagtcattctatcttctatggtttgaaggtttgtcctctccaaagcttatgttgaaatttaattgccatcttaatagtattaagaggcaggagagatgattagtattgagaggtgattaggccatgagggctatgccatcatgggtggggttaatgctgttatgaaaggttgaattttgtccccttttgcctcttgtgcttctgccatgtgatgacaaagcaagaaggtccttgcaagatgctgacaccttgaccttggacttcccagcctccagagctttgagccataaatttgtttattgttagttaccatgtctcaagtgctctgctatagcaacacaaaacagagtaaaacaccatcttgcagtcatttttgtcttgcgcatttcttcttcctcaatgtctctacaatttaaatctgcatgttaattaatggtaaactcagcagctcaaaccaatctttccaatgaaagccatttgaaataagtagagaaatgtataagacaattttttaaagccttaagtaatttacctggtaaaaatatctgacagaagaggtaaataatctgaagcaataatgaatgaaaaaattccattataaattaaagacaaagtttaagacctttgcaaacactaagtaaaaaaattaaagtaaaataaaataactttacaatcagatgcatcagaataaaactgcagaaacaacaagaacaacaacaaaacaacaaatacatgtagaaagtacaaatacaagtagaaaaagagtttacctttaaaaacctaacagagagctgatttctgaacagctatagtggaagccaaaagagagtagaatggagtatttatttcactgaaagaaaatatcagacacaaattttatgtatagtgagatattcttaaagaatgatcgtggaaaagggacatttacaacaaaaattaaagacttacagttgcaagattatggcataggggcaagctggctttactgtccccactcagaaaaccaaaaacaaatatatagcactgaaatttttaccatcaataacccaga

SEQ ID NO: 1884365 - DNA, 4001 bp, Homo sapiens
cgggggcctggaggcttccggaaggagcgctggtgctcaccttccagagccgattcctgagtcaggtagtgcagtggttgtaaagtgcagcatattcatttccaagctagagggttttgtgtccggattcaaaggcccaggcttgagctgggtagcaccatttctgtggatggggaaggagtgaggtcccactcagctcctctcgcgtgccccccaccccaagtgtggcaggaagcccctcacctttcatgttgtgggttctgggagcccagagggcagccatagtgtgccgactccgtggaggaagtaaagaaacagacccgcttcttgccgcagccccaccagcctaaggtgttctgtagaagacagaggtcggggcagtgagatggtggcccggcggggcggtctgggcagggccgcgtcctgacgcagggagggcagacacgctcaccaggaaggccggacgcgcctcctctgtcctcgccgtcacaccggaccatgtcatgtcctgcttgtcacgtccaccggacctggcgtcttggccttcggcagctggtgggcacgtccaccccagctggagacctggctgtggggagaacgagagagtcgtgtggggagaacgtgttggttgtgtggggaggggcgggtgggggctgagggtggcagagggggaaaaactcaccctcgtctccagcccgaacgctgaggcaccgatcccggctccgtcgccgcccgcgaggcccgccttggccacgggctctggaggccagtgcctcccgctcgccgcccgctgcgctcctcacccctgcctgcaccatcctccctcctgagagctcattcactccgccccgcccgcctcgcctagtctggtctcgccccatgcccttgactcccctggatgctgtactgtctgccaagccagccccaggggctgagcggtgagggcatacagcgtcaccaagtccactgtgggccctctccgcaccagaccctgggccgcagtgcctcgtgggaccggcgcccgcaggccgagcccctgcagcctccttgctgcgcaatgtcccggggcccccctcccgtggccgcttcgccctcctggtgacgtcctgctgcaactccccgagcactgcctgtcttcccgctctccagccctcgaggctccggcataggcctgagaaagccgtgccggagctgcccctgtgcctgctactaaatgaattgcggtgggtgaggtggcagctggggacccctctgtcctgtgtcccctgccatgtccctgtctgacccaggcctggggtaccaccccacgtgctggaccctacgctggccacccctgtgctccctccctgccctcttgctctttctgcctggaacgggcccataaccccccagccttgcgcagtctcggctccccccgagaagatgtcacctttgctaactctcctgcccccatcctgcccctctgctgggagggtgtctgcttctccccgccagccctcgatcccctaaacctccttctttcagaaggctggggaagcgaggcctggggagggaagggactcacctgcccggcagatggggtcctcacctgcccgctgctgccagctacacctccgttgcccaggccctgggatcaaaccctgcccaccagctcccctcgtccaaccagctgccacgtcctgtaaccaaaagtgaccgggatgaatgcctggctcccccttctttccagccctagctcaggcccatcgtccccagctgatgtcgccctgtctgcacgatgcctgggcgcctactccacactcctcactggcctcaggccccaccagccctgcctcgagctagcccctccacccgtcatcactcctgccagactccagatgtccaaggtgctccttggctcccacaagctctcctccagcaccccatcttcccctggttgcccctcggttccccacttccccagtttcccccgttaccccccacccatcccaccccctccctcaccctgctcctcggtcctagcccgggctttttctaactggggtggccccgcccagaattcccgcccctgccctgccggccaatcagagcagggccctcccgagggcccccgcagggcccacctccgccctggacagttccagcacacgtctctctcacccagcacccatcctggaattctccaaagacggcctccccgcacccctcctttggcatccggagacagggctgagcattgccccatcacctccctcagggtccaggacttctccctcccagaccactgtctcccctcaggggacaccatgcctgctgctccctgcctgccagcgccctgcacatactttgcacatggctgggggccagctgcgggtccctggggactcggatggcacagagggccccttcctgccaccatcacggctcagacctcacgttcctggagagtaggggtggggtgctgaggggcagagggaagtgccgcaaaccccctggtgggcgcggtgccagccccccaggccgattcccatccagttgaccgagcttgtgctggtcaccgcggtttccgcaggacagagtccccacagccgctgggcaccccggtcccattcgcggccactttcctgtctgaagaccgcatgttgccgggctgtgcttacggctcgcgggcgcactctactgacaagcggtgggcggcctcacagactctcccaggcccgcgtggggcaccacggttgggagtggagtggagactggcgagtttcgactcccccagccaccccgctgtgggtccgtcggtcaccaccttggcctttggtgagggttgttggggccctgcagtccctggggttcacctcaagtctcgagtgtcaaagccgtgaaggggagcaccagggccaagggacccagagttcacgggtccaatcacccagcaggccctctgggatgtggaagggctggccgcgccttcggcaaaccctctgttcccatggccccaccggaaagggctgagtgcttgcctgctgagcactgaccgccgggctttgtcgtgcgtgaaccccacgacatgggggaatttccatggcatgaaaattctcaggcttttccatgagtggacccccaagttaggagaccaaggcagacccccacattttgctaaaagtggagtccagccttgggtcaccttcagactgtgatgtgagtcaccactgccgcctctcggccatttccgtctccacagccacaaccgattctgtgccatcgctgggagatgggctcactggggacagcacccaagacccaaggggagactcaggaaatactccggaaatacaaatgctccaggcaaggcggctccccaggcccctcgctcctgctccaggcattgtgggaggggctagcacaggatccggtcgtgctgccagcaatgcgcaggcacggggaacacctgtgggcaaattcacctctccacgtgccaactaccgccggccggacgtgatgatccctgagcgtggagcacacccgagccatcgaacatcctaaccccatcaggatccccaccccgtaccgagtccacaagccgcagggtgtctgctgcacccacgataatggattatctccagcaacacaaggatcctggaccagagaataaagcagcagtggcgctcccagctctttagcatcttaagctcctgaattagcacctcaaacctgcattgaatgagaatgttaatgtctggccacttagggctgaggagatcagagtgttcactggggaggcaattgtcagttcagtaaaaggctggggatttgggggctgtccttagacggagtcggagctgtgctctgggatagatgtggaaaatgtaagattttggtggaacacactgtgatcatcacataagtaggcgtgacttgagtcccaggccatgacactgaagccctcggagtgtgacccggggccacggggctgtggataatgcccgacctgaagatctggt

SEQ ID NO: 1884366 - DNA, 4001 bp, Homo sapiens
agtcaccaaatgagctatatcctgagtttcatacaaataatagcctatacagaacttctaatttgagtcctaacatacctctacacactaccaacaatcctcttacacctccaaagagtacctccattgacctccctttctgtaaaaacattgtcttattctagagacgatttccccttcctaggagtaactaccccactaaatccacccacgagttctctcttttcttgcaggattgcaagaaagtatcttctctgtccttaaactcccattctccaacattctcatttccatcagaaatagtgcgtccttttggctgaatcagggtaaaatataaagacagaaaaagagtacaatgatatttcttagagagcatatttctttattctatttttatcatgcaggaactgaatcagcaggcaggatactgctcttctccccaacctcccccatctaaaggagatgagattttgggacataggtacaaacatagtggaccataggtacaaacatagtggacagggaactcagtggtcttgtgggctacagcattaaccacagcatttgttagttactgccaagaagcctgtatctgtagggtaaaatcctcgctgaagtgggttgccaaaacaatcaatatcacgttgcctaagagctggggagggagtgaagataaaaaagaaaatggtacatagtgaatagaaggcctcaagctggacttgcagtaaatagatataacacttacatcctttttcaccagagtttgagcaactctcaccattatgggctagatatcagcttcaatatgactggcagccctgcacctcccattgtgtcctatccttctcttacttgctatgccaactcactaccccaacatattgtgattgtttcattttttttttagagacttcgtccttttaaaaagtaggataatagtacttcaaggaacagtaatggataggataagtccccagtcatcacatacatacatacatacatacatacaattttcccaaacactcataacaaagaatcctgtaccatgcgtacaaaagtataccatcatcattcggagggaaacaatcctctttttaacagcttcccactactttgttcagttgatctttttctaacctccaggactatgcagaaaagtgactattaatttttatagaaaatttcgctgaccaaaggaaagatgttattttctctatctcaacttctgttccctcatccaaaaacactcagtttgattttggccagaattttttataagatgtgtttttcagagctatcaaatggtaagtggccttccattattcatagtccttgctctaccaaattttagttatgttatttacagcaacataactctcaaaatcccactgctgaaatatcatatcccatagctgactcataacacaagagaaagccacctctgctttcaaaagtacccatagtgcaaatatctaagggtaaagaagaaagcgtgagtgtacttactactcaccaggaagttctcagggtccacgtgcagcttgttacagtgcaggtcactcagtgtagcaaaggtgcctttgaggtcatccgtgagcataacagcttttccgaaggagatcagcaccttcttgccatgtgccttgactttggggttgcccattattgcacagtcagagcccagatatccaaaactttcaaagtacctctaggtccatgggtagacaaccaggagactgtgggatagtcataatcacagagcaggtgcaaagtcagactatgtaagacaacgggctaatccctctttcagaaacactttctgcctttctgcaccttgtcccggcttccagtacctacctgcccagaatctcacctccagccttctcaccttaaccttgcttcacaggctggtggcagcagccttcttgtcagcagtgaaatgcactacagtgtcagatctgggagtttcctggtgatcacagatgagccagaagcatgcctgcattgctgcttcatgtgtggctttttacttctcctctctggcccccagccctttgcctctcccagtgaaatgaatctattgaccagccctttgcctccctcagtaaaatgaatctattggtcaagggtgggttgtgactccaggggtggggtttgggcaaggaagttttgcaagatggacattcgagtttctgatagaatccaggtggccttctcaggggaactttgctgttcaggcttaatttgaaactttacttccttcccctccattttcctacactacccccaccatccagtgtgcagtttatttctcaaggacttcgccagcagccgctaataacctgaatgctgacaaataggaataagttacaactgaaaaggataagaattacgaatatcttagccatcaattcctggatcaggagttgtgacaatgtaacaacgtgttatcctgttattcatccaggctttatgtggaagaagccacagcctttcttggttttcaattctcttgagactacattgaatacacaatttcatcagtttttttttctttctttctttctttttcttttttttttttttttttttgagatggagtctcgctttgtcacccaggctggagtgtgcagtggcgcgatctctgctcaccgcaagctctgcctcccaggttcacgccattctcctgcctcagcctcccgagtagctgggactacaggcacccgccactgtctctggctaattttttgtatttttagtagagatggggtttcaccatgttagccaggatggtcttgatctcctgacctcgtgatccgcccacctcagcctcccaaagtgctgggattacaggtgtgagccaccgcgcccggccaatttcatcactttttagaatagaaataaacacctctatccagcatcaacttggaagaaagcagaataagaaacaaactagggaagtaaggggaaaactgggttttattactgtgttttttaatccatttagtagtcagtgtacttatctgaacaaaggagatttcctctgaatcattgaacaatagtccatgtcaaatcctacatatctacaaaattatgccagaacatctaatagtgttgggggagaagtgtgctgctctgttcaagcaagaggataggagattccgtggcccgtgctgggcattaggtcatttgtgtctggcacaggcttgatctatagtctaatgctgtgtttaacttgtctttatatctaatcaggcaaagacattcttcactgacaatattccacaggctgctgcacgtgtctcatgtgctgcacgtctcatgcgtctcaaacaagcaatttcaggaatagacagggcacacttccaccggcagagagaagaacagtttattttatattcttaaggcttactgtcctcatacttagaggttcaggatgctggtttgtgtgttacccctgagataaatccttacaagaaataaagtttaggaaatcacccccatgtgtatttcaaggagactctaaatttcaaagagttaaacccaatatattaaagctgaatttctgatattagagacacaatattttagtctacttgatatagttgagaggcagttacctgttttacttaggaacatggggaaagtttgtagtgacaaacagtttgaggcaaaaccaagattatctttaagagcagagatcgatgatatgaagaaaaagaagtggcaactttgactatatgcaggaaacacatttatattgagttgtggggactggcctcagaggaaacttcaggtcatgtcctttaatggccctaaaactcattcccaaaagaatttctgttcattgccatacctcatatccttaggtacatacatctaaaaccctgcgtaccagtgaacagctgccccatctttccatcagccaaccaggaattcagcagttactgctaacttccacttttctctcacccgctccaggaaaagtgacctgcagtcac

SEQ ID NO: 1884367 - DNA, 4001 bp, Homo sapiens
ttgaagtaggctgggcctggtggctcatgcctgtaatcccagcactttgggaggccaaggcaggtggatcacctgaggtcaggagttggagaccagcctggcgaacatggtgaaaccccatctctactaaaaatacaaaaattagcagggcatggtggcaggtgcctgtaatcccagctactcgggaggctgaggtgagagaattgcttcaacctgggagtcagaggttgcagtgagccgagattgcaccattgcactccagcctgggaaacaagactgaaactccgcccccccccccaaaaaaaaaaaagagagaaaaagaaaaatgtaagtagatgagcattgacaccatcaccaaaaaccttctcaactgcttttacaacaggaaaaaagagaagggctatgtgtatagtgaatatcgcagggaagaggaacagtcccagtctttgggctagacaccttcctctaccactgccttgttagacacttgagcaggtcctttagctgctttaaatcagaatttctccccctccttttttttttaaataaaaggattgaattacaagacttctaggaccctttaagcctgaaaatcctagctttcagtttcatttctcaaagtcaattaattgcatctgagctgtcaagattcattggtatttgtctagcaggagtttgttttcaaaactccttcctattctccttttttttcagtctggaagcttctgttagcatttgagccaatctcatcgtttcttcaattaaatccaacacttcttggaaactggctggaaggctacagcctggatggcagagaagggattaacaagagttgctcattagcacgatacggctaatgaagaaactgtgtggcgatcgcttctctggagaggagtttaaccttgggaaggatttcactggtggcggctgaggacactgatgcctttgagaaggggttgcagaaattagcctagggttgcactcactaagagagagagagccttaagtaaaggcacttggaatttgttcaggccaatctgtagggagcagatgtcgccaggagcttggggctgggatgtgagccaaggtcgaagaaggagtcaggaaaaccctagtgacagatcagcggagccagcggccatgcctgttatagaatgaaatgctggcttccaatgtttgcagccagctttgctgtatctgagaagagttggaaggaagatgaaaagatgaaaaacgcctgccaagcagatagcagtcttgcctgccacgtctgaaatggcatgtttaatcacagtggcacactttctcttgcctactaatgacagaaggaagttcctaatgaagttattgctctgctgactgaattaatgatttccagttacagggcttgtaaacacaccatgttacacgtgcacgtgttaattgaggcttcactttagagacactgactccacagataactcatcacaggtagcaaagtaccaagagaaagcagggctaaccaaggggaatgggctgtggttgcttggaacactcagggcctgataagtatttgtgaattagggaaaggggaaagggagagaagtggatgacacctatctaaagatgagaaagagggcaccagagagcagataaagcaatccgtatccctgacctgtgcctctgccatcccctatatccaacttcatactccattcctacagcattcattcttcccaccttcaagcccactcactgcaaatccctaatttagacgttgcactgaacatatttgcccaatggtgagcctgataatatggccaaatatgctggagaaagaaattgtttttttcttttccaaacgtgttttttaaagccatcagaaggacatgcgtcttttaaggtggcaagctcacctgtggcgtcacggggtccacagcaaggaggacacagagaagccaatctcggaggccacaggctgcgtcccacttcctgtggctgcgctgctgccatctgcatctgagtcggtcagggactgagagcacagcaggccggggagcgagcggctgccaaattacagagcaaggagcacttaggatggtgggagggggaggaaaggaggaagctaactaatagcttgcaagcgtgtcttctaaaaagtgtgttaaccaaacaagctgccatcccttaatccctcccactcctgcctgaatgtacactaattgaaaattaagttttcaatttgaagccattttctaattctgtctcattcaggagcagttagagcgccggtgttttgctgaattcccagcgtgcttttcatgagctccctcagaaagccaacaaaagagtcttgtcaacatgtttctgacagcagcaggaaaaagggtttgtgtagaaggagagggtcatcttgggagccaaagaaagcaaggccagaccaggctacagatcctgcagatcttgactggacatagaagacatttatttcctccttccttttcccatctcttctttccccagttaaaccgtagttacagcctggtcagaagggaatcctctcactcgtcactgacctgtgcccagcacatttggaaaacctcgccaataacaccagaagctccttgtgggcaggcactctgtcgtatacagacaggctttgatttccaggggtaattgactaccgtgaatgaacttacttaaaaggagaggaaaacgtcatagaaaatagagaaaacgaggtttactggggttctatattaaaacctgaagtgggctgggcatggtggctcacgcctctaatcccagcattttgggaggccaaggtgggaggattccttgaggtcaagagttcaaaaccagcctgagcatcagaacgagacctcatctagaaaaaagaaagaaaagaaaggaagaatggaaggaaagaaggaaggaaggaaggaaggaaggaaggaaggaaggaaggaaggattcaagcatggtgcacgcgcctgtgctcccagctacttgggaggcctgagcatgggaggtcgaggctggagtaagctgtgatcgtgccactgcactccagtctgggtgacagcaagaccctgtctcaaaaaaaaaaaaaaaaaaatatatatatatatatatatatatatatatgtacatatatatatgtacatatataaaataaaataataaaacctgaagtgaaaagttataaaaattgatttaaacttataaataacaagctgtaggtcattactattccagaataaagaataaatcatgcattgattcctttagcataattttttcacaaaattgtgtgattgcacaatagggtattctttatttcatatttaacgctctcagtgagaacaaataagagagtcatttttgaaaaatacttaaaggcttcctcattttgccgaagagactcccttaggcatttgatattttaatcattttctctcaaagaagttcaggcatcctcatccttatctgcttcaatttataagggttcttctgattcctgttttgccaatggttcagaccatcctccaatatcaattccctcgacttcatgaaatcctacaccttttgcaatattttcagtttcactttgcaattgattgccattgaatttgcactgcatttgttagacattcatctttcatcaaacatcaagagcctgacacccactcacaaagaccctgagtcatggaaggatgtgtcctggagaactgttggaaaaggtgagtttgttagtgggtattgtcatttgcgaagcttttcctatgcaatttcatagagcccctgtgatttgttgagtaacccagatatctgtcacaggttgctaccaagtcgtgatttcaaaataatctaattctaattaatgggctcctggaaaggggaaagaaggaggctttgtttgggaacttaattaatgaagtatttccaaacatcatgataaattatgacaaatgacatgaccactacccccttcttaatatttgtgatgaacaagaatctca
